United States Patent Application Publication US 2019/0348154 A1 - sequence listing, part 110

SEQ ID NO: 413556 - DNA, 2409 bp, Staphylococcus aureus
atgatagcgaaagtcatagtcgatgtcgcgtcgaagagcgttgactataaatttgattatataattcctgaacaactcgaatctgtcatccaacctggtgtgcgtgtgattgtaccttttggaccaagaacgattcaaggttatgtaatggaagtaacagcagaacctgatgcacaacttgacgtttcgaagttaaaaaaaatcatagaagtgaaagatatacaacctgaattaacatcagaattaatagctttaagtgagtggatgggttcaactcatgtcattaaacgtatttctatgctagaagtgatgcttccgagtgctattaaagcgaagtataaaaaagcatttaagatgaaagatgacaaagaggtaccttcagctttattacaaaaatttgataagcatggttactattattataaagatgcgcaaaaaaataatgatattcaattgcttatgaagttgttaaaagatgatatcgttgaagaaaaaacgattctcacacaaaatataactaaaaaaaccaagcgtgctgttcgtgtcattgaagggtatcatcctgatgaagtattagctaagttggagaaagttattaaacaatacgatttgtatgcttacttgtctgaagaacaacataaaacaatatttttaactgatattgaggatatgggcttttcaaaatccagtttagatggacttatcaaaaaaggttatgttgaaaaatatgacgcggttgttgaaagagacccatttaaagatcgtgttttcgaacaagaatcaaaacagcaattaacagaagaccaatataaagcatatgaagcgattaaagctaaaattgtaagccaagagcaagaaacatttttacttcatggtgtgacgggatcaggtaaaacagaagtatatttacaaacgatagaagatgttttaagccaaggaaaacaggcgatgatgttagttcctgaaatcgctctaacaccgcaaatggttttacgcttcaaacgtcgatttggtgatgacgttgctgtattacattctggcttatctaatggggaacgttatgatgagtggcaaaaaattagggatggtcgtgcgagagtaagtgttggtgcaaggtcaagtgtgttcgcacctttcaaaaatttagggttaatcatcattgatgaagaacatgaatctacatataaacaagaagattatccgagatatcacgctagagaaattgcccaatggcgaagtgaatatcatcactgtccagtcattttaggaagtgcaacaccatgtcttgaaagttatgcacgagctgaaaaaggcgtttatcatttgctatcattaccaaacagagtgaaccaacaagctttacctgaaattgatatagtagacatgcgtgaagaattgagtgaaggtaatcggtcaatgttttcaaaagatttacgtgaagccatacaattaagattagatcgacaggaacaagttgttttatttttaaatcgacgtggttatgcatcgtttatgttatgtcgggattgtggatatgtaccgcaatgtccaaactgtgatatttcattaacgtatcataaaacgacagacttattaaaatgtcactattgtggttaccaagagacgccaccgaatcaatgtccaaattgtgagagtgaacacattcgacaagtaggtactggtactcagaaagttgaagaactattgcaacgagaatttgaagatgcgcgcataattaggatggatatagatacaacctcaaagaaaggtgcacatgaaaagttattgactgaattcgaaaaaggtaacggtgacattttactaggtactcagatgattgcgaaaggattagattatccaaatattactttagttggtgtgctgaatgcagatacaatgttaaatttacctgattttcgggcgagcgaacgtacttatcaactattaacgcaagtggctggtagagctggtcgtcatgaaaaggcaggtcaagtcatcattcaaacgtataatccagatcattattcaatattggatgttcaaaaaaatgattatttaacattttatcgtcaggaaatggaatatcgtaaattaggaaagtatccaccgtattattatttgattaatttcacaatctcacataaagaaatgaagaaggttatggaagcatcgcagcatgttcataaaattttattacagcatttaacagaaaaagcgcttgtactaggtccatctccggcagcacttgcgagaatcaacaatgaatttagattccaaattttagtgaaatataaaagtgaacctggattattacaagccattcagtttttagatgactattaccatgaaaaatttataaaagaaaaattagcattgaagattgatattgatccacagatgatgatgtaa

SEQ ID NO: 413557 - DNA, 1200 bp, Staphylococcus aureus
atgaagaaaatattattagccgttacaggtggcattgcggcatataaagcgattgatttgacaagtaagttaacacaatctgggtatgaagttcgcgttatgttaacgaatcacgcacaaaaatttgtgacaccattagcatttcaagcaataagtcgaaatgctgtttatacagatacttttatagaagaaaatccttcagaaatacagcatattgcattaggtgattgggcagatgcaatcattgttgcacctgcaacggcaaatacaattgcaaaattgagtgtaggtattgctgatgatttggtgacatcaacgttgctagcaacagagacaccgaaatttattgcgcctgctatgaatgtgcatatgtatgaaaataaacgtacgcagcaaaatattaatattttaaaagaagatgggtatcattttatcgaaccaggaagcggatttctagcatgtggttatgttgctaaaggacgtatggaagaaccgcttcaaatcgtttctgttattgatgctcattttcaaaatagtaatcgtttagctaatagttcatttcaagataaacgcgcattggttacagcaggaccaactattgaagttatcgatccagtcagatttgtatccaatcgttcttctggaaaaatgggttatgcaatagctgaagcattgcgaaatcgaggagctatcgtgacgttagttgctggtcctacaacactagaggatccaaaagatattgaagttattcatgttcaaagtgctgaagaaatgtttgaacaagtgacaagccgatttgacgaacaagatattgttgtaaaagcagcagccgtatctgactatacaccagttgatgtattagaacataagatgaaaaagcaggatggtgatttatcagtatcttttaaacgtactaaagacattcttaaatatttaggtgaacataaaacatcacagtatttaataggctttgcagcagagactgaagatattgaaaattatgcacaacaaaaattacgcaagaaaaatgcagatgtgattatttcaaataatgttggggatatgtctatcggatttagttctgatgataatgaattgacaatgcattttaaaaataatgaaaaggtaaatatcaagaaaggaaaaaaagtagtattagctgcacaaattttagatgaactagaaactaggtggcaataa

SEQ ID NO: 413558 - DNA, 219 bp, Staphylococcus aureus
atgttaaatccaccattaaaccaattaacgtcacaaattaaatcaaagtatttaattgcaacaactgcagcgaaaagagcgcgtgaaattgatgaacaacctgaaactgaattattaagtgaatatcattcatttaaaccagttggtagagcgttagaagaaattgctgacggtaaaattcgccctgttatttcaagtgattattatggtaaagaatag

SEQ ID NO: 413559 - DNA, 624 bp, Staphylococcus aureus; identical to SEQ ID NO: 405748

SEQ ID NO: 413560 - DNA, 225 bp, Staphylococcus aureus; identical to SEQ ID NO: 407256

SEQ ID NO: 413561 - DNA, 360 bp, Staphylococcus aureus
atgtggcaattgagtcagatatataaaccctcaagcaagcaatctttatcctcttttttattcactcgattaaattattaccttatcgatttattcagacaacaaaatcaattaaaagatgtcattttatgtgagaataattcaccaacattaactgaacaaccaacatactttaatgaacatgaccttcgtttacaagatatcttcaagcttttaaatcatagagaaagactatggctcaaactataccttgaaggatacaagcaatttgaaattgctgaaatcatgtcattatcgctttcaacgattaaattaattaagatgtccgttaagcgtaaatgccaacataattttaattag

SEQ ID NO: 413562 - DNA, 444 bp, Staphylococcus aureus
ttgcaagacaattctactaaatatctactttatatccaaactgctacttcaaaccatctcgaaacaaattgtgtctttttacattgcgattacattcttaaagttccaattaacaaactagtttcatattatgcgaaattgcatttatcatcacaaagtgtgctaactgagactgcaaaaaacatactaaatattaataaactggttcctatttacatcaacccaaaaactatactttttccgttaaaacataaacgtgcaccgatacaaatttatatcaatgcacattatattgttggtatgactgccatagagaattcaacattaatacattttcaagaaggcattcagctagaagttgatgagccattttctctagtttcaaaaaaatgtcatgaaagtttagctttgaagcacttcattgaaaatactatttcgaattaa

SEQ ID NO: 413563 - DNA, 444 bp, Staphylococcus aureus
atgaataaagcatcatttgataaaaaagttaaaaagcaattatggtttttgaacaagaaggagaaacaagcattagatcaacgattgtcttctatatctgatgatgacagcgttaacttaaataagcctgttacctttgctaatgcttacttaagacaaaatgtatttcgaaataaagaaacaaaaagttatagtatgtttgttacattagtagtgatgatgtttgcttatgttgctttattaggtttgtttttatttgggctaattacaagtctatctggcgtacaatttttcgttagtcctaaggtagatttatcaacaactgttgttattttaacaattattggagcgattttattaatgattgttagcatatattttataaaaattgtgacatcatactttactaagaaacttttagaaattaaatttaattcgaaatag

SEQ ID NO: 413564 - DNA, 303 bp, Staphylococcus aureus; identical to SEQ ID NO: 407250

SEQ ID NO: 413565 - DNA, 366 bp, Staphylococcus aureus; identical to SEQ ID NO: 407249

SEQ ID NO: 413566 - DNA, 354 bp, Staphylococcus aureus
atgatatcaatcattttagtcatgattggcggcggtttcggcgcaattgctagaagtgccattactgattattttaatcataaatttacttcaaagttacctatcgcaacattgatagtaaatctagttggtagttttttaattggattaactataggcttatcaatttcaatctcatggttccctgcgttctttgttaccggttttttaggtggcttaacaactttctcaacgttagctaaagaacttacactaatgatgacgccaaaatttaatattaacctttttctcaattattcacttttacaattcatcattggatttatagcttgttatattggctatcatatttaa

SEQ ID NO: 413567 - DNA, 687 bp, Staphylococcus aureus; identical to SEQ ID NO: 404983

SEQ ID NO: 413568 - DNA, 729 bp, Staphylococcus aureus; identical to SEQ ID NO: 404986

SEQ ID NO: 413569 - DNA, 732 bp, Staphylococcus aureus
atgattcaattgaacaatatccataaatcatttaatgatgttgaagtcatcaaaggtattgatttatctgttgaacaaggtgaggttgtaaccttaatcggtcgatctggttcaggtaaaacaacattgttacgtatgattaatgcattagaaattccaactgaaggtacagtttatgttaacggcaaaacatatacatctaaagataaaaaatcacaaatagaagttcgtaaacagtctggtatggtatttcaaagttataacctttttccgcataagacggcattagaaaatgtaatggaaggtcttatcacagttaaaaagttgaaaaaggatgaggcacgtgggaaatcacttgagttacttgagaaagttggtttaacacatgtcaaagatcaacgtccacatgcattatcaggtggtcaacaacaacgtgttgctattgcaagagcactagcaatgaaccctaaagtgatgttgtttgatgaaccaacatctgcacttgatcctgaacttgtgaatgatgttttaaaggttattaaagatttggctaatgaaggcatgacaatggtcattgtgacacatgaaatgcgttttgctaaagaagtatctaataacattgtatttattcatgaaggcatgatcggagaacaaggggcaccagaagagatgttcaatcgtccgaaaacagaagaattaagacgtttcttaaatgttataaatgaagaataa

SEQ ID NO: 413570 - DNA, 1713 bp, Staphylococcus aureus
gtgaaacattatttgactaaatttgtagcaatgctaataactgctgctatggtgtgtagctttgggttactgaaaagtcaggcagcagaacaacaaagtattagtgatgtatatagtgtgataacggatgcgaaatctgcactttctaataattcgatatcgaatgacaataagcagaaagcaattgagcaagtggtaagtgcagttaagaaattatcgcttgaagataatagtgaaggtaatgctgtcaaatcagatgtgagaaagcttgaagatgcaaaagcgaatgataatcaaaaagatacactttcgcaattaacgaagtcattaattgcttatgaagagaaattggctagtaaagatgcgggttctaaaattaaactattgcaacagcaagtcgatgccaaagatgctgcgatgacaaaagcgattaaagataaaaataaagcggaattagaatctttgaacaatagtttgaatcagatttggacaagtaatgaaacagtgattcgcaattatgacgcaaatcaatatggacaaattgaagtcgcattattacaacttagaattgcaattcataagtcaccattagatacggcaaaagtgtcacatgcttggacaacttttaaatcaaatattgatcatgtcgataaaaaaagtgatacgtctgcaaatgatcaataccatgtatcacaattaaatgatgcgttagagaaggcgattaaagctatcgacgacaatcaattgtcggatgctgatgctgcgcttacacattttatagaaatttggccgtatgttgaaggtcaaattcaaactaaagacggggctttgtatacgaaaattgaagataaaataccatattatcaaagtgtattagacgaacataataaatcgcatgtcaaagatggtttagtagatataaacaatcaaattaaagaggttgttggccatagttatagctttgtcgatgtgatgattatctttttacgtgaaggactagaagtgttattaattgtaatgacattgactaccatgacgcgtaaagtcaaagataataaggggactgcaagtgtgattggtggtgcaattgccggacttgtactgagtattatcttagcaattacgtttgtagaaactttagggaatagtggcattcttcgtgaaagtatggaagcgggattaggtatcgttgcggtcatattaatgtttatcgttggtgtttggatgcacaaacgttcaaatgcgaaacgctggaatgatatgattaaaaatatgtatgccaatgcgattagtaatggtaatttggtattgttagcgacgattggtttaatatctgtgttgcgtgaaggtgttgaggttatcattttctatatggggatgataggtgagctagcgacaaaagattttattattggtattgccttggccatagtgatattaattgtctttgcggtattatttagatttatcgtcagattgatacctatattctatatatttagagtattgtcgatctttatttttattatgggattcaaaatgcttggcgtaagtattcaaaagttacaattattaggtgcgatgccaagacatgttattgaaggattcccaacgattaactggttgggcttctatccaagttatgaaccattgatagcacaagctgcttatattatggtagttgctatcttaatctttaaatttaaaaaataa

SEQ ID NO: 413571 - DNA, 909 bp, Staphylococcus aureus
atgagtgtatttatagataagaatactaaagtaatggtacaaggtattacagggtctactgcccttttccatacaaaacaaatgcttgattatggtacgaaaatagtagcaggtgtgacgcctggtaaaggtggtcaagttgttgaaggcgttcctgttttcaacactgttgaagaagctaaaaatgaaaccggggtaacggtttcagtcatttacgttccagcaccatttgctgcagactcaattttagaagcagctgatgcagacttagatatggttatttgtatcactgaacatattcctgtattagacatggttaaagttaaacgctacttacaaggtagaaaaacacgtttagttggtccaaactgtccaggtgtgattacagcagatgaatgtaaaattggtattatgcctggctatattcacaaaaaaggtcatgttggtgtagtatctcgttcaggtacattaacatatgaagcagtgcaccaattgactgaagaaggtattggtcaaactacagctgttggtattggtggagacccagttaatggcacaaactttattgatgttttaaaagcattcaatgaagatgacgaaacgaaagcagttgttatgattggtgaaatcggtggtacggctgaagaagaagcagctgaatggattaaagcgaatatgacaaaaccagttgtaggctttatcggtggacaaacagcacctcctggaaaacgtatgggacatgctggtgcaatcatttcaggtggtaaaggtactgctgaagagaaaattaaaacattaaatagttgtggtgtgaaaacagcggcaacaccttcagaaattggttcaacattaattgaagctgctaaagaagcaggtatttatgaagcattattaacagttaataaataa

SEQ ID NO: 413572 - DNA, 1167 bp, Staphylococcus aureus
atgaatatccacgagtatcaaggtaaagaaatatttcgttcaatgggcgttgcagttccagaaggacgagtagcatttactgctgaagaagcggtggagaaagcaaaagaattaaattctgatgtttatgttgtaaaagcacaaattcatgctggaggtagaggtagagcaggcggagtaaaaattgctaaatctttatctgaggtagaaacatatgcaaaagaattattagggaaaactttggtgacacatcaaactggtccagaaggtaaagaaattaagcgtttatatatcgaagaaggttgtgctattcaaaaagaatattacgttggattcgttattgatcgtgcgactgaccaagtaacattgatggcgtctgaagaagggggcactgagattgaagaagttgctgcgaagactcctgaaaagatcttcaaagaaactatcgatccagtaatcggactttcaccattccaagcaagacgaattgcgtttaatattaatattcctaaagaatctgttaacaaagctgctaaattcttattagcactttataatgtattcattgaaaaagattgttcaatcgtagaaatcaacccattagttacaacagctgatggtgatgtattggcattagatgctaaaattaattttgatgataatgcattattcagacataaagatgttgtagaattacgtgatttagaagaagaagatccgaaagagattgaagcgtctaaacatgatttatcatacattgcattagatggtgacatcggatgtatggttaatggtgcaggtttagccatggcaacaatggatacgattaatcatttcggtggaaacccagccaatttcttagatgcaggcggaagcgctactagagaaaaagtaactgaagcatttaaaatcattttaggtgatgaaaatgttaaaggtatttttgtaaacattttcggtggcattatgaaatgtgatgttatcgcagaaggtatcgttgaagctgtaaaagaagtagatttaactttaccactagttgtacgcttagaaggtacaaatgttgagttaggtaaaaaaatcttaaaagactcaggattagcaattgaaccagcagcaacaatggctgaaggtgcacaaaaaattgttaaactagtcaaagaagcataa

SEQ ID NO: 413573 - DNA, 768 bp, Staphylococcus aureus
atgacgctaacaattaaagaagttaagcagttgattaatgcggttaatacaatagaagaattagaaaatcatgaatgctttttagatgagcgaaaaggtgttcaaaatgccatagctaggcgcagaaaagcgttagaaaaagaacaagctttaaaagaaaagtatgttgaaatgacttactttgaaaatgaaatattaaaagagcatcctaatgctattatttgtggtattgatgaagttggaagagggcctttagcaggaccagtcgttgcatgcgcaacaattttaaattcaaatcacaattatttgggccttgatgactcgaaaaaagtacctgttacgaaacgtctagaattaaatgaagcactaaaaaatgaagttactgcttttgcatatggtatcgcgacagctgaagaaatagatgaatttaatatttataaagctactcaaatcgccatgcagcgagctattgatggattatcagtacaaccaacgcatttattgatagacgcgatgacgcttgataatgcactgcctcaagtatctttaatcaagggtgatgcaagaagtgtgtccattgcagctgcaagtatcatggcaaaggtttttcgtgatgattatatgacacagttatctaaagattatcctgaatacggttttgaaaaaaacgcgggttacggtaccaaacaacatttactagcaatcgatgatattggcattatgaaagagcatagaaaaagctttgaacctataaaatcgttactgtaa

SEQ ID NO: 413574 - DNA, 516 bp, Staphylococcus aureus
atgattgttggaattccaaatgttggtaaatccacattaataaataaactggcaaagcgtagtattgcacagactggtaataaaccaggtgtgaccaaacaacaacaatggattaaagttggtaatacattacaactattagacacaccagggatactttggcctaaatttgaagatgaagaagtcggtaagaagttgagtttaactggtgcgataaaagatagtattgtgcacttagatgaagtagctatatatggattgaactttttaattcaacatgatttagcgcgattaaagtcacattataatattgaagttcctgaagatgcagaaatcatagcgtggtttgatgcgatagggaaaaaacgtggcttaattcgacgtggtaatgaaattgattacgaagcagtcattgaactgattatttatgatattcgaaatgctaaaataggaaattattgttttgatatttttaaagatatgactgaggaattagcaaatgacgctaacaattaa

SEQ ID NO: 413575 - DNA, 210 bp, Staphylococcus aureus
atggcaatacattatgaaactaaagcgacgaatgttggcggacgtaaaggacatgtttatactgatgatcgagcgttagatattgatatcgttccgcctgctcaagcagatggtaaagctactaaccccgaacaattatttgcagcaaggttatgcatcttgcttcaacggtgctttcgacctaattttaaagcaaaacaaagtgcgtga

SEQ ID NO: 413576 - DNA, 483 bp, Staphylococcus aureus
ttgaaaaagtttttaagattcaaggggatgaaaatatgtttaatgctatatctactgatttttttaagtagttgtggcacaaataataaaatagtagaccaacgatttgaaatacaacaacataatgaaacaataggtagtatttacttttcagcagactatgcacatataagaggtatagaaaaaggcactgcaaaatatttcgtagacaaagtaggcagcaaacgttacttatttattgaatatattccggataatgtattgaattgcaagccggacttttggaaaacgttaaaatataaaaaggacaaggtaacatattatgtatatctcattgaaaatttagatgatgaagtattccatttaagtgcattacaagacatgaatcgtataccaattgacattgcagatgatgtggcaaaaatgggtaaatcaccacatcaaaatgacagaatgacactaaaattaaataaaaataactga

SEQ ID NO: 413577 - DNA, 615 bp, Staphylococcus aureus; identical to SEQ ID NO: 407235

SEQ ID NO: 413578 - DNA, 996 bp, Staphylococcus aureus
atgagcaatcaattcaaaagcgaagaagagcgaagacaatgggaacaattccaagctttccaaaatcaacaaaaccaacagaaccagcaatacggacaaaagaaatctaaaaaaggatggttctggggctgtggtggttgtctagtattatttattttaattatcatcggtatttcagcttgtacagctggtattacaggtaaccttggcggaaatagttctaaagaaacgaacaaaacccataaaatcggtgaaactgttaaaaatggcgaccttgaagtcactgtaaattcagtggaaactatgaaatctgtaggaccatctcttgcaccaacaaacgctaaaggtatatttgtcgttgctgatgtgacgattaaaaacaaaggtaaagaagcgttaacaattgatagttcaatgtttaagctaaaatccggtgataaaacatttgaagcagataatacaggttcaatgtctgctaatcaaagtgacaatggtagtatagaaaattcatttttcttacagcgtataaatccagatagcactgctcaaggtaaaattgttttcgatgtgtcagaaaacatagccaacgcaaaagataaaaaattagaagttatttctagtttatttagcgtcaagaagattacatttgatttatccgatgctaaaaaaacatcaaaagctaaaaaagacaagcaagatacagaagtagctgttgcgagttcaaatagcgataatgtaagttatgaagcttcggctactacacctgctacaacttctagtgcaaataatgattctgaagaaaatgaacagtctagtaaagatgaagataagcagaatacgtctaaaagtgataaatctagtgtagaaaaaagtgaatctaatgaagaaactgctcctgtagagcctatgccccatagcaaacctaccactagtgaagcaccacctagtcaaaatattcacaatgaagatagcatgtacgacgcttcaacagaataa

SEQ ID NO: 413579 - DNA, 342 bp, Staphylococcus aureus
atgataacatttgagaatatacaacaacttgaaaaatacaccttaatgactatgcatggtctttttaatcaacttaaactcggtattatttcaatcgacaatgcagagcataccctctttacaccttatatgatggaatcactctcttccctaggtgtgaaaccagacattatcgatttaattcacaaagggacagagttagaagactttgcagcatttaatttatcaattgaagatacagttacagtctgtttacaaagaactgaagaactattaaaacaatacaaaaatgtagaattcaatgacaaaatattaatcaattggcgtattatacaagagtaa

SEQ ID NO: 413580 - DNA, 573 bp, Staphylococcus aureus
gtggagaaaaacgaatatacagctaaatataatgaatatagtcaattattagacgctacttactcgcaagctgtagcataccttttaaataaatatggcgctgtaaccgatgattattataaggaaaaatcatacacgcgatttttaaatggagaaatcaaaagtatttcaaaaggaaaatacactagagctagcgaaggattatattgtcatcacataagcgaagacaaattccaaaacttatctgacctaagattcatttccgaatttaagtactcatacaacgttcaaaagaaagaaaacttagtatactgtgatctaatcgagcatttaattttacatgcaattattacaaaagaatccaatggccaatttggtgtggctggattatgtcaaatgatcaaaccaacagtcattgattggtacattggcgaatataatccaaaaccagcatggatgcaagccaccaaagcacgtgcctatttgcctggaatattagttgagaaattactcattaaaattgacgatatgttagaaggaatagaaatatatgatttccttgagtcgcgataa

SEQ ID NO: 413581 - DNA, 558 bp, Staphylococcus aureus
ttgaaagttattgagaaagttcattatgaagatattttagaaccagaaatagttcaattaattcagtcattagttaaggacaaaatggatcaactttttattacttctgaacattttgctattgacatagacaagctattatttcaacttaatttaaaagttaaatatattaaaatggagggtaatacttcgggttatttaagtggaagaacgatttatatcaataataatctctcgattaataatacaagatttgcaatagctcgtgaactcggccgttttttatacaaaattaaagataacaacgataatagtctaaagaatttacatgaaatgatttatgaaagcgccgtaaatcagttttcagtcgacttacttatgcctaaaaagcaaatagaggcattagtctataatttttatgaagtcaataatatcaatctaaattctggtttatctgaaaaagaacgaaacaaactattgaaccttatatcaactaagttggaagtttcgaaagtagctgctggattaaggctgtataatttaggaatacatatttaa

SEQ ID NO: 413582 - DNA, 1974 bp, Staphylococcus aureus
atggctaaagaaacattttatataacaaccccaatatactatcctagtgggaatttacatataggacatgcatattctacagtggctggagatgttattgcaagatataagagaatgcaaggatatgatgttcgttatttgactggaacggatgaacacggtcaaaaaattcaagaaaaagctcaaaaagctggtaagacagaaattgaatatttggatgagatgattgctggaattaaacaattgtgggctaagcttgaaatttcaaatgatgattttatcagaacaactgaagaacgtcataaacatgtcgttgagcaagtgtttgaacgtttattaaagcaaggtgatatctatttaggtgaatatgaaggttggtattctgttccggatgaaacatactatacagagtcacaattagtagacccacaatacgaaaacggtaaaattattggtggcaaaagtccagattctggacacgaagttgaactagttaaagaagaaagttatttctttaatattagtaaatatacagaccgtttattagagttctatgaccaaaatccagattttatacaaccaccatcaagaaaaaatgaaatgattaacaacttcattaaaccaggacttgctgatttagctgtttctcgtacatcatttaactggggtgtccatgttccgtctaatccaaaacatgttgtttatgtttggattgatgcgttagttaactatatttcagcattaggctatttatcagatgatgagtcactatttaacaaatactggccagcagatattcatttaatggctaaggaaattgtgcgattccactcaattatttggcctattttattgatggcattagacttaccgttacctaaaaaagtctttgcacatggttggattttgatgaaagatggaaaaatgagtaaatctaaaggtaatgttgtagaccctaatattttaattgatcgctatggtttagatgctacacgttattatctaatgcgtgaattaccatttggttcagatggcgtatttacacctgaagcatttgttgagcgtacaaatttcgatctagcaaatgacttaggtaacttagtaaaccgtacgatttctatggttaataagtactttgatggcgaattaccagcgtatcaaggtccacttcatgaattagatgaagaaatggaagctatggctttagaaacagtgaaaagctacactgaaagcatggaaagtttgcaattttctgtggcattatctacggtatggaagtttataagtagaacgaataagtatattgacgaaacaacgccttgggtattagctaaggacgatagccaaaaagatatgttaggcaatgtaatggctcacttagttgaaaatattcgttatgcagctgtattattacgtccattcttaacacatgcgccgaaagagatttttgaacaattgaacataaacaatcctcaatttatggaatttagtagtttagagcaatatggtgtgcttactgagtcaattatggttactgggcaacctaaacctattttcccaagattggatagcgaagcggaaattgcatatatcaaagaatcaatgcaaccgcctgctactgaagaggaaaaagaagagattcctagcaaacctcaaattgatattaaagactttgataaagttgaaattaaggcagcaacgattattgatgctgaacatgttaagaagtcagataagcttttaaaaattcaagtagacttagattctgaacaaagacaaattgtatcaggaattgccaaattctatacaccagatgatattattggtaaaaaagtagcagttgttactaacctgaaaccagctaaattaatgggacaaaaatctgaaggtatgatattatctgctgaaaaagatggtgtattaaccttagtaagtttaccaagtgcaattccaaatggtgcagtgattaaataa

SEQ ID NO: 413583 - DNA, 840 bp, Staphylococcus aureus
atggctgtattatatttagtgggcacaccaattggtaatttagcagatattacttatagagctgttgatgtattgaaacgtgttgatatgattgcttgtgaagacactagagtaactagtaagctgtgtaatcattatgatattccaactccattaaagtcatatcacgaacataacaaggataagcagactgcttttatcattgaacagttagaattaggtcttgacgttgcgctcgtatctgatgctggattgcccttaattagtgatcctggatacgaattagtagtggcagccagagaagctaatattaaagtagagactgtgcctggacctaatgctgggctgacggcattgatggctagtggattaccttcatatgtatatacatttttaggatttttgccacgaaaagagaaagaaaaaagtgctgtattagagcaacgtatgcatgaaaatagcacattaattatatacgaatcaccgcatcgtgtgacagatacattaaaaacaattgcaaagatagatgcaacacgacaagtatcactagggcgtgaattaactaagaagttcgaacaaattgtaactgatgatgtaacacaattacaagcattgattcagcaaggcgatgtaccattgaaaggcgaattcgttatcttaattgaaggtgctaaagcgaacaatgagatatcgtggtttgatgatttatctatcaatgagcatgttgatcattatattcaaacttcacagatgaaaccaaaacaagctattaaaaaagttgctgaagaacgacaacttaaaacgaatgaagtatataatatttatcatcaaataagttaa

SEQ ID NO: 413584 - DNA, 249 bp, Staphylococcus aureus
atggatagtcattttgtatatattgtaaaatgtagtgatggaagtttatatacaggatacgctaaagacgttaatgcacgtgttgaaaaacataaccgaggtcaaggagccaaatatacgaaagtaagacgtccggtgcatttagtttatcaagaaatgtatgagacaaagtctgaagcattgaagcgtgaatatgaaattaaaacatataccagacaaaagaaattgcgattaattaaggagcgatag

SEQ ID NO: 413585 - DNA, 726 bp, Staphylococcus aureus
atgttaaaagagaatgaacgatttgatcaactaatcaaagaagattttagtattattcaaaatgatgatgttttttcgttttcaacggatgctttgttgttagggcattttacaaaacctagaacaaaagatatagtgttggacttatgttcaggcaatggggtgatacccttgttattgtttgcgaaacatccacgacatatagaaggtgttgagattcaaaaaacacttgtcgatatggcgcgacgcacatttcaattcaatgatgttgatgaatatataacaatgcatcacatggatttgaaaaacgttactaaagtatttaaaccttcacaatatactttagtaacgtgtaatccgccttattttaaagagaatcagcaacaccaacatcaaaaagaagcacataagatagcgagacatgagattatgtgtacacttgaagattgcatgattgcagcccgtcatttattaaaagaaggtggcaggctaaatatggtacatcgtgcagatagactaatggatgtcttgtttgaaatgagaaaagtgaatattgaacctaagaaagtcgtttttatatatagtaaagtaggaaaatcggcacaaacgatagttgtagaaggtagaaaaggtggaaatcaaggtttagaaatcatgcccccattttatatttataatgaagatggtaattatagcgaagaaatgaaggaagtatattatggatag

SEQ ID NO: 413586 - DNA, 375 bp, Staphylococcus aureus
atgaagtataaaacagagagacgtgaaacgatgcgatatttaaaaagactttcatggtacataagcatcttaattttaatagttgttatagctggttgtggcaaaggtaatgaagcaaaagaaggttcaaaagaagaacaaatcaaaaagagctttgcgaaaacgttagatatgtatccaattaagaatctcgaggatttatacgacaaagaaggatatagagatggtgaatttaaaaagggcgataaggggacttggactttactcacaagtttttcaaaaagtaacaaaccgggtgaaatagatgacgaaggcatggttttatatctaaatagaaataccaaagaaggcaacaggatattattatatgaataa

SEQ ID NO: 413587 - DNA, 447 bp, Staphylococcus aureus
atgaataaagctcatgatgaatttaatgaaaaagatcaacaaaaaaaatatcatgttgaacttaaaaataataaaatagttcttttggataatgtagaagatccaaatctcaaaaataaaatagagaattttaaattctttagtcagtatgctgattttagagatcttaaaaattataaaaatggaaatatatcaagtacagataatgtgccaagctacgatgcagaatataaaatgagtaatacggataaaaatgtaaaaaaacttagagaagtttatcctattacaaccaaaaagtcgccagtattaaaattacatatagatggcgacataaaaggaagttcagttggttataaaaatatagaatataatttttcaaaagtaaaagaccaagaaacagctgtaagagattttgtgaattttggaccatctgatggaggtagctaa

SEQ ID NO: 413588 - DNA, 333 bp, Staphylococcus aureus
atgggatatttaaaaaggattggattgtgcataagtatcttgattttaatagttattgtagcaggttgtggcaaaagtgatgaaacaaaagaaggttccaaagaagaacaaattaaaaagagttttgcgaaaacgttagatatgtacccaattaagaatctcgaggacttatatgacaaagaaggatatcgagatggcgagtttgaaaaaggcgataaagggacttggacgatgtatacagatttcgccaaaagtaataaaccgggtgagctaagtaatgaaggcatgttcttgagcttagatagaaacacacgtacagctaaggggtactaa

SEQ ID NO: 413589 - DNA, 690 bp, Staphylococcus aureus
atgaatgattacgtgcaagccttattaatgattttgttgactgtcgttttatattatttcgctaaaaggttacaacaaaaatatccgaacccatttttgaatccagcattaattgcatctttaggaattatttttgtcttacttatctttggaattagttataacgggtatatgaaaggtggcagttggatcaaccatattttaaacgcaacggtcgtatgtttagcgtacccactttataaaaatagagagaaaattaaagacaatgtctctatcatttttgcaagtgtattaactggcgtcatgctgaatttcatgttagtgttcttaacacttaaagcatttggctattctaaagacgtcattgtaacgttattgccccgatctataacagccgcagtaggtatcgaagtgtcacatgaactaggtggtacagatacgatgaccgtactttttattatcacaacgggtttaatcggtagtattttaggttcgatgttattaagatttggaagatttgaatcttctatcgccaaaggtttaacgtatgggaatgcgtcacatgcatttggcacagctaaagcactagaaatggatattgaatccggtgcatttagttcaattgggatgattttaactgcagttattagttcagtgttaatacctgttctaattttattattctattaa

SEQ ID NO: 413590 - DNA, 396 bp, Staphylococcus aureus; identical to SEQ ID NO: 404862

SEQ ID NO: 413591 - DNA, 864 bp, Staphylococcus aureus
atgaaatattttattgaagtcgttaagcaaggaggcatgactaatgcttccaaatcattatatattgcacaacctacaattagtaaagcaattaaagatattgaaaatgaaatgggcacgcccttatttgatagaagtaaaagacatttaattcttaccgatgcaggtcaaattttttatgagaaaagtaaagaaattgttgcactgtatgattatttaccatctgaaatggaacgcttgaatggactggaaacagggcatataaacatgggtatgtcggcagtcatgaatatgaagattcttatcaatattcttggtgcattccatcaacaatatccaaatgttacatataatttaatagaaaatggcggcaaaacgattgaacagcaaattatcaatgatgaagtagatataggcgtgaccactttgccagtcgatcatcatattttcgattatactaccctagataaggaagatttgcgacttatcgtgagcagagagcatcgactcgcaaaatatgaaactgttaaactcgaagatttagcaggtgaagacttcattttatttaataaagacttttacttgaatgataaaattattgaaaatgctaaaaacgttggctttgttccgaatactgtagcgcaaatttcacaatggcatgttatagaagatttagttacgaatgaattaggtattagtattttaccaacatcaatttcagagcaactaaatggagatgtgaagctgctacgcattgaagatgctcatgtacattgggaattaggtgttgtttggaagaaggataaacaattaagtcatgccacaacgaaatggatagaatttttgaaagaccgtttaggctaa

SEQ ID NO: 413592 - DNA, 219 bp, Staphylococcus aureus; identical to SEQ ID NO: 404860

SEQ ID NO: 413593 - DNA, 432 bp, Staphylococcus aureus; identical to SEQ ID NO: 404859

SEQ ID NO: 413594 - DNA, 321 bp, Staphylococcus aureus
atgacattggcaattgttgggggtggtacgaaagtattaccaatagctaaagcttcattagagctactaaatgtagagtcagcacaagaattaggtcatgtagttgctgccgttggtttagcgcaaaactttgcagcatgtcgcgcgcttgtgtcagaaggtattcaacaaggtcatatgagtttacaatataaatcattagctattgttgtaggagcaaaaggtgatgaaattgctaaagtagctgaagctttgaaaaaagaaccccgtgcaaatacacaagcagcggaacgtattttacaagaaattagacaacaatag

SEQ ID NO: 413595 - DNA, 1239 bp, Staphylococcus aureus
atgagattaaataaatttattggcgattcgtttttaatgattttaagcagtggcatcgctcaagtcatattaatcatcactaccccaattattacaagactatattcacctacagagtttggtgagtttacaattttttcaaatatcgcaatgattttaataccaataataaatgcaagatacgatttgttgattgtgaataccaaaaatgaccgtagtgctaatatactttcacaaatcagttttttgatatcattgcttattttattaatactgataccaatatttgcgattagtgcatgtttatacccaaactttatattagattttattttcattattattatgttgtttttggtaagtttaacaaacatttttacaaattatctaaataaggaaagaaagtataaagtgttaagtttgattaatgtgtttagagctggatcaatggctttacttcaaatcattttcggacttttagcattaggaagtttaggattaattattggtttttcattatcctatatcgcaggcattacactaggatataaaacgtttaaaaagcactttaatattgtgagagataaagaagaaactaaagcattatttttagaaaataaaaatcagttagtttattcaacaccatcaatattattaaatagtttgtctttctcggttgttgtgttctttataggtattttgtataccaatacagaagtgggtatttatggtatggccataagagtactaggcataccagtgacaattatttcattagggttatcaaaaatatttatgcaacaagccaatgactattatattgaacatggtaacttccgaaatttattacttaaatttagttccatactggttatagtttctataattctttatgtgccactttatttgttcagtgaagaattagtcaatatattattaggacatagctgggttgacgcaattacagttataaaaattgttatcccattatttgttataaggctgattgtatcaacggtatcactttctgtgattgtattacaaaaacaacagttagaattaatactacaagcgttatttttaataggtactactgcaacatttgttatatcaaaaatgcttaatttaacttttttaaactttgtatctattaatacaattgttttaatcgtatcgtacatgatatttttcatagcactctattattttgctaaaaataaacagttcaaaaattcttag

SEQ ID NO: 413596 - DNA, 831 bp, Staphylococcus aureus; identical to SEQ ID NO: 406526

SEQ ID NO: 413597 - DNA, 792 bp, Staphylococcus aureus
atgaattatctaaataaaatacgtattgaaaacccattaacaatttgttatacaaacgatgtagttaaaaattttacagcgaatggtttattaagtattggtgctagccctgcaatgagtgaagctcccgaagaagctgaagaattttacaaagttgcacaagcgctattaatcaatatcggtactttaacagcagaaaatgaacaagatattattgcgattgctcaaacggcaaatgaggcaggcttacctattgtatttgaccctgtagctgttggtgcttctacatatcgaaagcaattttgtaaattattattgaaatcagcgaaagtatcagtaattaaaggcaatgcatctgaaatattagcgttgattgatgatacagcaactatgaaaggtacagatagtgatgctaatcttgatgcggttgcaatagcgaaaaaggcttacgcaacatataaaactgcaatagtaatcacaggtaaagaggacgttattgttcaagataataaagccatcgtattagctaatggatctccattattagcacgagtaactggagctggttgtttattaggaggcgttattgctggatttttatttagagaaacagaaccagacatagaagcgttaattgaagcggtaagcgtatttaatattgctgctgaggtagctgctgaaaatgaaaattgtggtggtcctggtacgttttcaccattgttgcttgatacgttatatcatttaaatgaaacaacctatcaacaacggattcgtattcaagaggtggaataa

SEQ ID NO: 413598 - DNA, 642 bp, Staphylococcus aureus; identical to SEQ ID NO: 406528

SEQ ID NO: 413599 - DNA, 873 bp, Staphylococcus aureus
atgaagaaaaaagcgttactaccattatttttaggtattatggtctttttggctggttgtgactattctaaacctgaaaaacgtagtgggtttttctacaatacattcgtagatccaatgaaaaatgtattggattggttgggaaataacttattaaacgacaattatggtttagctattattatccttgtattggtaattcgtattattttattaccattcatgttgtcaaactataaaaatagtcatatgatgcgtcaaaaaatgaaagttgcaaagccagaagttgaaaaaattcaagaaaaagtgaaacgtgcgcgtacacaagaagaaaaaatggctgcaaaccaagaattaatgcaagtatataaaaagtatgacatgaacccgattaagagtatgttgggttgtttaccaatgctaatccaattgccaatcatcatgggattatactttgtacttaaagaccaacttgtagatggtttgtttaaatatccacacttcttatggttcgatttaggacgtcctgatatttggattacaattattgccggtgttttatactttatccaagcatatgtatcaagtaaaacgatgccagacgaacaacgtcaaatgggttacatgatgatggtcatttcaccaattatgattatctggatttcattaagctcagcatcagcacttggtttgtactggtcagtcagtgcggcgttccttgtagttcaaacacactttgcgaacatttattatgaaaaagtcgctaaaaaagaagtacaacctttcattgaagcgtatgaaagagagcacaacggcggcagcaataaaaaaggcaaaaacacacaagtagtgtctaaaaagaaaaagaaataa

SEQ ID NO: 413600 - DNA, 399 bp, Staphylococcus aureus; identical to SEQ ID NO: 410135

SEQ ID NO: 413601 - DNA, 1080 bp, Staphylococcus aureus
gtgaaagaatcaccgtttatggaagaatatgaagaaatgatgtctaaggtaacacgtgaaggtttagcgttaggggtatacatcattctttcaggatcaagatcaagtgcaataaaatcagcaatatttactaacattaaaacaagagttgcgctgtacctctttgaaaacaatgaattaacaaatattattggttcttataaaaaaggtgtgaaagatgttaaaggtagagctgcaataaatgatgataacttcacacagttccaaattgctcaaccatttgaattagcagaaggacaaacatataatgagcgcattaaaaatgaagtagcacaaatgaaagaattctatgtaggagattatccaaaacatattccaatgatgccagataaggtattaatggaggatattcgagaagcatatgatttggaaaaaatcattcatgaagaacacaaattaccattaggattagactttgaggatgtggaactagttagtttagatctgacatcaccaagtatattaacagcaagaacaccaaatgatttagaaatagttaataatcgagttttagatggtatgagtaaacttaaggaaagtgtaacaacaatactagttgatgcagatgaaaatatgagtgataagtcaagtatagttaattcatattatgcatcgtcagaggatttgcaattaataaaacaaggttttatcgttgaaatcaaaaaaaggttgaatagcgaacgaagtaaagaaagtgtgaagattgtatttatcaacaatcttaaggcgtttatttctattacaggacttaatgaaaaggatataaggtatatattatctgaaggaccaaaggtaaatgtctatacaataattagtagtatgtacaatgacatcttaggaacatttgatagagaatcaaaattagcacgtcaaattattaatcaagcagtaattgtaactaggctatatgatcaagagtttttacaagctaaaatcacgaatagagagccgttattaaaaccatatgaaatgtattatttcaataaaaatgaacatattaaaataaaattaattcaatag

SEQ ID NO: 413602 - DNA, 234 bp, Staphylococcus aureus
atggggaataaaataaaaatgtcagaagtgaataattttaatgcttcattacagaaatctctcagtagtttatctacgaatacaaaaactttaaagaataatattaataaattgaaagatgatagtgaatttaaagggaaaacagcatcgaatattaatagctataatcaaagttttcatattgaaacaataagtagaatcgaaaaaataaaggaggaatttgaaaaaaaataa

SEQ ID NO: 413603 - DNA, 1179 bp, Staphylococcus aureus
atgaatcaacaattaattgaaactttaaaatctaaagaaggcaaaatgattgagatcagacgttatttacatcagcatccagaattatcttttcatgaagatgaaacggcgaaatacatcgctgaattttacaaaggtaaagatgtggaagtagaaacgaatgtcggaccacgtggaattaaagtaacgattgattcagggaaacctggtaaaacattagcaatccgtgcagactttgacgcattacccattactgaagatacaggattatcttttgcatcacaaaataaaggtgttatgcacgcatgtggtcacgatgcacatacagcatatatgcttgtattagcagagacgcttgctgaaatgaaagatagttttacaggaaaagtcgttgtgatacatcaaccagctgaagaagtaccaccaggtggtgctaaaacaatgattgaaaatggtgtattagacggtgttgatcatgtattaggtgtacacgtcatgagcacaatgaaaacaggtaaagtgtattacagacctggttatgttcaaacaggacgcgcattcttcaaattgaaagttcaaggtaaaggtggccatggttcatcaccacatatggccaatgatgccattgttgcaggtagctacttcgtcacagcgttacaaacagttgtatctagacgactaagtccatttgaaaccggtgttgtcacaatcggttcatttgacggtaaaggtcaattcaatgtcattaaagatgttgttgaaattgaaggtgatgtacgtggattaacagatgctacaaaagcaacaattgaaaaagaaattaaacgtttatcaaaaggattagaggatatgtatggtgtaacttgcaccttagaatataacgatgattatccagcattatataatgatccagagtttactgagtacgtggctaagacgttgaaagaagcaaaccttgattttggtgttgaaatgtgtgaaccacaaccaccttcagaagactttgcatattatgctaaagaacgtccaagtgcctttatttatacaggtgcagcggtggaaaatggtgaaatttacccacatcatcatcctaaatttaacatttcagaaaaatcattacttatttcggcagaagctgtagggacagttgttttagattaccttaaaggagataactaa

SEQ ID NO: 413604 - DNA, 2238 bp, Staphylococcus aureus
atgcaacgtgattatttaattcgagtagaaactgaaagcatgccagatttcaaaaggctcaatagtttaatgattggttttgttattaaaggtgaggcacatatttatgatgaaaataacatgacgcaatgcaacagtggcgacattttcatcattaaccaccgtgacttgtatcgatttcaacttcaacaagatggcatcatatgttatatccaattccaaatgaaatatttggcagacaagtttgatgatgcgcattgtctatattttcacttaacagatgcgaccacaacaaagaatatacatcaactgagaaatataatggcaagactggtttcaacacacattcgacataatgagttgtctaaattgactgagcaacaacttgtcattcagttgcttatgcatatgattcattatgtcccgcgtacatatcattcgaaccaaagtatcttaaatgatgataaagtgaatcaagtatgcgactatatcgagttacattttcatgaagatttaagcctttcagaattaagcgaatacgttgggtggtcagagagccatctgtctaaaaagtttacagaatcgctaggtgtaggattccaacatttcttaaatacgacgcgaattgagcatgcgaaactcgatttaacatacacagatgaaacgattactgatattgcattgcaaaatggcttttcaagtgcagcgagctttgcgagaacatttaaacactttacgcatcaaacacctaaacaatatcgaggtgatcgtccagcaatcactgaaaatcaacaatcggcacaacataattatcacgaccgtgaattgatattacttttaaatgactacattgaagaaatgaatcattttattgaagatattgaaaagatgaactataaagagattgcctttcaaccaaccaatcaccaactaaatcaatttaatcatattattcaagtgggctatttgaggaatttgctcaatacacagtatcaatcacagttgcttacatgtcatcatgattttcaagtcaatgaagtattagcatatgatgtgatgccatatattatgaaaaagctcaatgcgccattcacgtatgatgcagagatttcgaatatattttatgatatcgatttgtgtttagactttttattagatcataactttagtttgaccatgcatttggatcagtatgactcacgtgattatatcgatgcatttaaaatttttatccatcacgttgccctgcatgtcagtcatagaaaagatttgaagttcaacttgtatgtgacgacattgcacacgtctttgattgaaatgattgattattttaaagcattattccctaatggtggcttgtacattcacttagatcaagctacggaaagacatctaccattgttgaaacgacttgagccacacatcaaccattttgtatttgatgccaattcaaatgatgctgttgattttaataaaatgaatgatgatgaatttaaaaccgcgagtcaaatgattattaataaaacgaattaccttatcgacttaatgcatcgtcatcgcctaaagcgtccactcattttactcaattggaatacattgacgggtgatacatttattacaaacggcgaatattttagaggtggtatcatcattgagcaattattaaaattaagttctaaagtagagggtatcgggtattggttgaattatgatttgcacgtcagtcattgtagaaatgaacgggattatatgaattctattgaactgtttcatcaatataatggaaaacgtccggtctatttcacggcattgctatttaataaattaacaagcaatattttgtattctgatgatacatgtattgtcacggggactgattcaaattttcaaatattgttatatgatgcaaagcattttaatccgtacttagcgttggacaatcaaatgaatatgcgtgcgacggaaatgattcatttgaacattaatgccctggaagaaggtatgtataagattaaacattttaccttagataaagaaaatggtgcgttatttaatctttggcgcaaacatcatacgatacatggcatggacaaggactctatagattacgttaatcgaatgagttttccgaaattagaagtatatgatatagatatcacgggcacactggcattaaacattaaaatgattacgaatgggattcacttaattgaagtaaaacgttacccaagttcataa

SEQ ID NO: 413605 - DNA, 276 bp, Staphylococcus aureus
ttgatcgcaccttgcaagttacccatcgcagtatttaaatctgtaccttgttgtttaacagtatttacgccagcaatatttgatgcagcattaattttagatttaacatctgctttttgtgcattatttaaatgtggtaatgcatctattgcacttgcagcatctgttttagattgtgctaatttttcatcaccatttaatgcatttttattagtagtaacagctgaagttgcacgattaacatcatcaacagacatcgttggatttgttgtttga

SEQ ID NO: 413606 - DNA, 825 bp, Staphylococcus aureus
atgtgggaatgcccagattactttaatgtagataatcaagatgtcatacttatttgtccacaaggtattgaaccaaaaggcgatcagttcaaaaatatttatcaaagtggttatatacttggaaagtttgatattgaaaagttaacatatgaacatgaaaattttgtcgagcttgataatggctttgatttctatgcacctcaaacatttttagatgaaaaaggccgacgagtactaattggatggatggggttaccggaaatcgaatatcctactgataatgaaggatgggcccattgcttaacaattcctcgtgtattaaatgtagaaaatggtcaacttaagcaacgtccatatccagcgttggaaaaattacgtcacaataaagagacagcattaggctacgcaaataaatttactcgaaaattacatccgtatgaaggtaaacagtatgaattaatcatagatattttggataatgatgctaccgaagtgtactttgaattacgtacatctaagacttcttcaacattaatcgcttataacaagcgtgaaaataaaataacattagatcgcagcgacagtggtttattgccggcaaatgttgaaggtacgacgcgtagtacgatattagacacgccattaaagcaattacaaatttttgttgatacatctagtatagaaattttctgtaatgatggggaacgtgttttgacatctcgaattttcccgacagaagacgcactaggtattaaaacatcaacagaatcagggcaagtatatttacaatttactaaatatgatttaaaggatgaacataaatga

SEQ ID NO: 413607 - DNA, 195 bp, Staphylococcus aureus
atgacccaaggccaaagcgactttgtattcgtcattggcggatcaaacggcctacacaaagacgtcttacaacgcagtaactacgcactatcattcagcaaaatgacatttccacatcaaatgatgcgggttgtgttaattgagcaagtgtatagagcgtttaagattatgcgtggagaggcgtatcataagtag

SEQ ID NO: 413608 - DNA, 1245 bp, Staphylococcus aureus; identical to SEQ ID NO: 405709

SEQ ID NO: 413609 - DNA, 1119 bp, Staphylococcus aureus
atgaataaacaacaaagtaaagtacgctattcaattagaaaagttagtattggaattttgtcaatttcaataggtatgtttttggctttgggtatgtcgaacaaagcatatgcagatgaaattgataaatctaaagattttacaagagggtatgagcaaaatgtattcgcgaaatcagagttaaatgctaataaaaatacgacaaaagacaaaataaaaaatgaaggtgctgttaaaacatcggacacaagtttaaagttagacaacaaatcagcaatttcaaacggaaatgaaattaatcaagatataaagatttcaaatactccgaaaaactcaagccaaggtaacaatctagttattaataacaatgaacctactaaagaaattaaaattgcaaacttggaagctcaaaattctaatcagaagaaaacgaataaagttactaataattactttggttactacagttttagagaagctccaaaaacacaaatctatactgtaaaaaaaggagacacacttagtgctatagcattaaaatacaaaactacagtttcaaatattcaaaatacaaataatatagcaaatcctaatttaatatttattggtcaaaaattaaaagtgccaatgacaccattagtagaaccaaaaccaaaaacagtgtcttcaaataataaaagtaatagtaatagcagtacattaaattatttgaaaacattagagaatagaggatgggatttcgacggtagttatggatggcaatgtttcgatttagttaatgtatattggaatcatctttatggtcatggattaaaaggatatggagctaaagatataccatatgcaaataattttaatagtgaagctaaaatttatcacaacacaccaactttcaaagctgaacctggggacttagtggtttttagtggaagatttggtggaggatatggtcatacagctattgtcttaaatggtgattatgatggaaaattaatgaagttccaaagtttagatcaaaactggaataatggtggatggcgtaaagcagaggttgcacataaagttgttcataattatgaaaatgatatgatttttattagaccatttaaaaaagcataa

SEQ ID NO: 413610 - DNA, 843 bp, Staphylococcus aureus
atggataatagaaatatgattaatcgtgtttttagtcaaaagatattacatcaaattgcaatcaaaaataaaagtgatgttgttgatgaggcatatgatttttatatacagggacctaaaaatatcaatgtaatacagaagatgaaatctttatataattatcttaaaaagtcttatcgtaacgaatatttttacaaaaacacaatacttaataaactccttctaggacgacattctattaatacaactactgcactttctgagatgcccatagggaaaagtattgctgattttatattgttaaacggcaaaggcgttgtctatgagattaaaacagaattagataagctggatagattagataatcaaattaatgattattatgaagtgtttaattatgtagtagttattacaaatgacaaacatctgaataaagttatggctagatacaaagatacaacagttggaattttagtgttaacaactagaaatacactgagtgaagttcaaaaacctaaagaaaacaatagtctcttaaacacaaaagcgatgtataactttttacgaaaagaagaaagaaaaagagttattgcacaaaatcatatggatgtgccaacctataatgatttcacagagtatgatgtgttatttgacgtgtttaaagaaataccaatgacgaaactgcataacaatatgatttctgagttgaaaaaaagaggcaacatgaaagaatacaaagatgaatttttagcagcgccggctgaaattaagttcttgttatatttcgcaaaaatgacaaagaaagataaaaataaactatatcattttcttaaggaggattaa

SEQ ID NO: 413611 - DNA, 2790 bp, Staphylococcus aureus
atggcataccaaagtgaatacgcattagaaaatgaaatgatgaatcaacttgaacaattgggttacgaaagagtaacgatacgtgataataagcaattgcttgataattttagaacgattttaaatgagcgtcatgcggacaaattagaaggcaatcccttaacagataaagaatttcaacgtctgttaacgatgattgatgggaaaagtattttcgagagtgcccgtattttacgtgataaattaccacttagacgtgatgatgagtctgagatttatttgtcgtttttagatacgaaaagttggtgtaaaaataagtttcaagtgacgaatcaagtatctgtcgaggatacatataaagcacgttatgatgtaacgatattaatcaacggactaccccttgtccaagttgaattgaaacgtcgaggtattgatattaatgaggcgtttaaccaagtaaaacgttaccgtaaacaaaattacacaggcttattccgctacatacaaatgtttatcattagtaatggtgttgaaacacgatacttttctaataatgatagcgaactattgaagagtcacatgttttattggagtgataaacagaataaccgtatcaatacattgcaatcgtttgctgagtcatttatgagaccttgtcaattagctaagatgatatcgcgctatatgattattaatgaaacagatagaatactgatggcaatgcgtccgtatcaagtgtatgcggtagaagcacttattcaacaagcgactgagacagggaataatggatatgtatggcatacaactggaagtggtaagacgttgacttcttttaaagcgagtcagattttatcacagcaagatgacattaagaaagttatctttttggttgaccgtaaagacttggatagccaaacagaagaggaatttaataaatttgctaagggtgctgtagacaaaacttttaatacctcgcaactggtacgccaactaaatgataaaagtttgccacttattgtaacgacgattcaaaaaatggctaaagcgattcaaggtaatgcccatttattagaacagtataaaacgaataaagttgtatttattattgatgagtgtcatcgcagtcaatttggtgacatgcatcgtctagttaaacaacatttcaaaaatgcccaatactttggattcactggtacgccacgttttccagaaaatagtagtcaagatggtagaacaactgcagatattttcggtagatgcttacatacgtatttaattagagatgccattcatgatggtaatgtacttggtttctcagttgactatattaatacttttaaaaataaagctttaaaagcagaagataacagcatggttgaagcaattgatacggaagaagtatggttagcggataaacgtgtggaattagtaacacgacatatcatcaataatcatgataaatatacacgtaatcgtcaatattcaagtatatttacagtccaaagtattcacgcgcttattaaatattatgagacatttaagcgacttaacaaaaagttggaacaaccattaacggtagctggtatgtttacgtttaaacctaatgaagatgatcgtgatggtgaagtgccatatcattcacgtgaaaaattagagataatgattagtgattataataaaaagttcgagacgaatttttcaacagacacaactaatgagtattttaatcatatttcaaaaaacgttaaaaagggcgttaaagatagtaaaattgatatcttaatcgttgttaatatgttcttaactggttttgatagtaaagtactgaacactttatatgttgacaagaatttaatgtatcatgatttaattcaagcgtattcacgtacaaatagggttgaaaaagaatcaaagccatttggtaaaattgtaaactatcgtgacttgaaaaaagagacagacgatgcactgagagtattctcacaaacaaatgatacggatacaattttaatgcgtagttatgaagagtataaaaaagaatttatggacgcttatcgtgagcttaaaatgattgtgccgacaccacacatggttgatgacattcaagatgaagaagagctaaagcgctttgttgaagcttatcgtttattagctaaaataatattacgtttaaaagcatttgacgagtttgagtttacaattgatgaaattggaatggatgaacaagagaatgaagactataaaagtaaatatttagctgtgtacgatcaagtaaaaagagcgacggctgagaaaaataaagtatccattttaaatgatattgatttcgaaatagaaatgatgcgtaatgatacgattaatgtgaattatattatgaatatattgagacaaattgatcttgaagacaaggcggaacaacgtcgtaaccaagaacaaattagacgtattttagatcatgcagatgatccgacattgaggttaaaacgagatctaattagagaattcatagacaatgttgtaccctctttaaataaggatgatgatatcgatcaagaatatgtcaatttcgaaagtattaaaaaagaagcggagttcaaaggatttgctggagagagatctatcgatgaacaagccctaaaaacaatttcaaatgactaccagtatagtggtgttgtaaacccacatcaccttaaaaaaatgattggtgatttgccattgaaagaaaaacgtaaagcaagaaaagccattgaatctttcgtggcagaaacaactgaaaaatacggtgtgtaa

SEQ ID NO: 413612 - DNA, 1137 bp, Staphylococcus aureus
gtgagcgtaaatgcacgtgatttattagtattacacactaatgtaaatagattggttggagaagagatatttgctaataaatgccttgctaataatgatgttcaaattatgaattcaataaaaaaattaattgaagctgagttattaacaacgactaatgattttgaagttagtatatttaaaaagacaagacctgaattacaaagtattttaaaaagttttggtataaaaacaacaggtaataaacctgacttaattaaacgtattgacgacaattttcatattattaataacttagatttaccatatgtatatataccaactaagaaaggagaagaaattttaaagaaaacagagtacttaacctcttttatccaaagttatggtgaaatttctcttgagcgtgcttattatttggttgaaaactatatagatgaaaattgcgatgataaagttgcagaaatatacaagtttgaatttcaaagaaaatatgacaatggcgagtttgattttaatcatggatataatttcgaattgaatatgttgatagatcactataaaacagatgtaaaagactacgataatgccagaaagtattcaaatgtttatctttactttggtttgagagatttcttaaaaaaattaatgagtaattattcatattacgatagtaaagggaatatagatttgaacgaaatacaaaatgatctgaatagatttatcaactctagcgcttctgatttgtacgaacgattaatatataataaaaatttatctaataatattatatttgaattatttaaaaaggatacacaagattatagtgatttggaagaacaattgattgaaaagttcataaactatgtagtgtcatatgtaaaaaaagaaggttggagcaatacgcttttagagttatcaaaaatgttggagaacggatatacaattgataaagaagaatttaaaaaagaagatgaatatctttctaggtatataattactgacataaattatttgaaaaatctagaatcaaaaataggtgttgccattgatagtcgaaatggagaaattcatttggtattagatgatgatagccttgataaattaataaaaaatcaaaaaaacgacaatgaggtttga

SEQ ID NO: 413613 - DNA, 1398 bp, Staphylococcus aureus; identical to SEQ ID NO: 405513

SEQ ID NO: 413614 - DNA, 192 bp, Staphylococcus aureus
atgagaaaagagattgaagcgcttattttctcagacgtaagtagctatgatatttacgtgaacactggtgtaaatcaaggattaattggagacatcaaagatggttacctaactattgattctatgccttacattgatgctgagcgtttgtatcactttgctatggaacgtaaatcgttagtcactaactag

SEQ ID NO: 413615 - DNA, 282 bp, Staphylococcus aureus
atgacatatcatgagcgtgttttagcattaagagctgaaagtaaaagaaccgcatttgattttcgattcgaagatttatttagcaaagaagaatggctaagtatgtcgcttgcagaaagacaaaaagctgaaaaagcatttcgacacgaagttaaaaatatggacgatgtaagaatgcccttctcaagtgtccatgacgcccaagtaaaattatataatgttgtatattcttataacggcattaaacgtaattttaaacaagttgaaaatgaaggattctaa

SEQ ID NO: 413616 - DNA, 879 bp, Staphylococcus aureus
gtgtacgacccaacatgtggttccggttcattgttgttacgtgttggtaaagaaacgcaagtgtatcgttatttcggtcaagaacgtaacaataccacttacaacttagcgcgcatgaacatgttattacatgatgtgcgctatgagaattttgatatccgtaatgatgatacgttggaaaatccagcctttttaggccatgcatttgatgcggttattgcgaacccaccatacagtgcgaaatggactgcagattcaaaatttgaaaatgatgaacgcttcagcggttacggcaaacttgcgccaaaatccaaagcagattttgcctttattcaacacatggtacattacctagacgatgaagggaccatggcagtcgtactaccacatggtgtattattccgaggggccgcagaaggtgtcattcgtcgttatttaatcgaagaaaagaactacttagaagccgtgattggcttacctgccaatattttctatgggacaagtattccaacatgtatccttgtatttaaaaaatgtcgccaacaagacgataacgtattatttatcgatgcatccaatgattttgaaaaaggaaaaaatcaaaaccatttaagcgatgcccaagtcgaacgtattattgacacatataagcgtaaagaaacgattgataaatacagttacagtgcgacattacaagagattgccgataacgattacaacctaaacataccgaggtatgtcgatacattcgaagaagaagcaccgattgatttagatcaagtccaacaagatttgaaaaatatcgataaagaaatcgcagaaattgaacaagaaattaatgcatacctgaaagaacttggggtgttgaaagatgagtaa

SEQ ID NO: 413617 - DNA, 1239 bp, Staphylococcus aureus
atgagtaatacacaaaagaaaaatgtgccagagttgagattcccaggatttgaaggcgaatgggaagagaagcagttaggggatcttactaccaaaataggtagtggaaagactcccaaaggtggaagtgaaaactatacaaacaaaggcataccatttttaaggagtcaaaatattagaaatggtaaattaaatcttaatgacttagtttatattagtaaagatatagatgatgagatgaaaaatagtagaacgtactatggtgatgttcttttaaatattacaggagcatcaataggtagaacagccattaattcgatagttgaaacgcatgctaatttaaatcaacatgtatgtattattagattgaaaaaagagtattattatattttttttggacagtatctattatcaagaaaaggaaaaaggaaaattttccttgcacaaagtggaggtagtcgagaaggtctaaacttcaaagaaattgctaatttaaaaatcttcaccccaactatatttgaagaacagcaaaaaataggcaagttcttcagcaaacttgaccgacaaattgaattagaagaacaaaaacttgaattacttcaacaacagaaaaaaggctatttgcagaaaatcttctcacaggaattgcgatttaaggatgagaatggaaatgattatccagagtggagatttgctagatttaaggactttatgtataaaccaataaacatacgacctgcaataaatattagtaagtcagaattgctaactgtaaaattacattgtaaagggatagagaaagctaatataaatcgagtattaaaactaggagctacgaattattataagagatttgaaggtcaatttatttatgggaaacaaaactttttcaatggagcatttgacatagtgccaaaaaaatttgatggactttattcatcaagtgatgtgccagcgtttgaaataaataccgaaaagattgaacctaactattttatcagctatatctctagaccaagcttttataaaagtaaggaaaaatattctactggtacaggtagtaaaagaatacatgaaaatacggtgttaaatttctctttacatttaccttgtttaaacgaacaattaaaaattgcttctttcgtttgttttctcaatagaaaaattgaattactagaaagaaaaatctatctaataaagaaacaaaagcaagctttgcttcaacaaatgtttatttaa

SEQ ID NO: 413618 - DNA, 501 bp, Staphylococcus aureus; identical to SEQ ID NO: 409917

SEQ ID NO: 413619 - DNA, 426 bp, Staphylococcus aureus
atgaaactaaaatcatttgttactgccactttagcattgggattattatcaacagtaggtgcagctttaccgagtcatgaagcatctgcagatagtaataacggttataaggaattgacaatggatggaaaacacactgtaccttacacgatctcagtagatggtattactgcattacatcgaacttactttgtttttccagaaaataaaaaggtactttatcaagaaattgacagtaaaataaaaaatgaattagcttctcaacgtggtgttacaacagaaaaaattaataatgcacaaatagcaacgtatacacttactttgaatgatgataataaaaaagtagtgaatctaaagaaaaatgacgacgttaaaaattcaattgattcaagtacaatcaaacaaatacaaattgtagttaaataa

SEQ ID NO: 413620 - DNA, 801 bp, Staphylococcus aureus
atgctcattgatgttgaatcggatttactttcacttgatgatgttgagtcggattcactttcacttgtagaaccacttaatgatgtggatgtactaatggaatcagatttacttgtactgattgaatcacttgtcgacattgatgtacttaatgaatcagacttactatcacttgtggaatcacttattgatgttgacaaacttgtagagtcagacaaacttgtactcgttgacatactcagtgatgttgaaacactctcgctcttaaacgttgacgttgattcactgatacttgtcgatgttgaaatggacgtactaccacttgttgaattacttaatgatgttgatgtgctaccagattctgatgtactgtctgataatgacgtactctcacttgtcgaactactcactgactctgatgttgattcagacgtactttcacttaatgattcacttaaaaaggcagatgcactttgtgattctgaatcgctagtactatttgattcacttaatgatatagacgtgctctctgaagcagatattgcttcacttatagagtcgctcgttgacgttgattcacttattgaatcagactctgatgtacttaagcttgtggaatcactcatagatgttgatgtacgttctgaattacttgtacttaacgatgtcgaagtacttaccgaaccagatgtgctcgtagaagcactttgtgatattgattcacttgatgcagttgatgctgatttgctatcactcgttgaatcactaaacgacgttgatatgctcattgaatcggattga

SEQ ID NO: 413621 - DNA, 279 bp, Staphylococcus aureus; identical to SEQ ID NO: 413452

SEQ ID NO: 413622 - DNA, 525 bp, Staphylococcus aureus; identical to SEQ ID NO: 413453

SEQ ID NO: 413623 - DNA, 144 bp, Staphylococcus aureus
ttgactgtaacttggtataacgtcattgctttaacaatacttgttattgtattaagctcattcacaacaccaatgataggcattccagctggtttattaggtggcgcctattatttaaaacgtcgtgaagaaaaaggtaaataa

SEQ ID NO: 413624 - DNA, 639 bp, Staphylococcus aureus
ttggctggaggcgcagcaagtaaaagtgcttctgccgcttcaaaaccacatgcctctaataatgcaagccaaaaccatgatgaacatgacaatcatgacagagataaagaacgtaaaaaaggtggcatggccaaagtattgttaccattaattgcagctgtactaattatcggtgcattagcgatatttggaggcatggcattaaacaatcataataatggtacaaaagaaaataaaatcgcgaatacaaataaaaataatgctgatgaaagtaaagacaaagacacatctaaagacgcttctaaagataaatcaaaatctacagacagtgataaatcaaaagatgatcaagacaaagcgactaaagatgaatctgataatgatcaaaacaacgctaatcaagcgaacaaccaagcacaaaataatcaaaatcaacaacaagctaatcaaaatcaacaacagcaacaacaacgtcaaggtggtggccaaagacatacagtgaatggtcaagaaaacttataccgtatcgcaattcaatactacggttcaggttcaccggaaaatgttgaaaaaattagacgtgccaatggtttaagtggtaacaatattagaaacggtcaacaaatcgttattccataa

SEQ ID NO: 413625 - DNA, 225 bp, Staphylococcus aureus
atgtatgaatcaactggtaaagtattatcagtgaatgggaatatagtgtcatcggatgcaattattcagcctggtagctctggttcacctatattaaatagtaaacacgaagctattggtgtaatctatgcaggtaataagccatcaggtgaaagcacaagaggattcgctgtttatttctctcctgaaattaagaaattcattacagataatttagataaataa

SEQ ID NO: 413626 - DNA, 324 bp, Staphylococcus aureus; identical to SEQ ID NO: 413461

SEQ ID NO: 413627 - DNA, 492 bp, Staphylococcus aureus
atggatagtacgactgttgcaactgttgtattggcatttgatgaaaaagatattgaaaatacttatgatggtactggcttcgtgattgcgagaacgagtgatacagacattaccgcatgtacttggacatcgaaaaaatggccatttactacaccagaaggtaaggttttgattcgtgcgtatgtaggtaaaccaggtgatactgtggttgatgatcatacagataatgaattagtatcgattgtacgtagagatttaagtcaaatgatgacatttaaaggcgatcctgaatttacaattgtcaatcgtttgccgaaaagtatgccacagtaccatgttggtcacattcaacaaattagacagattcaagcacatattaaacaaacatatccacgacttagagtaactggtgcatcttttgaagcggttggactacctgattgtattacgcaaggtaaagttgctgctgaagaagtaatcgcagagttgtaa

SEQ ID NO: 413628 - DNA, 555 bp, Staphylococcus aureus; identical to SEQ ID NO: 407107

SEQ ID NO: 413629 - DNA, 501 bp, Staphylococcus aureus; identical to SEQ ID NO: 410353

SEQ ID NO: 413630 - DNA, 153 bp, Staphylococcus aureus
atggtaccagaagaaaaaggttctattactttgtcaaaagaagcagctatcatatttgcaactgcaaaattcaaaccatttcataatagaattaaaaataccccacaaaaaacaaatccatttcttaaattacatgaaaacaaaaaatcttaa

SEQ ID NO: 413631 - DNA, 771 bp, Staphylococcus aureus
atgataaaacgtataaacaaattagtgttaggtattagtcttctgtttttaatcatcagtatcactgctggttgtggcatgggtaaagaagcggaaataaagaaaagttttgagaagacattgagtatgtatccgattaaaaatctagaggatttatacgataaagaaggttatcgtgatgacgaatttgataaaaatgataaaggtacatggattattggttctgaaatggcaactcaaaataagggggaagctctgaaagttaaaggtatggtcttatatatgaatagaaataccaaaacaacaaaaggattttactatgttaatgcagtaaagaaagatggagatggtagacctcaggataataaaatagaatatccggtgaaaatggtagacaataaaatcattccaactaaaggtatcaaagacgaaaacataaaaaaagaaatcgaaaattttaagttcttcgcgcaatatggcagctttaaagatttgtcgaagtacaaagatggagatatttcgtacaatccagaggtaccgagttattcagctaaatatcaattaactaatgatgattataatgtaaaacaattacgtaaaagatatgatataccaacaaataaagcgccaaagctattgttgaaaggttcgggagacttaaaaggttcatcagttggatataaagacattgaatttacttttgtggagaaaaaaggtaaaaatactttttttactgatagtctacatcttgaaccaagtgaggataaataa

SEQ ID NO: 413632 - DNA, 771 bp, Staphylococcus aureus
atgataaaacgtgtaaataaattagtgctaggtattagttttctgtttttaatcatcagtatcgttgctggttgtggtacagggaaagaagcggaaataaagaaaagttttgaaaaaacattgagtatgtaccctattaaaaatctagaggatttatacgataaggaaggctatcgtgatgatcagtttgataaaaatgataaaggcacatggattgttaattcggaaatggcgactcaaaataagggagaagctttaaaaattaaaggtatggtcttgtatatgaatagaaataccaaaacaacaaaaggatattattatgtaaatgcaataaagaatgataaagacggaagaccccaagagaatgaaaaaaggtacccagttaaaatggtcgataataaaatcattccaacaaaagaaattaaagataaaaacataaaaaaagaaatcgaaaactttaagttctttgttcaatatggaaactttaaagatttgtcgaagtacaaagatggagatatttcatacaatccagaggtgccaagttattcagcaaaatatcaagtaactaatgatgattataatgtaaaacaattacgtaaaagatatgatataccgacgaataaagcaccaaagttattgttgaaaggtacaggtaatttaaaaggctcatcagttggatataaagatattgaatttactttcgtggagaaaaaaggtaaaaatatatattttagtgatagcttagattataaaaaaagtggagaagtataa

SEQ ID NO: 413633 - DNA, 795 bp, Staphylococcus aureus
atgattcattcaaagaaattaacgctcggtatatgtttggtattactcattatattgattgtaggttatgtcattatgacaaaaacaaatggtcgaaacgctcaaattaaagaaaatttcaacaaaacattaagtgtatatccaaccaagaatcttgaagacttttacgataaggaaggttttcgcgatcaagaatttgataaaagagataaagggacttggattatttattctgaaatggttatcgagccaaaagggaaaaatatggaaacgagaggaatggtgctttatatcaatcgcaatactaggacaacaaaaggtaattttattgtcaatgaaattacagatgataacgatggtagacccattgataataaaaagaaataccctgtaaaaatggaacataataaaatcataccaacaaaacctataaaagacgagaagttaaaaaaagaaattgaaaacttcaagttttttgtacaatatggcaactttaaagattttaaagattataaaaatggggatatttcatacaatccaaacgtaccaagttattcggcaaaatatcaattaagtaatgatgattataatatccaacaattaagaaaaagatatgatataccgactaaaaaagcaccagaactattgttgaaaggtgatggcgatttaaaaggttcatccataggctctaaagacttagaatttacctttgtacaaaataaaagagagaatatctattttacagattcggttgaatttactccaagcgaggatacaagttatgagtcaaactaa

SEQ ID NO: 413634 - DNA, 1620 bp, Staphylococcus aureus
atgcttgatgttcattttatatacccaagaaaattacaaaacgcatgcgaatattttaatttaccgacccaaaaagaaggatttgaagtcacgatgcatgctttacgccctgaaaatatacataaaatttatcatgatatggataattcagaacaaagatttatagaaacattaatatctaagggtaaccctgtcacaatcgtaaatagccgtgatgttaatattttaaagctaacaaatcacctaggttttgtttatcaacttaacgaagatgagttctttgtaaataatttctttttaagatatatcaattcagaggtactagataatgcatatggtgaattcgaatcgttagatacaataaaccatatgaatttaaatgaagaagtgttacgtgtaagacaacatacgcgcttaaacgatgtcacattagaacatgctttactgttaaaaactaatgacgagctaaaaacaatatgcaggcagtatggtatcaaaggattctcaaataaaaacaaacaaaatcttgttgaattaattatgacagcatttttcaataataatcacatcattgaacaagtgttttctaatactactctatttgagtttgacattctttctagcatacttgaaagtgatgctaactaccgattaaacaatgaactaactaaatttgaaaagctacaattaataaattttgacaactttttaactagtcatttttattattattacgactttgaatatgattgtcttattttgccaaatgatgtgcgtaaacatattgaaaatttcgtgaatcaagtcggcaatggtgattttgagaaagctgtaaatcagtttgttgatgagcaaacaattgagaaaagtttagcagagtttgaaaacacgttagagttatcatttatggacgacgaagttgacttagatatgttacttaaagatgatgactttgaagattttggtacaaccgatagcttaagaagtgatgcaatcactcaattgatttctgagattaagaaaggattaatagataaaaaagatattttacctcttcgtattatacttggttctgtaaacttgtatggtattttatcaactaatcatctactatatctcacacaaagattttatgacgctacttttagtaaagaagagttgcaatatagcttagatactttagctggtactgagctatattatattgaagatgacttcgtgtttcaccctgtgttatttgatgttgtcgagtctgaggcgtctggcattgatatttctgatgatggatattatgtaccagcttcggttgaagaattaatctattatgatagacatcactatttgaaatctgatcaagcaattaaagagtttaccagttatctacgcaaacaaatcaatatgaaaaatgatattgagaaggaaaagtatgtgaacgaaatcattatgcttttacgtacgatacctacatctaaattgatacaaccaattatgcagttatttatagataatgctatccttaacaatgttcaaaacgacgcattattgatagaaaaagtaactcatgcacgtaatcatttgcgtctatggtcattgcaaggtcatcgtgacattccaaactaa

SEQ ID NO: 413635 - DNA, 360 bp, Staphylococcus aureus
gtgaatatcatctcgacaattttaatcatatttgtagcaatagagtttttctatattatgtaccttgaaacgattgctacaacttccaaaaagactagcgagacatttaatataagcgtcgataagttgaaagacaaaaatattaacgtacttttgaagaaccaaggcgtatataacggtttaatcggaattttgctaatatacggtttgtttatcagcagtaatccaaaagaaatatgcgcagctattttagtgtatatcattggcgttgctatttatggtggcctttcaagcaatattagtatctttttcaaacaaggcacattgccagtattggcacttatatcaatgctttggtaa

SEQ ID NO: 413636 - DNA, 846 bp, Staphylococcus aureus
atgaatattatgttaacaggtgctacaggtcatttaggcacacatattacaaatcaagccattgcaaatcacatagatcattttcacattggtgttagaaatgttgagaaagttccagaagattggcgtggaaaagtttctgttcgacaattagattattttaatcaagaaagcatggtagaagcatttaaaggaatggataccgttgtgtttattccaagtattattcatccatcattcaaacgtattcctgaagtggaaaatttagtatatgcggcaaagcaaagtggcgttgctcatatcattttcataggttattacgcagatcagcataataatccattccatatgagtccttattttggttatgcaacacgtctattggcaacaagtggcattgactatacctatgtaagaatggcaatgtacatggatccacttaaaccatatttaccagaattgatgaatatgcataaactgatttatccagctggtgatggtcgtattaattatattactagaaatgatattgctagaggtgtcattgctattattaaaaatccagatacttggggcaaacgctatttattatcaggctacagttatgatatgaaagaacttgctgcaattttatctgaggcatcaggcacagaaattaaatatgagcccgtttcattagagacattcgcagaaatgtacgatgaacctaaaggctttggtgcattattggcatcaatgtacgacgcaggagcaagaggactattagaccaagaatccaatgatttccaacaattagtcaatgatcaaccacagacactgcaatcatttttacaagaaaatatttaa

SEQ ID NO: 413637 - DNA, 411 bp, Staphylococcus aureus
atggctaaagcattacaattagcagaaaagaatcgagacgataacaatattcatttaatgaatttaaaagaacaatttttagttaaattacaagaaagagcgattccatttgaattaaatggttcaatgacggatgctacaggccatattgtaaatctatattttccgtttgttgaagttgaaacgatgttaacattgttggatatggcacaaatctatgtgtcgtctggatctgcatgtacagcaggctctacacaaccgtcgcatgttttagatgcaatgttcgaagatgaggagcgatcaaatcattcgattcgatttagttttaacgaattgactactgaaaatgaaattaatgcaattgtagctgaaattcataaaatatattttaaatttaaggaggagtcataa

SEQ ID NO: 413638 - DNA, 1119 bp, Staphylococcus aureus
ttgtcaaataaagatatacgtgttgtcgttggtatgtcaggcggtgtagatagttctgtaacagcccacgtcttaaaagaacaaggttatgatgtcattggcatatttatgaaaaactgggatgacactgacgaaaatggcgtatgtactgcaactgaagattacaacgatgttattgaagtgtgtaatcaaattggcattccatattacgctgttaattttgaaaaagaatattgggataaagtctttacgtatttcttagatgaatacaaaaaaggtcgtactccaaatccagacgttatgtgtaataaagaaattaagtttaaagcctttttagatcatgcgatgaatttaggtgcagattatgtagcaacaggacattacgcacgcatacatcgtcatgaagatggtcatgttgaaatgttacgtggtgtagataataataaagatcaaacatacttcttgaatcaattatctcaacaacaactttcaaaagtgatgttcccaattggcgacatcgaaaagattgaagtgcgtcgaattgctgaagaacaaggactagttactgctaagaaaaaagattctacaggcatttgttttatcggcgaaaaaaactttaaaacatttttatcacaatatttacctgcacaaccgggtgatatgataacacttgatggtaagaaaatgggtaaacatagtggtttgatgtattacacaataggacaaagacatggattaggtataggtggagatggcgatccttggtttgttgtcggtaaaaacctaaaagataatgttttatatgtagaacaaggattccatcacgatgcattatacagtgattacttaattgcttcagactattcatttgtaaatccagaagataatgacttagatcaaggttttgaatgtacagctaaatttagatatcgccaaaaagatacgaaagtttttgtgaaacgtgaaaacgaccatgcactacgtgttacttttgctgagccagtaagagcaatcacacctggacaagcagttgttttttatcaaggtgatgtgtgtcttggtggagcaacaattgacgatgtgttcaaaaatgaaggtcaattaaattatgttgtataa

SEQ ID NO: 413639 - DNA, 153 bp, Staphylococcus aureus
atgtctaaagacaaagatccaaaattaaattatcatgaagaagaaaacagtatggtaacggattttgaagatttaaaagaattaggtaaagaaatggaacaaatttctgatcaaaatgatcaagaaaagaattctgaagaagacagtcagtaa

SEQ ID NO: 413640 - DNA, 600 bp, Staphylococcus aureus; identical to SEQ ID NO: 407084

SEQ ID NO: 413641 - DNA, 471 bp, Staphylococcus aureus; identical to SEQ ID NO: 413462

SEQ ID NO: 413642 - DNA, 174 bp, Staphylococcus aureus
atgcttggcgtaagtattcaaaagttacaattattaggtgcgatgccaagacatgttattgaaggattcccaacgattaactggttgggcttctatccaagttatgaaccattgatagcacaagctgcttatattatggtagttgctatcttaatctttaaatttaaaaaataa

SEQ ID NO: 413643 - DNA, 606 bp, Staphylococcus aureus
atgacaccattcataacgtatattacccgtgcacatgtgtccttacatgcattttcattcacagaaatgatccaaatatacgtgatgattatatttttcatcgcgttttgtttcatttcaccagtcatgttttatcaattgtgggcattcattgcacctggattacataataatgaacgtcaatttatttataaatatagttttttcagcgtgttattattctgtgctggcgtcgcttttgcattttatgttggctttccaataatcattcaattcgcgttaaaattatcattaactttaaacatttcgcctgtcattggctttaaagcgtatttagttgaacttatccgttggcttttcacttttggcattttattccaattgccaatattattcataggacttgcaaaattcggtcttatagataccacatcattgaagcattatcgaaaatatatttatttcgcttgctttgtattagcaagtatcattgcaccacccgatttaacattaaatatattactcacattgccactcatattgctctttgagttcagtatgttcattgttaagttcacatgccgaggcaaaccgccaacacattaa

SEQ ID NO: 413644 - DNA, 216 bp, Staphylococcus aureus
atgataactaacacttttattttaggcatcacaggcccaacaagtcttgtcgtcattagcattatcgctttaattatttttggtccgaaaaaattaccacaatttggtcgtgctatcggttctactttaaaagaatttaaatctgcaacagaagatttagataaagagtctcacgatacacccagtaaggaatcgaaacaacagcgagagcaatag

SEQ ID NO: 413645 - DNA, 768 bp, Staphylococcus aureus
atgaaacgtttaaataaattagtgttaggtattagtttcttatttttagtcattagtattactgctggttgtggcatgggtaaagaagcggaaattaagaaaagttttgaaaaaacgttgagtatgtatccgattaaaaacctagaggatttatatgacaaagagggctatcgagatgatcaatttgataaaaatgataagggaacatggattgtaaattctcaaatggcaattcaaaataaaggagaacctatgaaatcaaaaggcatggttctgtatatgaatagaaatacaagaacaacaaatggctattattatgttaatgtgattaagggcgaggataaaggtaaacatcaagacaatgaaaaaagataccctgttaaaatggtcgacaataaaataatccttactaaagaaattaaagatgaaaacataaaaatagaaatcgaaaactttaagttttttgttcaatatggaaactttaaagatttggaaaattataaagatggagatatatcatataatccagaggtgccaagttattcagcaaaatatcaattaactaatgatgattacaatgtaaagcaattacgtaaaagatatgacataccaacaaataaagcaccgaagttgttgttgaaaggtacagggaatttaaaaggttcatcagttggatataaagacattgaatttacgtttgtagagaaaaaagaagagaacatttactttagtgatgggttaatttttaaaccaagtgaggataaataa

SEQ ID NO: 413646 - DNA, 318 bp, Staphylococcus aureus
ttgaaagtacctgctgcaacagtaataccattattagttccagcaatacctgctacagttgctgcagatgcttctttcacccatggactcgtattattgcgacgtgtaaatgtcgtcacaacgttaccattacgtttaataactaatttatcagcgtatgtcgttacgttaccggcatgtgtattcactgtttggtttgctccaggtgcaattgttatcgctcctgccgctgtttcagtcacagttggtttcgctggttgcacatcttttactacaaatttcgctggtaaagatgttgcaaaagtatgtccgttatag

SEQ ID NO: 413647 - DNA, 318 bp, Staphylococcus aureus
ttgaaagtacctgctgcaacagtaataccattattagttccaacaatacctgttacattagctgctgatgcttctttcacccatgggctcgtattattacgacgtgtaaatgtcgttacaacacttccattacgtttaataactaatttgtcagcatatgtcgtaacattaccagcatgtgtattgactgtttggttcgcaccaggtgcaatagtaatcgctcctgccgctgtttcagtcacagttggtttcgacggttggacatcttttactacaaatttcgctggtaaagatgttgcaaatgtatgtccgttatag

SEQ ID NO: 413648 - DNA, 1125 bp, Staphylococcus aureus
atgaagatagcaattataggtgcaggcatcggtggattaacagctgctgcattattacaagaacaaggtcatactattaaagtctttgaaaaaaatgagtcagttaaagaaattggcgctgggattggtatcggagataatgtgcttaaaaaactaggtaatcatgacttagctaaaggtattaaaaatgctgggcaaatcttatctacaatgacagtgttagatgacaaagatcgcctgttaactactgttaaattaaaaagtaatacattgaatgtgacgttaccacgccaaacattaattgacattattaaatcttatgtaaaagatgacgcaatatttacaaatcatgaagtcacgcatatagataatgagacagataaagttaccatacatttcgcggaacaagaaagtgaagcatttgatttatgtattggtgctgatggaattcattctaaagtgagacaatctgtaaatgctgacagtaaagtattatatcaagggtatacatgctttagaggtttaattgatgatattgatttaaagcatccggattgtgcaaaagaatactggggaagaaaaggaagagtaggtattgttccgttattaaataatcaagcatattggttcattacaattaactcgaaggaaaacaatcataaatatagttcgtttggtaaacctcatttgcaagcatactttaatcactatccaaatgaagttagagagatcttagacaaacaaagtgaaacaggtatcttattgcataatatttatgatttgaaaccactcaaatcttttgtttatggtcgtactattttactaggagatgcagcacatgcgacaacgcctaatatggggcaaggtgctggacaagcaatggaagatgctatcgtattagtaaattgttttaacgcatacgactttgaaaaagcattacagcgttatgataaaatacgtgtcaaacatactgcaaaagtaattaagcgttctagaaaaatcggtaaaattgcccaatatcgtagttgtttatttgttgcagttagaaatcgtattatgaaaatgatgccaaatgcattagcagctggacaaactaaattcttatataaatcgaaagaaaaataa

SEQ ID NO: 413649 - DNA, 393 bp, Staphylococcus aureus; identical to SEQ ID NO: 405158

SEQ ID NO: 413650 - DNA, 396 bp, Staphylococcus aureus; identical to SEQ ID NO: 405389

SEQ ID NO: 413651 - DNA, 927 bp, Staphylococcus aureus
atgctaatcttagttgtagcagtagcgggttgtggtcaaaaagatactgaagagaaaactgaaatgacgacaataaaagatgaattaggaactgaaaaaattaagaaaaatcctaaacgtgttgttgtattagaatatagttttgctgattatttagcagcattagatatgaaacctgttggtattgcagatgatggcagcactaaaaatataacaaagtcagtaagagataagattggggcatatgaatcggttggatctagaccgcaaccgaatatggaagtgataagtaaattaaaaccggatttgatcattgcagatgttagcagacataagaaaatcaaatcagaattgagcaaaattgctccgacaatcatgttagttagcggtacgggagattataatgcaaatattgaagcatttaaaacagtcgctaaagcagtaggcaaagagaaagaaggcgagaagcgtctggaaaagcatgataaaatattagcggagattagaaagaaaattgaacagagtacgttaaaatctgcatttgcattcggtatctcaagagcaggtatgtttattaataatgaagatacatttatgggacaattcttaattaaaatgggtattcaacctgaagtcacaaaagacaaaactacgcatgttggtgaacgcaagggtggtccttatatatatttaaataatgaagaacttgccaatatcaatccaaaagttatgattttagccactgacggaaaaacggacaaaaatagaacgaaattcattgatcctgcagtttggaaatcattaaaagctgtgaaagataacaaagtttatgacgttgaccgaaataagtggttgaaatcaagggggattatcgcaagtgaaagtatggcagaagatttagaaaaaattgcagaaaaagcaaaataa

SEQ ID NO: 413652 - DNA, 420 bp, Staphylococcus aureus
atgttaaaatctattaatcatatatgcttttcagtcagaaatttaaacgattcaatacatttttatagagatattttacttgggaaattgctgtttactggtaaaaaaactgcttattttgagcttgcaggcctatggattgctttaaatgaagaaaaagatataccacgtaatgaaattcacttttcatatacacatatagctttcactatagatgacagcgaatttaaatattggcatcagagattaaaagataataacgtgaatattttagaaggaagagttagagatattagagatagacaatcaatttactttaccgaccctgatggtcataagctagaattacatactggcacacttgaggacagattaaattattataaagaggctaaaccacatatgacattttacaaataa

SEQ ID NO: 413653 - DNA, 681 bp, Staphylococcus aureus
atgaaatttaaagcgatagcaaaagcaagtttagcattgggaatgttagcaacaggtgtaattacatcgaatgtacaatcagtacaagcgaaaacagaagttaaacaacaaagcgaggctgatttaaaactttattatagtggaccaagttttgaacataaaaaagtaactgggtttaaatatactgatgaaaaaggaagctttttcgagttcatagacagaggtcaatttaataaggtttcattagttggtcctgataaagataaattgaatgatggggataactcaggtttagatgtatttgtcgttagagaaggatacggtagacaagctgataatcattcaattggtggcgtaacaaaaactaatagacaatcatattttgatcaaattaatacaccaattttagaaattaaaaatgatagtgaagatctttataaaggttatcatttaatatttaaagaagacatctcattaaaagaacttgattatagattacgagaacgtgcgattaaacaatacggcttgtattcaaatggtcttaaacaaggtcaaattacaattacaatgaatgatggcacaacacatacaatcgatttaagtcaaaaacttgaaaaagaacgtatgggtgagtcaatcgacggcagacaaatacaaaaaattctagtagaaattaaataa

SEQ ID NO: 413654 - DNA, 537 bp, Staphylococcus aureus
atgaaaatcaatgagtttattgttgttgaaggtcgagatgatactgaacgtgttaaacgagctgtagaatgtgatacgattgaaacaaatggcagtgcaatcaatgagcaaactttggaagtaattagaaatgcacaacaaagtcgtggtgtcattgtactgacagatccagattttcctggagataaaattagaagtacaattacggagcatgtaaaaggtgttaaacacgcatatattgatagagacaaagctaaaaataaaagaggaaaaatcggtgttgaacatgctgaattagaagatataaaggaagcgttaatgcatgtgagttcaccatttgaagaagcatatgagtcaattgataaaaccgtgttaattgagttaggactaattgtcggtaaagatgctagacgtcgtcgtgaaattttaagtaggaaattacgaattggtcactcaaacggaaagcaattattgaagaagttaaatgcttttggttatacggaaacagatgtaaggcaagctttaaaagatgaataa

SEQ ID NO: 413655 - DNA, 537 bp, Staphylococcus aureus
atgaaaatcaatgagtttatagttgtagaaggacgagatgatactgagcgtgttaaacgagctgttgaatgtgatacgattgaaacgaatggtagtgccatcaacgaacaaactttagaagtaattagaaatgctcaacaaagtcgaggcgttattgtattaacagatccagatttcccaggagataaaattagaagtacaattactgaacatgtcaaaggtgttaaacatgcgtatattgatagagaaaaagctaaaaataaaaaagggaaaattggtgttgaacatgccgacttaattgatattaaagaagcgttaatgcatgttagttcaccctttgatgaagcttatgaatcaattgataaatctgtgcttatagagttggggttaattgttgggaaagatgcaaggcgccgtagagaaattttaagtagaaaattgcgaatcggccattccaatggtaagcagttattgaaaaagttaaatgcatttggttataccgaagcggatgtaaggcaagctttagaagatgaatga

SEQ ID NO: 413656 - DNA, 867 bp, Staphylococcus aureus
ttgcacaaccgtggctcttttgaaggatttaaacaagctgtatcagaagaaaaatggctatatgtgcatggacgtaaagagtgggaaagttactacgctagagaaaatctcgaacgccaaaaatcattctttgatttttaccttaaagaagaaaataacgattggaaagatacgcctcatgtcatttatgaagttagagatcaattttataaaggcgaattcaaatcagcgtcagcgttccctttacctaacacagaatatacaccattgtatttgaatgctgaaaatcacacattgaatcatgcaaagattagtagcgcgcatgtcgcacaatatgactctgaagataaacaacaagatgtaagttttaaatatacgtttgacaaagatactgagttagttggaaacatgaacttaaaactatgggtaagcactaaagactcagatgatatggatttatttgcaggtattaaaaagttagatcgtcgtggtaatgaagttaacttccctgattttaatcatattgaaaatggtcaagtagctactggttggttacgcgtatcacatcgtgaattagatcaagaaaaatcctcaatcgcgcaaccttggcataaacatgaaacagaattaaagttgtcacaagatgagattgtacctgttgaaatcgaattgttaccttcaggcacgctatttaaacaaggcgaaacattggaagttgttgtaaaaggtagtgaaattgtaattggtaatagtactcctggcatgaaaacacgttatgaacatgaagaaaccgtaaataaaggcatgcacatgatttatactggtggtaaatatgattcacaattaatcattcctatcgttaattga

SEQ ID NO: 413657 - DNA, 705 bp, Staphylococcus aureus
atgactaatgttttataccaacatggtacattaggcacattaatggcaggattattaaaaggaactgcatcaataaatgaattattgcaacatggtgacttaggtatcgctacactaacaggttcaaacggtgaggtaatctttttagatggaaaagcttaccatgcaaatgaacataaagaatttgtagaattaaaaggtgacgagttaacaccatatgcaactgtaactaaattcgtagcagatacaagctatgaaacgaaagataaatcttcagaagcagtttttgcagaaattaaggaaaagatgttgagtgaaaatttattttcagcagtaaaaatttcaggcttatttaaaaaaatgcatgtacgtatgatgccggctcaagaaccaccttatacacgtttaatcgattcagctagaagacaacctgaacaaactgaaacgtatgtcaaaggttcagtcgttggtttctttacaccagaattattccatggtatcggatcagcaggatttcatgtacactttgcgaatgatgatcgtaactttggtggacatgtcttagattttgaagtagaagatgttaaagtagaaatccaaaatatagaaacatttgaacagcattttccaattcaagataaagatttcactaaagcaaatattgactataaagatattgcagacgaaattagagaagctgaataa

SEQ ID NO: 413658 - DNA, 735 bp, Staphylococcus aureus
atgagaattaaaacaccgagtccatcgtatttaaaaggcacaaatggacatgcgatattattattacattcatttacaggtacaaatcgggatgtgaagcatcttgcagctgagttaaatgaccaaggatttagttgttatgcaccgaattatccaggtcatggtttattgttgaaagatttcatgacatataatgtagatgattggtgggaagaagttgagaaagcttaccaatttttagtcaatgaaggttatgaatctatcagtgcaacgggtgtgtctttaggtggattaatgacattgaaattggcgcaacactatcctttgaaacgtatcgctgtcatgtcagcaccaaaggaaaagagtgacgatggtttaatagaacatttagtttattatagtcaacgcatgtcggatattttaaatttagatcagcaagcatcgagtgcgcaattagcagcaattgatgattatgaaggtgaaattacgaagtttcaacattttattgatgatatcatgacaaatttaaatgttattaaaatgccagctaatatattatttggtggtaaagatgcgccatcctatgaaacaagtgcacactttatttatgaacatttaggatcagtagacaaagaattaaatggtctgaaggattcgcatcatttaatgacgcatggagaaggcagagatattttagaagaaaatgttattcgctttttcaatgctttaacataa

SEQ ID NO: 413659 - DNA, 402 bp, Staphylococcus aureus
atggcgaaaataaattttgatgctgcgacgaaaggaaatccaggcataagtacatgtgccattgtaatcaaagaagatgagcagcattatacatatacacatgagttaggcgaaatggataaccacactgcagaatgggctgcttgtatctatgcattgaaacacgcccgtgaattaaacgttagcaatgcgttgttgtacactgactctaagttaattgcggatagtgttaacgctggttatgtaaaaaatgcaaaatttaaaccttattttgatcaattggaaatatttgaacaagattttgatttattatttgttaaatggattccgagagaacaaaacaaagaagcgaatcaacacgcacagcaagcattgtacaaattaattaaaaagaacaaataa

SEQ ID NO: 413660 - DNA, 771 bp, Staphylococcus aureus
atgataaaacgtgtaaataaattagtgcttggtattagtcttctgtttttagtcattagtatcactgctggttgtggcatgggtaaagaagcggaaattaagaaaagttttgaaaaaacgttgagtatgtatccgattaaaaacctagaggatttatatgacaaagagggctatcgagatgatcaatttgataaaaatgataagggaacatggattgtaaattctcaaatggcaattcaaaataaaggagaagctctaaaaataaaaggcatgcttttgaagatagatagaaatacaagaagtgcaaaaggattttactatactaatgaaataaagacggagaaatacgaagtagctcaggataatcaaaaaaaatatccagttaaaatgattaataataaattcatttctactgaggaagttaaagaagaaaacataaaaaaagaaatcgaaaactttaagttttttgcgcaatatagcaattttaaagatttaatgaattataaagatggagatatatcatataatccagaggtgccgagttattcagctcaatatcaattaactaatgatgattataatgtaaaacaattacgtaaaagatatgacataccaacaaataacgcgccgaagctgttgttgaaaggtacagggaatttaaaaggttcatcagttggatataaaaaaattgaatttacttttttagagaataaaaatgaaaatatttactttactgatagtctacatcttgaaccgagcgaggataaataa

SEQ ID NO: 413661 - DNA, 312 bp, Staphylococcus aureus
gtgtttggatttgtaagtaatccaagtctacaagttaaaaaagttgatgctaaaaatggcttttcgataaacgagttgttttttattcaaaaggaagaagtatcattgaaggaactggactttaaaataagaaaactcttaatcgaaaaatatagattgtataaaggaacgtctgataaaggtagaattgttatcaatatgaaagacgaaaagaagcatgaaattgatttaagtgaaaaattaagttttgaacgtatgtttgatgtaatggacagtaagaaaattaaaaacattgaagtgaatttaaattag

SEQ ID NO: 413662 - DNA, 630 bp, Staphylococcus aureus
atgaaaggtatgttcctaagtagtttttatgcaacgagaaagcaaacatatatttattttatagtcgctatcatagctgcgggatactttgcagtatttaatccgttgatgagttcggcaatggctggggttatgttaatcacacccattactgataatattaaacatgaaaaagactcaagatggatgtattatgtatctactttaccggttaaacgtaatgattatattaagtcatactttgccttttatttaatcttattcggtgcaagtttaatgattggattagttgtgactacaatcgtgacccaaagtgtgatgattggtattatgtcaggtttaatgagttttggtatcataggggcatactctatcattttcccattgacatttaaatttggcgctgaaaactctaatgtcattatgatatgtgcatctatactactacttatttctttcgtggtctttttctttatatatggtatggttagtggtgcatctgcattagaatttgaaaaaattagcactgaaggatggctagttgtcatagcatatgcggtcattggtatagttataacgagcgtttcttatatattgtctattaaaatttttaacaaacaagaactataa

SEQ ID NO: 413663 - DNA, 234 bp, Staphylococcus aureus
atgaaagatggacgaatgattttaactgaacagaaagatatacttttagcacaatatggaattgttacgacaggagataaagatgttgaaattcctaagcatttaatcattgcttctagattgtcaaaggggaaatatcaaattttagttaaagattatgcagaatttgaaaatgcagaacctttaaaacacattgatgacgctacgaaaatcataatgcgaggtgaagtataa

SEQ ID NO: 413664 - DNA, 546 bp, Staphylococcus aureus
atgaaaggaattaaagatgcgccatctttagataagttggatccattaatgacagaaaagtcgtttacgaatagtaaagggattcaaggatggaaagattacaaagaattaatgggtaaagtggaacttgcagattatagatttacaaaagattcaaaaggatcttctataaaagatgttgatgcattctttaaaggtaagaaaggtataaaaaggaaagtgattgaaacacacgatgatgtaaaacaagttgattattggtatgtagatccagatggaaagaaaattggcaattcaaacacacctgttttttacgcagaaattatgacaaaatataaagatggaaagttagtttatgcatcagtcgaaccaggatcttacgtaatacataaagatgatgcaattaaatatgacgattattctaagttaaaaaaattaagtcagctaactaaacttgatcatccaaaaccagttccatatagcgtagctcaaatcaaatctttcggagtacctttaacaagcgtttcatttatgacacatggataa

SEQ ID NO: 413665 - DNA, 207 bp, Staphylococcus aureus
gtgttgccggcattggcctatttcactttttcaccaaaaaattatgaagacaagtctaatccagatccaaaagttttaaatttagtagatatggatttcttaaatgcatctagtgattttggtaacgcacattttgttgttttaagtaaatatattaaagagtatgaatcaaactatgaaacagcgtcagatgattctttaaaatag

SEQ ID NO: 413666 - DNA, 795 bp, Staphylococcus aureus
atgagtaatggtattcctaatatcgttgtttataatccagctcccatatcagctattggcttagaccctaattctcgattatttaaattatataaaggatataaaggtaacattactagagttgtatctaataaagatgagttaactaattttattcagggatatacgaaatatgtttattttggacatgagatagtgattgaaaatggtaaaggtcattcaatggatggattcttaactgaacaagaacaaaaagctataaaaaaagaacttaaaaaactacaaggttatgtagaagaaaataataagtcatttgtaaagcattctaataatgccatatctaaattagctagtatagaattacttagaacaaatatgatgactacaaatggaggttggttatcttcttcgcaacaaaaagctttagaaagtttatcagctttaacaattgcgcagtcattcagtcaactgatagatgatgaaattaatcaaattaaaaaaatgtataatgaaaaggaaaagaaatttgaaaaaaattgggaagacgcgcaaaaagctggaaacgctgtaggtaaagatataactgtgagtgaagtgctagaagctttagatgaaggtcatgtgaatgaaagtagtatggtaggagatcctgaacaaatgatatctgcaaaagaaagacaactttcaacgatagggtcttctgtatcaaattatattctaagagttagatctagtattaatgaaatcgttgataaagatcaagtgcttgcatcacaaataggtggattactatga

SEQ ID NO: 413667 - DNA, 387 bp, Staphylococcus aureus
atgatgaaagttcgaattacttttattatcttatcaattttatcaacgattgtttgcttatttttagcagccatgcatccaacaggtccaaacacagtaacttttgaacagccatatttattcaccctcaacatcattataatggtattagtcgcattaccttcaattgttttagctatatatgattatatgagttttagaatttcttctgctattttacaatttctaggggctatctcttggttctttttatcattgatattatcgctcactcaatttacaccttttacattagcgtcatttataacttcaattattttgttcgcaagcacaattatcacattatctattggtggtaagtctgttgataagaatgattcccattaa

SEQ ID NO: 413668 - DNA, 834 bp, Staphylococcus aureus
atggaggttaaaacattttataatggaaacacgatgccacaaattggtttagggacatttcgtgtggaaaatgatgaaaattgcatggaaagtgttaagtatgccattgaacaaggatatcgtagtattgataccgcaaaagtttatgggaatgaagaacaagtaggtgctggcattcgtgccggattggagtcaactggtattgctagagaagacttatttattacttcaaaattatattttgaggatttcggtcgtgaaaatgtagcagctgcttacgaagctagtttatctagattaggtttaaaatacttagatttgtatctagtacattggccaggtacgaacgaagccgtaattgttgatacatggaaaggtatggaagatttatataaaaataataaagttaaaaatataggtgtcagcaattttgaacctgaacatttggaagctttgttggcacaagtgtcaattaaacctgtaattaatcaagttgaatatcatccatatttaacgcaacataaattgaaattatatttggcagcacaacatatcgtgatggaatcttggtcaccattgatgaatgcacaaattttaaatgatgagacaattaaagacattgctcaagaattaggaaagtcacctgcccaagttgttttaagatggaatgtgcagcatggtgtggttacaatccctaaatcggtaacaccaaacagaatctctgaaaacttccaaatatttgatttcgaattatcagatgaacaaatgacgcgaattgatggtttaaatcaagataagagaattggacctgatccaaaaacttttgaaggatag

SEQ ID NO: 413669 - DNA, 807 bp, Staphylococcus aureus
atgaatgcatggttaaaaccttatcgacgcgcattacatttagaagagccggttgtaaaaattaccgaagaacaacaatttaagtgtcatattgatacgataattaaaaagcaagtgcctgtatgttgttttacttttggaattccaagcgaacagattataagcaggttgaaagcagcgaatgtcaaacttataggtacagcaacaagtgttgatgaagctattgcgaatgaaaaagcgggtatggatgttatcgttgctcaaggtagtgaagcaggtggacatcgtggttcatttttaaaacctaaaaatcaattacctatggttggaacaatatctttagtgccacaaattgtagatgtcgtttcaattccggtcattgccgctggtggaattatggacggtagaggagttttggcaagtattgtcttaggtgcagaaggggtacaaatgggcactgcatttttaacatcacaagatagtaatgcatcagaactactgcgagacgcaattataaatagtaaagaaacagatacagtcattacaaatgcgtttagtggaaagcttgcacgcggtatcaacaataggtttatcgaagaaatgtcccaatacgaaggcgatatcccagattatccaatacaaaatgagctaacaagtagcataagaaaagccgcagcaaacatcggcgacaaagagttaacacatatgtggagtggacaaagcccgcgactagcaacaacgcatcccgccaacaccatcatgtccaatataatcaatcaaattaatcaaatcatgcaatataaataa

SEQ ID NO: 413670 - DNA, 276 bp, Staphylococcus aureus
atggcagttaaaattcgtttaacacgtttaggttcaaaaagaaatccattctatcgtatcgtagtagcagatgctcgttctcctcgtgacggacgtatcatcgaacaaatcggtacttataacccaacgagcgctaatgctccagaaattaaagttgacgaagcgttagctttaaaatggttaaatgatggtgcgaaaccaactgatacagttcacaatatcttatcaaaagaaggtattatgaaaaaatttgacgaacaaaagaaagctaagtaa

SEQ ID NO: 413671 - DNA, 450 bp, Staphylococcus aureus
ttgaaagaaattcctcaattagttactaaaaagaatgatgtatcagagacagagacggttaatatagataataaagacactgttaaacaaaaagaagctaaatttgaaaatggtgttattacacgtaaagctgatgaaaaaacaactaataatacagctgttgacaagaaatcaggtaaacaatctaaaaaaacaacaccttcaaataaacgaaatgcatcaaaagcatctacaaataaaacttcaggtcagaaaaagcaacataataagaaatcatcacaaggtgcaaagaaacaaagtagttcaagtaagtcaactcaaaagaataatcaaactagtaataagaattcaaaaacaacaaatgctaaatcatccaatgcatcaaaaacgccaaatgctaaagttgagaaagctaaaagtaaaatagagaaacgtacattcaatgactaa

SEQ ID NO: 413672 - DNA, 297 bp, Staphylococcus aureus
atgagtccaatggtaggaccagttataggaccggatatagtaccgagtatatcgtcaatgataaaggatgctcaaaaagtaaatattcgcacagttattgcacctgaacataagaaaaaacagaaaaatattgaaaatgaattaaaaggtgaagaaaaagtattgattgaacaaatggcgcagcattgcgaagcttttaaagctaattttaaaggcgcagctcaaggagattgggttaaaagtgccatgtctgagatagacagcattaaggatgacctgaaaaaaattaatagctaa

SEQ ID NO: 413673 - DNA, 315 bp, Staphylococcus aureus
atgttgcttaaacaagaagacgtacaattgataaaacgtaaagattatattcagcaccctaaagaaaatggttaccgcagtttacatatcgttgtatccattccagtctttttagcagaacgcgttgaggtattgcctgttgaaattcaaattagaacgataggtatggatatgtgggcaagtttagaacataaaatacgttataaaaacaatgcagagacggaaaagtatcgagatttactgaaagaatgtgcgacagagattactgaagttgaagataaattacaacaaattcattctgaaataacagagtag

SEQ ID NO: 413674 - DNA, 309 bp, Staphylococcus aureus; identical to SEQ ID NO: 411645

SEQ ID NO: 413675 - DNA, 627 bp, Staphylococcus aureus; identical to SEQ ID NO: 407013

SEQ ID NO: 413676 - DNA, 180 bp, Staphylococcus aureus
atgagtggcacactaggtggcgcctttggtatagcgttaagtacaactgttttcagtatgttacaactaaactatacgcctagtgtagctgcaactgtaacatttatcgtcagcattatattaatgatgctcggctcattgtctgcatacatgatcattccaaaaacggttaaatcttaa

SEQ ID NO: 413677 - DNA, 420 bp, Staphylococcus aureus
atgctttacaaagttatattggcagtagttgactgcagtccacaacatagaggcttcggaatgtcagcttctatttcatgcaagttggcggagctccaacatagtggaattggatcctcaatttctacaaacaatgtaagttggggaaacgggccacaaactcagaagctggcggaaagtcagcttaaaataacatgtaagttggcgaggccccaaaatagtgaaatcggatttctaatttctacaaacagtgcaatttggggaaacgggccacaaactcagaagctggcggaaagtcagcttacaataacgtgcaagttggcggggccacaacatagaaaaattggatcctcaatttctacaaacaatgtaagttggggaaacagccccaacactgaaactggcagaaagtcagcttaa

SEQ ID NO: 413678 - DNA, 486 bp, Staphylococcus aureus
gtgcttgtgaaacctgaaattcgtatgcctaaagttggtggacgtgtcatgagtttacaagacccaacaagaaaaatgagtaagagtgatgataatgctaaaaacttcatttcattattggacgagccgaatgttgcagctaaaaaaattaaaagcgcagtaactgattcagatggtattattaaatttgatcgtgacaacaagccaggtataacaaatttaatttcaatatacgctggattaaccgacatgccaattaaagatattgaggcaaaatatgaaggggaaggttatggtaaatttaaaggtgaccttgctgaaatagttaaagcatttttagtagaattccaagaaaaatacgaaagtttctataactcagataaacttgatgatattttagatcaaggtagagataaagcacacaaagtttcatttaaaactgtcaaaaaaatggaaaaagcgatgggtttaggacgtaagagataa

SEQ ID NO: 413679 - DNA, 486 bp, Staphylococcus aureus
gtgtctacattagacgaaggtggtgttgtcgcgtttggttttgattgcggtgcttctactttagttgagagcggtgttgattgtggtacttccactttagttgaagatggtgttgtcgcgtttgctgcttgttgcggtgtttccactttagttgaaggcgaggttggtggatttggtgtttgttgtggtgtttccactttagttgaagatggtgttgtcgcgtttgctgcttgcgttgtttccactttagttgaagatggtgttgtcgcgttcggtgtttgttgcggtgtttccactttagttgaaggcggtgttgtcgcatttgctgtttgttgcggtgcttccactttagttgaagatggtgttgttgcatttgctgcttgcgttgtcgttgtgattacacctgttgttaaaaggcctagtgctaaacttgttttagcaatcgttgttattttcatagttgtatgctccattcataattattag

SEQ ID NO: 413680 - DNA, 384 bp, Staphylococcus aureus
atgccatatatcacatcttatttcatgacgcgtgctatcggcgacagacctttagtcgtcccgcatcaatcacaaaatttagcatttattggtaactttgcagaaacagagcgagatactgtatttacaacagaatattcggttcgtactgccatggaagctgtttatcaattactaaatatagatcgtggtattccggaggtcatcaatagtacatttgatcttcgcgtcttaatggatgccgtatacgaactgaatgaccatcaagatttgcgcgagattactaaagattcgaaaatgcagaaactcgcattagcaggattccttaaaaagataaaaggtacgtacattgagtcattattaaaagaacacaaattgttataa

SEQ ID NO: 413681 - DNA, 204 bp, Staphylococcus aureus
gtgcgtaatcgattgaaagaattacgagcacgagatggcttaaaccaaacgcaacttgctaaacaagcgggcgtttcaagacaaaccatatcgctaattgagcgaaacaattttatgccatcagtattaacggcaataaaaattgctcgaattttcaatgaaacggtggaaactgtttttattattgaggaggatgaggtatga

SEQ ID NO: 413682 - DNA, 276 bp, Staphylococcus aureus
atgtcaaatggtatgccaattattgtaaatggtgtaatgaaacctattcctacgttatataaaccattaaattcagttgatataaatactaaagaagactttaaggcaacaattgaacgttctgatagttgtgctgtacctgcagcaagtatagtgtgtgaacacgttgttgcatttgaaatagcgaaagcattacttgaagagtttcaatcaaaccatattgaacaacttcaacaacaaattgctgaccgcagacaattaaatgttgagttttaa

SEQ ID NO: 413683 - DNA, 396 bp, Staphylococcus aureus
atggaagcaatcaatatcatttttggtagtgttggtttgaattttaaacagttaattggttatttgtttgcacctatcgcattcttaatggggattccttggagtgaagctgttccagctggctctttaatggctacaaaattaattacaaatgagtttgtagcaatgctagattttaaaaatgttttgggtgacgtatcagctagaacacaaggtattatctcagtttacttagtgagttttgctaatttcggtactgttggtatcatcgttggttcaattaaaggaattagtgataagcaaggagaaaaagttgcatcctttgcaatgaggttgctacttggttcaactctagcttcaatcatttcaggatcaattattggcttagtattgtaa

SEQ ID NO: 413684 - DNA, 183 bp, Staphylococcus aureus
atgaagaaggatacttatcaatcatacctcttttacaacagtgaagaacccgtgcataatggcttacgaattatagtttgtaaggaagaagagggatacatgcgccgagcacatgaaaaaaatcccctaacaactaaaagttgtaaggtaaaagagggatacatgcaccgagcacatgcataa

SEQ ID NO: 413685 - DNA, 144 bp, Staphylococcus aureus
ttgactgtaacttggtataacgtcattgctttaacaatgattgttattgtcttaagcgtagttacaacaccaattataggtattccagctggtttattaggtggtgcttattatttaaaaagccgtgaagaaaaaggtaaataa

SEQ ID NO: 413686 - DNA, 180 bp, Staphylococcus aureus
atgttagcaggatacttttcaaaagctggtaattctggacaaatacctgttgattatacattaattaaaaatgtgcataaaccatcaggtgcaaagcctggatttgtaacatatgacaatcaaaaaactttgtatgctacacctgattatgaacatattaaaaaaatgaaacaatcataa

SEQ ID NO: 413687 - DNA, 249 bp, Staphylococcus aureus
gtgtctacattagacgaaggtggtgttgtcgcgtttgctgcttgttgcggtgcttccactttagttgaagatggtgttgtcgcatttgctgcttgttgcggtgcttccactttagtggaagatggtgttgtcgcgtttgcttcttgcgttgtcgttgtgattacacccgttgttaaaaggcctagtgctaaacttgttttagcaattgttgttattttcatagttgtatgctccattcgtaattattag

SEQ ID NO: 413688 - DNA, 159 bp, Staphylococcus aureus
atgctaagccataatattcccataactagcgcactcaacacttttgttattgtcttagcagcaagtgaaataattatgatcattaaggcgaaatataataatgtgctggcgttggaatgtccacttggaaatgaaaagcctgtatcaacggctaaatga

SEQ ID NO: 413689 - DNA, 180 bp, Staphylococcus aureus
atgagtggcacactaggtggcgcctttggtatagcaataagtactacagttttcagtatgttacaactaaactatacgcctagtgtagctgcaaccgtaacatttatagtcagcattgtattgatgatccttggctcattgtctgcatacatgatcattccaaaaacagttaaatcttaa

SEQ ID NO: 413690 - DNA, 153 bp, Staphylococcus aureus
atgatggaacatcctgaggttaaaaatcccacgactaaaaaccttgaaggatttaatgaagaaatacataaagatgaagctacaactaaagttgtcagtgataacacggaaccgccgattgaatcaaaagaccatgtctcgaaaaaagattga

SEQ ID NO: 413691 - DNA, 210 bp, Staphylococcus aureus
ttggcgcattttaatgaagtggatgcaattccagaattgaaaaaagttgcaacaacagatgaaagaccgatgattcgagcaactgcttattgggctattggtcaaattcttggggaagaagcaagagattttatcaatgcaaattatgatcaagaggatgcagaagttcaaaatgaaatgataaaaggattagacacaaggagagaatag

SEQ ID NO: 413692 - DNA, 663 bp, Staphylococcus aureus
atgaaaaaaattatggttattttcggtacgagacccgaagcaataaaaatggcaccattagtaaaagaaattgatcataatgggaactttgaagcgaacattgtgattacagcacaacatagagatatgttagatagtgtgttaagtatatttgatattcaagctgatcatgatttaaatattatgcaagatcaacaaacgttagcgggcattacggcgaatgcgcttgctaaacttgatagcatcattaatgaggaacagccggatatgattttagtacatggtgatactacaacgacttttgtaggaagcttggcagcattttatcatcaaattccggtcggacatgtagaagctggacttcgaacacatcagaaatactcaccatttcctgaagagttaaatcgagtcatggtaagtaatattgctgaattgaattttgcgccaacagtaattgcagctaaaaatttactttttgaaaacaaagacaaagagagtatctttattaccggaaatacagttattgacgcattgtcaacaacagttcaaaatgagtttgtttcaacgattattaataaacataaaggcaagaaagttattttactaacagcgcatcgtcgtgaaaatattggagaaccgatgcatcagattttaaagcagtaa

SEQ ID NO: 413693 - DNA, 1008 bp, Staphylococcus aureus; identical to SEQ ID NO: 409146

SEQ ID NO: 413694 - DNA, 165 bp, Staphylococcus aureus
atggaagcatccggagtaaaagagacaactgagattagttctattaagaaacctgcaacgacgcatacattacatcattcgcatatatctacacttgctcaattaggaattaacttaaaagcaatgcaagagcatgtaggtcattcagattataaaaaaatctag

SEQ ID NO: 413695 - DNA, 225 bp, Staphylococcus aureus; identical to SEQ ID NO: 408376

SEQ ID NO: 413696 - DNA, 573 bp, Staphylococcus aureus
atgaaaagaatacttatcattgttgttttattgttttgttattcacaaaatcatatcgcaaccgctgatgttggagttttgaatcttaggaactattatggtagctatccaatcgaagaccatcaaaatattaatcctgacaataatcgtctttcacatcaattagttttttctaaggataattcgacagtaacagctgaatttaagaatgttgaagatgtaaaaaaattcaaaaatcgtgctgttgatgtatacggcctaagttatagtggatattgtctaaaaaataaatatatgtacggaggagttactttagcgggtgattatttagagaagtctagatgtattcctattaatctttgggttaatggcaaccttaaaacaatttctactgacaaagtatcaactaataaaaagatagtaacagctcaagaaattgatactaaattaagaagatatctacaagaagaatataacatttatggctttaatgatacaaataaaggaagaaattacggtacaaaatccaagttttttctggatttaatactgggaaaatatcatttcatttga

SEQ ID NO: 413697 - DNA, 447 bp, Staphylococcus aureus
atggaaacaggtaaaagtgatgtacttgataaaattgaaaaaattaataaaaaagatagtgccttacaagaaattatacccaaaggctatgaaattgaacatcatcaatgcggtgttgccttatatcaacttataccaagtaaaaaagaaggcgaaccagataaaaaggtttttatcacaaatacaatccctcaaattactgaacgctttgaagatattgagagtaacgaagtcagctttaatatgcttttctatgacaataaaacgccagtaaatatagctgtgagtgccgaagaaatttcagatagtcgtcaactcttgaaattggttaataaaaagctagatgtaacatcgtcaacatctactaaacttgttgactatattaatatatctaaacggtataatccaccattaaatgttaaagttgcaacgcgtttgggcatgtga

SEQ ID NO: 413698 - DNA, 234 bp, Staphylococcus aureus
ttgaatacatggcttaatgcaaacttgaaatctattgaacaagtacgtgcatttgaaaagcaacaacttgaaagcaaaaaacaaaattataaacctttcgttaaacaatcaaaagaaaaaacacccaaatggctcacagacagcacgagagaaacgaaaacgccggaagtagatgaaaaccttgagaaagacagagaagcttttattaagcgtctaaatagcaaatgggagtga

SEQ ID NO: 413699 - DNA, 447 bp, Staphylococcus aureus
atgatttcacacttgataacggatacttcgaagaagaaacatcagacagtgactcagacagtgattcagattcagatagcgattcagactcagatagcgattcagactcagacagtgaatcagactcagacagcgactcagattcagacagcgactcagactcagacagcgattcagactcagatagcgactcagattcagaaagcgactcagactcagacagcgattcagactcagatagcgactcagattcagaaagcgactcagattcagaaagcgactcagactcagacagcgactcagattcagacagcgactcagactcagatagtgattcagattcagacagcgactcagattcagacagcgactcagactcagacagcgactcagattcagacagtgactcagatagcgactcagattcaggaaaacatacacctgtga

SEQ ID NO: 413700 - DNA, 282 bp, Staphylococcus aureus
atgcttcttttctatatcattggtgtcctagttggaatgcttattcctatccaaacatctgtcaattcaagactatcactgtatactaaatcacctttctatacttcattcatttcattttcagttggaacaatttgtttaattattttaaacatcattatcaatccagaagtatttactattcacttttacaataatcaatcatttaactacacatggatagtcggtggtttgcttggggttagctttttaactggaaatttattgttattgccaaaataa

SEQ ID NO: 413701 - DNA, 1362 bp, Staphylococcus aureus
atgaaaacctctttcttcatcgttggtgagaaagaggtatttttaattggaaagcaggtaaaaaggatggaagtacataaaaagagcaatgcttgggcattattccccttgttattatttgtggcgttgtttttaggcgtaggtattatcacaggtgattttacttcaatgccattaaatgttgcaattacgataacggtaatagtggcgttattaatgaatcgaaaagaatcatttgctaaaaaagttgaggtcttcacgaaaggtgcaggccattcaaacattattttaatgatgttgatttttattttagcaggtgcattttcaaatacagctgaaaaaatgggtggcgtaaagtcgacagttaatttaggactatcattaatcccagaaaatttaattattgtaggattgtttgtgatttgtatgtttgtttctatatctatgggaacgtcagtagggactgttgctgcaatagcacctgttggttacgggtttgcacaagcgacagatgtaccaactgcgctagcaatggctacagttgttggaggtgcaatgttcggcgataatctatcaatgatttcagatacaacaattgctgcggttagaacacaacatacgaaaatgaaagataaattcagagtaaactttaaaattgtattgccaggtgctattttaacgattattattctgtatttcttaacgaatggcatttctttaaatcatgctaaaaactatgattataatctaattaaagttgtaccgtatattttagtattggtattagcattattaggtgtaaatgtcattatcgtattgattggcggaacattattagccggaatcattggtctcatagatggttcattcggttggatggggctactagatgcagtgtccaaaggtattataagcatggaagatattgctatgattgcgttgctaattggtggtttagtcggtattattcaacacaatggtggtattgaatggttgttgcaatttgttcgctctaaagtgaaatcaaagcgtggcgcagaattaggaattgcgagtttggtaagtgtcgcagatattgccacggcaaacaacaccatctctattattatgtcaggtcctttagctaaaaatattgcagatgaatatgatgtagattcaaggaaatcagcaagtattcttgatatatttggaggctgcttccaaggtttattaccatatagcccgcaagtcatttcagcggctggtgtagctggtatttcaccgttaatgttattcccatacagcatttatcctatattattaggtgtatgcggacttattgcgattttatttaattttccaaagctaaaaaaagaacactag

SEQ ID NO: 413702 - DNA, 1014 bp, Staphylococcus aureus
ttgtttgctggtccaatttcggattctactgggcgcagaaagccgcttattatagctatgattatttttacattagcaagtttaggtattgtttttgtacataatatttggctgatggttgcattaagatttcttcaaggagtgacaggtggagcagcagcagttatttcaagagctatagcaagtgatatgtatagtggtaatgaactaactaagtttatggcattattgatgcttgttaatggtattgcaccagttgttgcgccaacaatagggggcataattttaaattattctgtctggcgtatggtctttgtcattctgactatctttggcttcgtcatggtcataggttctttattaaaagtacctgaatcattaacagtgacaaatcgtgagtcaagtagtggattaaagacaatgtttaaaaacttcaaaatattattgaagacgccacgttttgtattaccaatgctcattcaaggtatgacatttgtaatattatttacttatatttctgcgtctccgtttattattcaaaaaatttatggcatgactgcaatacaatttagttggatgtttgcaggaattggtattacgctcattatatcaagtcaacttactgggtaccttgttgattttatagactcacaaaaattgatgagaggcatgacgatgattcagattatcggtgtaattttagtgacgattgtattgcttaatcattggaacttttggattttagcgataggatttatcattttaatagcaccagtgacaggtgttgcgacacttggttttacaatagctatggatgaaagtagtagtggtagagggagttcatcaagtttattaggtttagtgcagtttttatttggtggtgttgcttcgccattagtgggggtaaaaggtgaagataatcctataccttacataattattataatagctacagcagttatattaattattttacagatttataatatgaaggtatttaaaacaaatcgatga

SEQ ID NO: 413703 - DNA, 165 bp, Staphylococcus aureus
gtggcacatatccatgtagtgaatggcacttattactttcatgggcatatcgtaccaggttggcaaggcgtgaaaaagacatttgatacagccggagagcttgaaatatatataaagcaacatgatttggaatatgaggaacagaagcaactaactttattttga

SEQ ID NO: 413704 - DNA, 1473 bp, Staphylococcus aureus
atgactagtaaatcaagtccattaatttttgaaagatctcgtgaaggcagatatgcatattcattaccaataagtgatattaaaacaaattctgttgagtcattgttagatgataaatttattcgtaaaaacaaagcggagtttcctgaagttgctgaactagacttagtacgtcattatactgaactttcaaataaaaatttcggtgtagataacggattttatccattgggttcatgtacgatgaaatataaccctaaaattaatgaaaaggttgctagaataccaggattcagtgaatcacatccattacaagatgaagaccaagttcaaggttcattagaaattatttacagtttgcaagaagaattaaaagaaattactggtatggatgaggtaacattacaacctgctgctggtgcacatggtgaatggactgcattgatgatatttaaagcttatcatgagaataatggtgaaggtcatcgtgatgaagtcattgtgccagattctgcgcatggtacgaatccagcctcagcttcatttgcaggatttaaatcagttactgtaaaatcaaacgaacgtggtgaagttgatattgatgacttgaaacgtgttgtaaatgaaaatacagcagctattatgttaaccaatccaaacactttaggtattttcgaaaaaaacattatggaaatccgtgaaatcgtccataatgctggtggtctattatattatgatggtgcgaatttaaacgctattatggacaaagttcgtccaggagatatgggatttgatgctgttcatttaaacttgcataaaacctttactggtccacatggtggcggcggtcctggttcaggtccagtcggtgtagtaaaagaactagcaagttacttaccaaagccaatggttattaaagatggcgacaaatttaaatatgataatgacattaaaaattctatcggacgtgtaaaaccattttatggtaactttggtatttacttaagagcttatacgtatattcgaactatgggagcaactggacttaaagaggtttctgaagcagcggttcttaatgcgaattatattaaagcacgtttatctgaacactttgaaataccttataaacaatattgtaaacacgagtttgtgttaagtggtgtgcgtcaaaaagaatttggtgtacgtactttagacatggctaagcgattattagatttcggtgtacatccaccaacaatctacttcccattaaatgttgaagaaggtatgatgattgaaccgactgagacagagtcaaaagaaacacttgattatttcatcgatacattaattagtattgctgaagaagctaaaaatgatcctgataaagtgttagaagcaccacatacaactgtgattgatcgattagacgaagctacagctgctcgtaaaccaatattaaagtttgaaaatcttaaaaaggaaaaataa

SEQ ID NO: 413705 - DNA, 1092 bp, Staphylococcus aureus
atgtcaagtgatttaaaacaaacacctttatatcaaaattatgttgatagaggtgcaaaaattgtggaattcggaggatgggcgatgcctgttcaattttcaagtattaaagaggagcataatgctgttcgatacgaaattggcctgtttgatgttagtcatatgggtgaaattgaagtgacaggtaaagatgctagtcagtttgtgcaatatttattatcaaatgatactgataatttaactacttcaaaagcattatatactgctttatgtaatgaagaaggcggtattattgatgatttagtaatatataaattagctgacgacaattatttattagttgttaatgctgctaatactgaaaaagattttaattggattttaaaacacaaagagaaatttgatgttgaagtacaaaatgtatcaaatcaatatggtcaattagcaatacaaggaccaaaagctagagatttaattaatcaattagttgatgaagatgtaactgaaatgaaaatgtttgaatttaaacaggatgtcaaattatttggagcaaacgtcattttatctcagtcaggttacacaggtgaagatgggtttgaaatttattgtaatatcgatgatactgaaaaaatttgggatggtttattagagtataatgttatgccatgtgggttaggcgctcgtgatacattaagattagaggctggattgccattacatggacaagatttaactgaatcaattacgccatatgaaggtggtatcgcttttgcaagtaaaccattaattgatgctgattttattggtaaatctgtattaaaagatcaaaaagaaaatggtgcaccaagaagaacagtaggattagaattacttgaaaaaggaattgcaagaactggttatgaagttatggatttagatggaaatattattggaaaagtaacttcaggaacacagtctccatcatcaggtaaatcaattgcacttgcaatgataaaaagagatgagtttgaaatgggtagagagttgcttgttcaagttcgtaagcgtcaattaaaagcgaaaattgttaagaaaaatcaaattgataaataa

SEQ ID NO: 413706 - DNA, 936 bp, Staphylococcus aureus
atgagaaaaattatgcgaaccttattatgcacatcaatcatagtaagcggttgctctttcataccaaaaaaccaaacaaaagatattccaaagacggttagcgtcaaagattatgatggtcaatatattggtgaacataaaaaaagaaacgaagtatttctgaaaaaacataaaggtgaagcgataaaaaaatataaagactatgtgaaagatacatttggttatgattgtaaaattaatttagttgaggcctatactaatgcttctgggtttagtgagaaaagaaaaacagatggtttagtagtcgtcggcactgtcaattatgacgttccttttcagtttagattgatttttgttgaatctgacaatggcataactatcacaacatttacacctggccataaaaacgaaacgtcagccgcagttgcagccatgatgtataagcgttatgaacacgatatagaacaagctcggttaaaatttaaatcagaagttgagaaaaacggttattatgccatgaatgaaaaacttcaaaagaaacaagaattcaatggtgttactaaacaatttttgaatttcaacacagacagtatcgatgatttggataagttcaaaaaagaattcaaacctgttatgcacttaaaaggtgatgcattcaatcaacaattacaaaatttaattaataaatatcctgaaattaagaaaagcatgaaatatgactttattgcctattacgataaagatgagaacagagagactgttgctaactatgtttggaacctacaaaaaacaactaatgacacaatgaaacttcatccaggaaataaaagcatcatattttataaagataaagtttctgcttcacaattagatgagcataaacgtttacaatcagattctcaagaaatctccatttctggaggggaaaacaattaa

SEQ ID NO: 413707 - DNA, 738 bp, Staphylococcus aureus
atgttggcaatttattttgcaagtaagaagccgactgcacgatacacatttggatatttaagatttgagatattagctgcatttttaaatggtttagcattaattgtaatttcaatctggattttatatgaagctattgtacgtattatttatccgcaacccattgaaagtggcattatgtttatgattgctagtattggtttactcgtcaatattattttgactgttatacttgtaaggtctttaaaacaagaagacaatatcaatattcaaagtgcattatggcatttcatgggagacttattgaactcaattggtgtcatcgttgcagttgtattgatttactttacagggtggcgcatcatcgacccaatcattagtattgtaatttcactcatcattttacgtggtggttataaaattacgcgtaatgcgtggttaattttaatggaaagtgtgcctcaacatttggatactgatcaaattatggcagatataaaaaacatagatggcatattagatgtacatgaatttcatttgtggagtattacaacagaacattactcattaagtgcccatgttgtgttagataaaaaatatgagggcgatgattatcaagcgattgatcaagtatcatcattgttgaaagaaaaatatggcattgcacattcaacgttgcaaattgaaaacttacaattgaatccattagatgagccatacttcgacaaattaacataa

SEQ ID NO: 413708 - DNA, 576 bp, Staphylococcus aureus
ttgtcgtttcatcaagtagaagaatggtttgagatatttcgacagtttggttatttacctggattcatattgttatatataagagcgattattccagtatttccattagcactctatattttaattaatattcaagcctatggacctattttaggtatattgattagttggcttggattaatttctggaacatttacagtctatttgatctgtaaacgattggtgaacactgagaggatgcagcgaattaaacaacgtactgctgttcaacgcttgattagttttattgatcgccaaggattaatcccattgtttattttactttgttttccttttacgccaaatacattaataaattttgtagcgagtctatctcatattagacctaaatattatttcattgttttggcatcatcaaagttagtttcaacaattattttaggttatttaggaaaggaaattactacaattttaacgcatcctttaagagggatattaatgttagttgtgttgattgtattttggattgttggaaaaaagttagaacagcattttatggggtcgaaaaaggagtga

SEQ ID NO: 413709 - DNA, 1284 bp, Staphylococcus aureus
ttgaatccaagattaacgattggcaaacaaattacagaagtactatttcaacataaacgtgtatctaaatctgaagcaaagtcgatgacaatagacattttagaaaaagtaggtataaaacatgcaactcgacaatttgatgcttatccgcatgaactttctggtggtatgcgtcaacgtgtcatgatagcaatggcattgattttaaagccacaaattttaatcgcggatgaaccaacaacggcattagatgccagtacacaaaatcaattactgcagttaatgaagtccctttatgagtacacagaaacgtctattatttttatcactcacgatttaggcgctgtgtatcaattttgcgacgatgtgattgtaatgaaagatggcagtgtcgttgaaagtggcacggttgaaagtatttttaaatcgccacaacatacctatacgaaacgcttaatagatgcgattcctgatattcatcaaacgcgtccgccaagaacgttaaacaatgatattttattaaaatttgatcgcgttagtgtagattatacatcgccaaatggtagcctataccgagcagttaatgatattaacttggctattagaaaaggcgaaacattaggcattgtcggtgaatcagggtcagggaaatcgacattagctaagacggtcgtcggtctaaaggaagtgtcagaaggctttatttggtataacgaattaccattaagtttatttaaagatgatgaattgaaatctttacgacaagagatacaaatgattttccaagatccattcgcatctattaatccaagatttaaagtcattgatgtgattaaacgaccactaatcattcatgggaaagtcaaagataatgacgacattattaaaactgtcgtatcgttgttagaaaaagttggtctagatcaaagtttcttatatcgctatccacacgaattatctggtgggcaacgccagcgtgtaagtatcgcgagagcacttgctgtagaacctaaagtgattgtttgcgacgaagcagtgtcagctttagacgtttcaattcaaaaagatatcatcgagttattaaaacaattacagttagacttcggcatcacttatttattcatcacacatgacatgggtgttatcaatgaaatatgtgatcgcgttgcagttatgaaaaatggcgaaatcgttgaactgaataacacagaagatattatcaaacatccgcaatcagactatgcaaaacaacttatttcagaagtagcagttattgctaaataa

SEQ ID NO: 413710 - DNA, 1722 bp, Staphylococcus aureus
atgatgaaattttcagtaatagttccaacatacaattcagaaaagtatataacagaattacttaatagccttgcgaaacaagattttccgaaaactgaatttgaagtaattgttgttgatgactgttcaacagatcaaacattacaaatcgttgaaaagtatcgtaataagttgaacttaaaagtggatcaacttgaaacaaattcaggaggcccaggtaaaccgagaaacgttgcattaagacaagcagaaggtgaatttgtattattcgtggattctgatgactatattaacaaagaaacattaaaggatgcagcagcatttattgatgaacatcattcagatgttttgttgattaaaatgaaaggtgtcaatggtcgtggggtaccacaatctatgtttaaagaaacagcgcctgaagtgactttgttaaattcaagaattatttatactctaagcccgactaaaatctatagaacagcattactaaaagataatgacatttatttcccagaagaattaaagagcgcagaagatcaattatttacgatgaaagcatatttgaatgcaaatcgaatcagtgtgttaagtgataaagcgtattattatgctacaaagcgtgaaggggaacatatgagtagtgcgtatgtttcacctgaagacttttacgaagtcatgagattgattgctgtagaaatattaaatgcagatttagaagaagcccataaagatcaaatcttagcagaatttttaaatcgtcattttagtttttctcgtacgaatggcttttcactaaaagttaaactagaagatcaaccgcaatggctgaatgctttaggcgattttatacaagcagttcctgaacgcgtagatgcattggtaatgagtaaattacgaccattgttacattatgcgagagcgaaagatatagataactatagaactgtggaagaaagctatcgccaaggtcagtactaccactttgatattgttgatggaaaattgaacattcagttcaatgaaggcgaaccatactttgaaggtattgatattgctaaaccgaaagtgaaaatgacagcatttaaatttgataatcataaaattgttacagagctaacgttaaatgaatttatgattggcgaaggacattatgatgtcagacttaaattacattcacgaaacaagaagcatacaatgtatgtacctttaagtgtaaatgcgaataaacaatatcgttttaacattatgttagaagatattaaatcgtatttacctaaagaaaaaatttgggatgttttcttagaagtccaaataggtacggaagtatttgaagtgcgtgttggtaatcaacgtaataaatatgcatatactgcagaaacaagtgcattaattcatttgaataatgatttttatagattaacaccgtatttcacaaaagactttaataacatttcgttatactttacagctattacattaacggattcaatctcaatgaagttaaaaggtaagaacaaaatcattttaactggtctggatcgtggttatgtatttgaagaaggtatggctagtgtcgtgctaaaagacgacatgattatgggaatgttaagccaaacgtcagaaaacgaagtggaaatcatacttagtaaagatattaagaagcgagatttcaaaaatattgttaagttaaacactgcacatatgacttactcgctaaaataa

SEQ ID NO: 413711 - DNA, 924 bp, Staphylococcus aureus
ttgtctatttgtgcagctgatcaaaggtattacacaggtcgaagagatgaaaatgtactgcgcaaaaaattaccaatgtcactagttcatgaagctgttggtgaagttgtatttgatagtaaaggggtatttgaaaaaggtacgaaagtagtaatggtgccgaatacacctacagagcaacatcatattattgcggagaattacttagcctctagttattttagatctagtggttatgatggttttatgcaagactacgttgtgatggcacatgatcgtatcgttccgctgcctaatgacattgacttgagtacgatttcatacacagagttagtgtcagtaagttatcatgctatacaacgatttgaacgtaaatctatacctttgaaaaccagctttggtatttggggtgatggcaacttaggttatattactgctattttgctacgtaagttgtacccagaagctaaaatttatgtatttggtaagacagactataaattaagtcatttttcatttgtagatgacatctatacattaaatcaaataccagatgatcttaaaattgatcatgcatttgaatgtgttggaggtaaaggaagtcaagttgcacttcaacaaatagttgaacatatttcaccagaaggcagtattgctttgttaggcgtaagtgaattacccgtggaagtgaatacacgattagtacttgaaaaaggattaacgttgattggtagtagtcgaagcggctctaaagattttgagcaagttgttgatttatatcgtaagtacccagacattgttgaaaagttagccttattaaaaggacatgaaattaatgtatgtacgatgcaagatatcgtccaagcgtttgaaatggatttatcgacatcttggggaaaaacagtattgaaatggacgatttaa

SEQ ID NO: 413712 - DNA, 453 bp, Staphylococcus aureus
ttgggtgttttatttctttctgccccttcaactaaggcaatcattttatctaaaaaagatgtacccgcttcactctcaacacgtatttctaaccaatcagatgttacaagtgtaccgccaatgactccatcaaaatcaccacctgattcttttatcacaggtgcagactcaccagtaattgcagattcatcaacggttgctaatccatttattacaacgccatcagcagggattgtttctccgttttctacccgaatagtttggccggcttttaactctgtggcgttcactatccgatacgctccattttcttctatcaatcgagcagttaaatttgattgtgcttgtcttaaactatcagcttgcgcttttccacgaccttcagcaaaggcttctgaaaaattagcaaacaatatagttattaataatatgatgaaaattgtaatcaaataa

SEQ ID NO: 413713 - DNA, 330 bp, Staphylococcus aureus
atgggtaagttttctaaaggttcaaactctctttcgaaaaagttgggtgatttagctgataaagctgaaaaactcgacgaaacaactttagaattcagtcaagaagacctttttaatgattcgtttatgaatgaaaatacaaaattcaaatgttttaacgattttattgaatcttctcctgtagatgtccaatcccaagaagatttcgattcgttaaaaaataatgagtcattcaacgatttcgttagagaaaataccaaattcgaaaactggtctgatatggtcgaacattcaagttcaatccttattggtaagatgatttttgaataa

SEQ ID NO: 413714 - DNA, 1035 bp, Staphylococcus aureus
atgattaatgaggacagtatacaattagaagctttattaaaaaaatactatgaacattcaatcgaaaaaatagtatttgccgacgatagtggtaaaattattgcgatgaatgatgcagctaaagatatattatccgaagaagataattatagtgcagtagcgaatgcgatttgtcacagatgtgaagggtatacgaatgcctatgatgtacaatcatgtaaagattgtttcttagagtccatgcaagtacaagctacgaattttcaagtgtttatgaagacgaaagatcaaaaagtgatgccgtttactgcaacttatcagcttattgatcaggatagagggattcatgcatttacgcttcaaaatgtctcatcacaaattgaacaacaagaaaaattgcatcaacaacgtatgatgcgtaaaacgatttccgcacaagaaaatgagcgaaaacgaatttctagggaattacatgatagtgtgattcaagaaatgctcaatgtagatgttcaattgcgattgttgaaatatcaagaagatacagcaaagcttttggaagacgcagaaaatattgaatacattgtcgctaaattaatcgatgatatacgtaatatgtcggtggaattaagaccagcctctttggatgatttaggccttgaggcagcgtttaaatcatattttaaacaatttgaagaaaattatggggttaaaatcatatatacttccaatattaaaaatacccgttttgatagtgatattgaaacggttgtttaccgagtagtacaagaagctattttaaatgcgttgaaatacgctgatgtaaatgaaataaatgtaggtatccgtcaaactgggcgccatttggttgctgaagtaatagatgcgggaaatggttttgatccaagttctaagcctaaaggttctggactcggtttatatggaatgaatgaacgagctgaattagtcagtggtagcgtcaacatcgaaacgaaaattggtgagggcaccaatgttacactgaacattccaatttga

SEQ ID NO: 413715 - DNA, 387 bp, Staphylococcus aureus
atgaactatgttgaacgttatattgaacagtttttgagagcaacagtaagaaataatatcaagcactaccttttaacgttagatgaaaaaatgaaaaatttagatgattatatgcgttatttaattactaaaaaagaacaacttagcaagttaattgacagtctaatgctaacattagaaaataaatatattgatattgctgaagcatttcaaattcaatgtgcaagagaaatcaataatcaagaaattgaaaatattaaatcagagttgaataaagttgaagcatattatgcacaaattgaaactcaaattcaacaaacttcaactgaaaaaatagcaacagaaaaaacatcgtatctaataaattatatgaacgctgtggcatag

SEQ ID NO: 413716 - DNA, 672 bp, Staphylococcus aureus
atgcaatacattacaagataccagaaagacaatgacggtacttattccatcgttgctactggtgtagaacttgaacaaagtcacattgacttgctagaaaacggatacccgctaaaagcagaagtagaggttccggacaataaaaagttgtctgtagaacaacgtaaaaaaatattcgcaatgtgtagagatatagaacttcactggggcgaaccagtagaatcaactagaaaattattacaaacagaattggaaattgaaaaaggttatgaggaaatcagtctgcgtgactgttcaatgaaagtcgcaagggagttaatagaactgattatagcgtttatgtttcatcatcaaatacctatgagtgtagaaacgagtaagttgttaagcgaagataaagcgttattatattgggctacaatcaaccgcaactgtgtaatatgcggaaagcctcacgctgacctagcgcattatgaagcagtcggtagaggcatgaacagaaacaagatgaatcactacgacaaacatgtattagcgttatgtcgcgaacatcacaacgagcaacatcagatgggtgttaagtcatttgatgataaataccacttgcatgactcgtggataaaagttgatgagaggctcaacaaaatgctgaaaggagagaaaaatgaatga

SEQ ID NO: 413717 - DNA, 150 bp, Staphylococcus aureus
ttgtctgaacttaaggaatacaacattctgcctgttgtatacacacctgaatttgcagcggataataatgaagttaatataactgcattgattactgatgctgcaaaggctatgcctactctatcgaatacaattgtaaatggactttga

SEQ ID NO: 413718 - DNA, 474 bp, Staphylococcus aureus
atgttgggttgtttaccaatgctaatccaattgccaatcatcatgggattatactttgtacttaaagaccaacttgtagatggtttgtttaaatatccacacttcttatggttcgatttaggacgtcctgatatttggattacaattattgccggtgttttatactttatccaagcatatgtatcaagtaaaacgatgccagacgaacaacgtcaaatgggttacatgatgatggtcatttcaccaattatgattatctggatttcattaagctcggcatcagcacttggtttgtactggtcagtcagtgcggcgttccttgtagttcaaacacactttgcgaacatttattatgaaaaagtcgctaaaaaagaagtacagcctttcattgaagcgtatgaaagagagcacaacggcggcagcaataaaaaaggcaaaaacacacaagtagtgtctaaaaagaaaaagaaataa

SEQ ID NO: 413719 - DNA, 1164 bp, Staphylococcus aureus
atggtaaaacttacaacaaagatagcttccttaaaactattcgcaagttatgctattgcaacttatattttagttatattaacgagtgcattaaatctttttaaaggttatgtggccgatacattctatattgctgaaacattgctaatcgttttaaccatcattttaattatcatcttaacaacggaacaaacatggaagcatcgtgacctatggcgacgtatcgtcgaagtgttgttattgttgatgacattaacaggcaacgtttttacattattaatgtttgtaagtattagacgttaccaacgtacatcgcaaatacatagttataacgggtgggaatcgtttatacgaaaaactactagacatcgtattgcgattatcgggttacttattttagtctacatgctgacattatcaattgtgtcacaatttacatttgatacaacattggctactaaaaatcagttcaatgcactgttacatggaccgagtctagcctatccgtttggtactgatgatttcggtagagatttatttacacgcgtagttgtcggaacgaaactgacattttcaatttcaattatttcagtagttattgcagttatttttggtgtgttactaggcactatcgcaggttattttaatcatattgataatttaataatgcgaattttagatgtagtgtttgcaattccatcattattgttagcggtggcaattattgcatcatttggagcaagtattccaaatttaattattgctttaagtatcggtaatataccatcatttgcacggacaatgcgtgccagtgttttagaaattaaacgcatggaatatgtagatgcagcacgtatcactggtgaaaacacttggaatatcatatggcgttatattttaccgaatgcgattgcgcctatgattgtacgtttttcattaaatataggtgtggttgtattaacaacaagtagtttaagtttcctaggacttggtgttgcacctgatgtagctgaatggggcaacattttacgtaccggtagtaactacttggaaacgcacagtaatttagctattgtacctggtatttgtattatgttcgtcgttttagcatttaattttataggtgatgcagtgcgtgatgcactagatccaagaattcattaa

SEQ ID NO: 413720 - DNA, 1437 bp, Staphylococcus aureus
atgatgttgtgcctccctattcacaaatgtgtaaatttattctatacttttgtatatcatagtaatctactcaagattattttacaaggagtgattatcataattacttatttagaatcttttaagtcgttgtatcacaaggcattttacaagtttgtattatcggtattaagcttgccaatatttttatatgcagtgataaagtttttcttttctgctaagagaaaaaatttttacgctaataattctgaaatttcagaaattgaacaggcgttacatcaaaaatataaatatttatcgcagcaaaagtcatccacacaaatacataaagaagcattaaaaatattcaaggcacaaagttctaatacgaattcaaagaatattgaacaagcacatttttcaacatactttgaaaatgtattatttcataagttcatcataatcaaagtgatattggcgttaccgatgttcatcttattgactatttatttacagccattagttagatatatttttgagcgaattgtcatggctgtgattgtcatcattggtgttattgtcagtgtgtttaccattctgtatttttcaccgcttgatgcggcttatagcatactgggacaaaatgcaacaaaggcacagatacatcaattcaatgtattacatcatcttaacgagccttattttattcaattgtgggataccatcaagggtgtttttacttttgacttaggtacgacttacaaagggaatgaggttgtgactaaagcagttggcgaaagaattccaattacaataattgtcgcagtattagcgctaattgtggcattaattattgcgataccaattggaattatcagtgcgatgaagcgaaatagttggcttgatatcacgttaatgataattgcattaattggtttatctattccaagtttctggcaagggttattattcattttagcgttctcattgaaattggatattttgccaccatcttatatgccagaacatccaatatcgttgattttacctgtacttgtcattggaacaagtattgctgcttctatcacgcgtatgacaaggtcttctgtacttgaagtaatgcgcagcgattatgttttaactgcttatgcaaaaggattatcgacgacacaagtagttattaaacatattttgaaaaatgccattattccaattgtaacgctagttggtcttctagtggcagagttactaggcggttcagcagtgactgaacaagtatttaacattaatggtatcggtcgttatatcgtccaaaaacaactaatacctgatatcccagcagtcatgggtggggtcgtatatatatcaattgtaatatctttagcaaacttaattattgatatattttatgctttaatcgatccaaaattacgtagtgaaattaacgaaaggaagtga

SEQ ID NO: 413721 - DNA, 228 bp, Staphylococcus aureus
atgccacagaccatgatgagtgcagctgttgttccaaaatcttttaaggctagtgagacgatagcttcgttattaggtacgataccttgcacaccgaatgcgtgttggaatattttaccgaatggctcaagagatcgaacgacgacatcagcacctgcacttaaaattaagaagcctaatatcgttttaatggttcctgaagtgattgttgcggcaggttttttctga

SEQ ID NO: 413722 - DNA, 192 bp, Staphylococcus aureus; identical to SEQ ID NO: 408728

SEQ ID NO: 413723 - DNA, 288 bp, Staphylococcus aureus; identical to SEQ ID NO: 404919

SEQ ID NO: 413724 - DNA, 900 bp, Staphylococcus aureus
atgatagatgtgcttttgaaaaatatatctcaagtagtgttaattagtaataagtggactggtttatttatcttgattggattatttgtggccgactggacagttggattagcagctatgataggtagtatcatagcttatgcatttgcacgttacattaattatagtgaagcagagattaatgatgggttagccggatttaatccagtgttaactgccattgcgttaacaatctttttagataagtcaggattagatattgttataacaatgatagcaactttattaacgttaccagttgctgctgcagtgagagaagttttaagaccatataaagttccgatgctgacgatgccttttgtcattgtgacttggtttacaattttactttcaggacaggttaaatttgtagatacctcgttaaagttaatgcctcaaaacattgaaacggttaaatttagcaacaatgatcgaatacattttattcagtcattatttgaaggattcagtcaagtatttatcgaagcgagtgtaattggtggcgtatgtattttaatcggcatattgatagcatcaagaaaagcagcactcttagctgttatagctagtttgttaagctttatcattgtagctctattaggcggtaattatgaagatattaatcagggattattcggttataactttgtattaatggcaatcgcactagggtatacatttaaaacagcgattaacccttatatttcgacttttttaggtgtgttattaacagtagtggtgcaactaggtacaacaacattgcttgaaccgtttggcttacctgcattaacattgccatttattattgtgacatggattttattatttgctggtattaaacatgacaaagtagatgcttga

SEQ ID NO: 413725 - DNA, 1155 bp, Staphylococcus aureus
atgaatgatatggataattcctttttaataacaacggaaattcaaagaaaatggattgaaaaattcaaagtaattggagatacatttaaggctaaagctgaatataatgatcaacatagccaatttccatataaaaatattgaatggttaattaaagaaggttatggaaaattaacgttaccaaaagcatatggtggtgaaggtgcgaccatagaagacatggttattttgcaatcatttttaggcgaacttgatggtgccacagcattatctattggttggcatgtgagtgtcgtaggacaaatttatgaacaaaaattatggtctcaagatatgttggagcaatttgctgttgaaattaataatggtgcattagttaatagagcagttagtgaagctgaaatgggtagtccaacaagaggaggaagaccaagtacacatgctgttaaagctgatgatgggtatattttaaatggtgtgaagacatatacatcaatgagtaaagcactaacacatattattgttgctgcttatatagaagaattagaaagtgttggttttttcttagtggacaggaatttgccgggagttgaaattgccgataattgggatgtattaggtatgcgagcgacagaaagtcatgatttaatattaaatgatgtaaaagtaccattaaaacatttagtggaaacagagaaaagtaaagcgccaaatggttggatattgcatataccaagctgttatttaggtatagcacaagctgctagaaattatgctgtagactttgcaatccaacatagccctaatagtattgaaggaacgattgcaacattgccaactgtgcaacaaaatttagggaaaatggaaacgctattgttatgtgcgagacaatttttatggagtacagcaaaaggctatcaacaatataaagatgacagtcagataagaaattcaacaagtgcgagtaaagtgatggtaatgaatcaagggcttgaagtgattgatttagcgatgagaatagttggtgctaaaagcttagaaatgaatcgaccattacaacgttactatcgtgacatgcgtgcaggattacacaatccacctatggaagatgcagcatacacaaatattgctaagagtattacagatacattttaa

SEQ ID NO: 413726 - DNA, 2298 bp, Staphylococcus aureus
atgccgacagcgaaactaggagatttagctgatattacagttggtgatgtgcgtacttctatttctaaaacgaatggcaaggatgcggttaatttacaaataactaaagctcaagatgccaatacagttcaagtagccaaagatgtacaacgtaaaattgatacattcgttgatgaaaataaagattttaatgtcacaaaaacaatggatactgcaaagcctgttgagaaatcactttatacgatggttgaaaaagcatcattaggtacaatcgtggcaattatagttattttactgtttttaagaaacattcgtacgacggcaatttctattatatccattccgttatcacttcttatggcgcttattgctctgaaattgagtgatgtttcattgaatatactaacgttaggtgcattaacagtagcgattggacgtgtgatagacgattcgattgtagttgttgaaaatatttatcgacgcttaacagattcagaagaacaactaaaaggtgaaaatttaattatcagtgcgacaactgaagtatttaaaccaataatgtcatcgacactagttactattatcgtcttcttaccacttgtgtttgtatcaggttcagtaggcgaaatgtttagaccttttgcattggctattgcatttagtttattagcatcgttattagtgtcaattacactcgttcctgcgttggcagcaacactatttaaaaaaggcgttaaacgtcgtaataaacaacatcaagaaggattaggtgttgttagtacaacttataaaaaagtattgcattggtcactaaatcataagtggattgtaattatattaagtacattaattttggttgcaactattgtatttggaggaccgagactaggcactagctttatttcagcaggtgacgataaatttttagctattacttatacaccgaagcctggtgaaacggagcaagcagtgttgaatcatgcgaaagatgttgaaaaatatttaaaacagaaaaagcatgtaaaaacaattcaatactcagttggcggtagtagtccagtagatccaacgggtagtacaaatagtatggcaatcatggttgaatatgataatgacacgcctaattttgatgtagaagcggataaggttattaaacatgcagatggctttaaacatcctggagagtggaaaaatcaagatttaggaacaggtgcaggtaataaatctgtagaggttactgtgaaaggtccatcaatggatgccataaaatcaactgtaaaagatattgaacagaaaatgaaacaggttaaaggactagccaatgtcaaatctgatttatcgcaaacatatgatcagtatgaaattaaagttgatcaaaataaagcggcagaaaatggtatttctgcaagtcaacttgcaatgcacttgaatgaaaatttaccagaaaaaacagttacgactgttaaagaaaatggtaaaactgttgatgttaaagtcaaacaaaataagcaaacagactggtcagaagataagttgaataatataactttgaaaaagccgactggtggtacgattaaattgggagatatcgctacattagttaaaacaacgacaccaagtaaattgacgcaagaacaaggtgattatgcaacgacggtatctgctaaagtaacaaataaagatgtgggtggcacaacacgacaagtgatgtctaaaataaataatttggacaaaccgaataatgtaaaggttaatatcggtggtgcatcagatgatattaacaatgcaatgacacaattagcctttgcaatgttagctgcaatcattatcgtatatttaatcctagttattacatttaaaggtggcttagcgccatttacaattttattctctttaccatttacagttatcggtgtaattattgcactattaatcacaggagaaacaatatcagtaccaagtttaattggtatgctaatgttaattggaatcgtagtaacaaatgccattgtgttaatagaccgtgtcattaataatgagcagcagggcatggaaatgaaagaagcattaatcgaagcaggcggtactagaattagaccgatattaatgacggcgattgcaacaatcggtgcattagttcctttgttatttggtcaagatagctcgattcttatttcgaaaggattagccgctacagttattggtggtttaatttcatcaactttattaacacttgtagttgtaccagtaatatatgaaattctctttactttaaaaaaacgattcactaaacgatag

SEQ ID NO: 413727 - DNA, 1128 bp, Staphylococcus aureus
atggtatttttacttattttgctgggtgcatttatttttggatatggtgaatggttaaaacatattccaacgaatatcaattttgcattaatagcagcagtgattgttgcgttgacatccatttttccaatgcgaccactcctaaaagaagcggataaaatctttttattaccatttgaaaaacacatgtctcaatttatgcgtcatgcgattttatatagttactttgcgcgcattttaatccaactcattattgttattataatgttcccgttgttttacaatattaatcaacataatgtggcattttatatttgttttggagtcagtgcattaatttttccatatgttggtttacgcttaagatggcaatggtatcagtcgggacttaaaacatggcaagttaatttaatatcattcatcatctttgctctaacatattatttactgttagctccaaaatggtacattgcgcttgtgatggttgctttgcctgtgttaatagaatttttagttaaaaaatataaacctggctttttgtatccttgggagaaaatgattgcaatcgaacatcgacatcatatgaattattataaatttgttaatatgtttaccgatgtgaaacatttgaaagaatctgcagtcagaagaagttatctagatatacttttaccagttccaaagggtaataaatttaactctaatgcgatgtatttattcttatttattagaagctttataagagggagagacgcatttaatattatctttaggttagtaattattgcagttttacttatggtttggttatcatatccattagtgacagcaattattgggtgtttatttgtatatattatattgttacaaatggcacaattttattcacagcaagcatatggcttatggcctcaagtatggcccgtacctgaagagaaggtaatcaaagggtatgaacagtttttatatagattaatgtttgttatttgtaccgtgtttgcagtgacatttattataaaacatatgacgttattctatgttgtactcattttctatattgtaggtttattaacgattagaagtataattaaaaagttaaaatatcaggaaacattattacgagattaa

SEQ ID NO: 413728 - DNA, 1131 bp, Staphylococcus aureus
gtgaagaaaattttatttgatgttgatggcgtttttttaagtgaagaacgttgtttcgatgtctctgcattaacggtatatgaattattaatggataagtgttatttaggtcttcattcacatatagattgggaaactttgactgataacgatatacaagacattaggaatcgaatttttcaaaaagataagattttaaacaaattaaaatcgctagggctgaattcaaattgggatatgttatttatcgtttttagtattcatttaattgatattttgaaaaagttatcacatgaagaaattgaggcattcatgtatcaagatgagcctgtcgaattgaagttgaaaaatataagcacaaacttagcagaccgttttaatttaaatgaacaactacctttacaatttttggataatgtaaaagttggtaaaaataatatttatgctgctttggaagagtttgcaacaacagagttacatgtttcggatgctactttatttagtttgaagggtgcattatggacgttagcgcaagaagtttatcaagaatggtatttaggatcgaagttgtatgaagaggttgaaaagaaaatagcacgaactacttttaagacgggttatatttatcaagaaattattttgagaccagtagatgaagttaaggtgcttctgaatgatttaaaaggtgctggtttcgaattaggtattgcaacaggtcgtccttatactgagactgttgtgccatttgaaaatttaggattgttaccatattttgaagctgattttattgcaacagcaagtgatgttttagaagcagagaatatgtatccgcaagcacgaccattaggaaagccaaatccttttagttatatcgcagctttatatggtaataaacgcgataaatatgaatcttatatcaataagcaagataacattgtaaataaagatgacgtatttatagtaggtgattcgttagccgacttattaagtgctcaaaaaataggtgcaacgtttattggaacattaacaggtttaaaaggtaaggatgctgcaggtgagttagaagcgcatcatgccgactatgttattaatcatttaggtgaacttagaggtgtactagataatttgtaa

SEQ ID NO: 413729 - DNA, 1383 bp, Staphylococcus aureus
atgaaatcttgcccgaagtgcggacaacaagcacaagatgatgtacagatatgtacacaatgtggacataaatttgatagccgtcaagcattatatagaaagtcaaccgatgaagatatacaaactaataacatcaagatgagaaaaatggtgccttgggcaattggttttttcattttaatcttaattattatattgttctttttactaagaaacttcaattcacctgaagcgcaaactaaaatattagtgaatgcgattgagaataatgataaacaaaaagtagcaacattattaagtactaaagataataaagtagattctgaagaagcgaaagtatacattaactatatcaaagatgaagttgggcttaagcaatttgtcagcgaccttaaaaatacggtacataaattgaataagagtaagaccagcgtagcttcttatattcaaaccagatcaggtcaaaatatattacgtgtaagtaaaaatggcacgcgttatatctttttcgataatatgagctttactgcacctaccaagcaaccaattgttaaaccgaaagaaaaaacaaaatatgagtttaaatctggtggtaagaaaaagatggttatagctgaagcaaataaagtgacaccaataggtaattttataccggggacatatagaattccagctatgaaatcaactgagaacggtgattttgcaggccatttaaaatttgattttagacaaagtaattctgaaacggtagatgttactgaagattttgaagaagcaaatataactgtaactttaaaaggcgatacaaaattaaatgatagttctaaaaaagtaactataaatgaccgtgaaatggcattttcaagttccaaaacgtatggtccatatccacaaaataaagatattaccatttcagcttcaggtaaagcgaaagataaaacatttacaacacagacaaagacgattaaagctagcgatttaaaatacaatacagagataactttgaattttgacagtgaagatatcgaagactatgttgaaaagaaagaaaaagaagaaaacagcttgaagaacaaattgatagaattctttgctggatattctttagcgaataatgctgcgtttaatcagtcggattttgattttgtatcgtcatatataaaaaaaggatcatctttttatgatgatgtaaagaagcgtgtatctaaaggaagtttaatgatgattagttcaccacaaattatagatgccgaaaaacatggtgataagattaccgcaaccgtaagattaataaatgaaaacggtaagcaagtagataaagaatatgagcttgaacaaggttcacaagaccgcttgcaattaatcaagacatcagaaaaatag

SEQ ID NO: 413730 - DNA, 186 bp, Staphylococcus aureus
atgatcaaacctggtcaagaacttgttgttgataagaagcaaccagcaaatcatgcagatgctaacaaagctcaagcattaccagaaactggtgaagaaaatccattcatcggtacaactgtatttggtggattatcattagcgttaggtgcagcattattagctggacgtcgtcgcgaactataa

SEQ ID NO: 413731 - DNA, 1593 bp, Staphylococcus aureus
atgacactacttactgtaaatccattcgataatgttggattatcagccttagttgcagcagtacctattattttatttttattatgcttaaccgtttttaaaatgaaaggcatttatgcagcattgacaactttggttgttacattgattgtggctttatttgtatttgaattaccagcgcgtgtatcagcaggtgcgattacagaaggcgttgttgccggtattttcccaataggatatatcgttttaatggcagtttggttatataaagtttctattaaaacaggacaattttctattattcaagatagtattgcaagtatttcagaggaccaaagaatccaactattattaattggattttgtttcaacgcatttttagaaggtgcagcaggatttggtgtgccaattgcgatttgtgcagtattattaattcaacttggatttgaaccattaaaagcagcgatgttatgtttaattgctaatggtgcggcgggtgcctttggtgcaattggtttaccagttagtattattgatacgtttaacttaagtggaggcgttacaacattagatgttgcgagatactcagcattaacacttccaattttaaactttattattccatttgttttagtattcattgtagatggtatgaaaggtattaaagaaattttacctgtcattttaacagtgagtggtacatatactggattacaattattattaacaatattccatggtccagaactagcagacattattccatcactagcaacaatggtggtgttagcatttgtttgtcgtaaatttaaaccgaaaaacattttcagattggaagcgtctgaacataaaattcaaaaacgaacgcctaaagaaattgtctttgcttggagtccgttcgtcattttaactgcctttgtattagtatggagtgcaccattcttcaaaaaattattccaacctggaggtgcgcttgaaagtttagtattaaaaatgccaattccgaatactgtgagtgatttatcgcctaaaggaattgcgttgcgtctcgatttaattggtgcaactgggacagcgattttattaacagtagttattacaattttaattacgaagttaaaatggaaaagtgcaggtgctttattggtcgaagcaattaaagaattatggttaccgatccttacaatttcagctatcctagctattgctaaagttatgacatacggtggtttgactgtagcaattggacaaggtattgctaaagcgggagcaattttcccattattctctccagtattaggttggattggtgtgtttatgactggttcagttgtaaataacaatactttattcgcacctattcaagcgacagtggcacaacaaatttcaacaagcggttcattacttgtggcagctaacactgcaggtggtgtagcagcgaaacttatttcaccacaatcaattgccattgcgactgcagctgttaaaaaagttggtgaagaatctgcattattaaaaatgacgttaaaatacagtattatatttgttgcctttatttgtgtttggacgtttatactaacgttaatattctaa

SEQ ID NO: 413732 - DNA, 714 bp, Staphylococcus aureus
atgtcagaaatgaatgcggtatataacgttaaacaatacattttaaatttgattaagcaaaataaattggaatatggtgaccaacttccaagtaatttatcaattgccagagaattaaatgtaaaaaccgacgatgtttatgaagcaattcaggcattgattactgaacaagtcattaaagataattttgaagagggcacaagtgttaagtcactgccccctttcttttatccattgaatgaacttataagtattgggcaaatgattaaaaatgcaggatttgaatgcggaactgaatacttaaattttgatgagcaaccagcaactatgttagatgcaaatttgttgagcgttgaagaaggatatccagtaaccattatagaacgattacgaactgccgatggagaaccggtcgtctattgtttagataaaattgctaaaaaagaattaacatgtacagagtatcaaatgagcaatggatcgatactaagtgcgataaaagaacaaagtaatcataatatttgttatgctgatacagaaattgaagcggtaaattatgaacctcgaatatccgaagtacttaatgcttcgccacacgaaggtttgattttattaaaaattacgcactacaatgaattagatgaacctattttgtattcattaaattatatgaaaaatagcttagttcaatttaaaatcactagaaaaatatag

SEQ ID NO: 413733 - DNA, 909 bp, Staphylococcus aureus
atgaaaaaactattattaccattaataattatgttattagtgttagctgcgtgtgggaaccaaggtgaaaaaaataacaaagctgaaactaaatcttataaaatggacgatggcaaaacagtagatattccgaaagaccctaaacgcattgcagtagtagcgccaacatatgctggtggacttaaaaaattaggtgcaaacattgtagctgtaaatcaacaagtcgatcaaagcaaagtgttaaaagataaatttaaaggtgttacaaaaattggtgatggcgatgtagaaaaagttgctaaagaaaagccagatttaattattgtatactctactgacaaagacattaaaaaatatcaaaaagtggcaccaacagtagttgttgactataataagcataaatatttagaacaacaagaaatgttagggaaaattgttggtaaagaagataaagtaaaagcttggaagaaagattgggaagaaacaactgctaaagacggtaaagaaattaaaaaagcaattggacaagatgcaacagtgtcattgtttgatgaatttgataaaaaattatacacttacggcgataactggggtcgtggtggagaagtattatatcaagcatttggtttaaaaatgcaaccagaacaacaaaagttaactgcaaaagcaggttgggctgaagtgaaacaagaagaaattgaaaaatatgctggtgattacattgtgagtacaagtgaaggtaaacctacaccaggatatgaatcaacaaacatgtggaagaatttgaaagctactaaagaaggacatattgttaaagttgatgctggtacatactggtacaacgatccttatacattagatttcatgcgtaaagatttaaaagaaaaattaattaaagctgcaaaataa

SEQ ID NO: 413734 - DNA, 201 bp, Staphylococcus aureus; identical to SEQ ID NO: 411523

SEQ ID NO: 413735 - DNA, 552 bp, Staphylococcus aureus
atgtggacgatatacacagatttcgctaaaagtaataaaccgggtgaattgaatgatgaaggtatggttttaaatctggataggaatactagaaccgctaaaggccattattttgttactacattttaccggaatggtaaactaccagatgaaaagaattataaaattgaaatgaaaaataataagattattttattagatgaagtaaaagatgataagctcaagcagataatagaaaactttaaatttttcggtcaatatgcaaatcttaaagaattgaaaaaatataataatggtgatgtttcaattaatgaaaatgttcctagttatgatgttgaatacaaaatgagcaataaagatgaaatagttaagcaattaagaagtcattataatatttcgactgaaaaatcacctatattaaaaatgcatattgatggggacttgaaaggcagttccgtaggttatagaaagttagaaattgacttttcaaaacgtgaaaacagcaaattatcagtcattgaatttttaagttataaaccagcgaaaaaatag

SEQ ID NO: 413736 - DNA, 657 bp, Staphylococcus aureus
atggaatggtcgcaaatttttcatgacataacaacgaaacatgactttaaagctatgcatgattttttagaaaaagaatattcgactgcaatcgtataccctgatagggaaaatatatatcaagcgtttgatttaacaccgtttgaaaatatcaaagttgttatattaggacaagacccgtatcatggtccaaaccaagcacatggattagcattttcagtgcaacctaacgcaaaattccctccatctttacgtaatatgtataaagaattagcagatgatattggatgtgttagacaaacaccacatttacaagattgggcaagagaaggcgtcttgttattgaatacagttttaaccgtaagacagggtgaagcaaatactcatcgtgatattggttgggaaacatttactgatgaaattattaaagcagtgtctgattataaagaacatgttgtctttattttgtgggggaaacctgcacagcaaaaaataaagcttatcgatacatctaaacattgtattataaaatcagtgcatcctagtccactgtctgcatatagaggattctttggatcaaaaccgtattccaaagcgaatacctatttagagtcagtaggaaaatcaccaattaattggtgtgaaagtgaggcgtag

SEQ ID NO: 413737 - DNA, 177 bp, Staphylococcus aureus
gtggatagtgaatatgcaacaactgataatgaagaacatattcaagaacaatcaaatcaagataaatcgtactttgatagcgaatcaattggcaaccaaagtggtggcattcgacaaagagaaccgcttatggatggtccgcatccaaaagttgtggaatcatttaaagacgtataa

SEQ ID NO: 413738 - DNA, 651 bp, Staphylococcus aureus
atggctacaatgaagtttgacatgtgtggcgctgcgaatgtcgttggtatcattgaagcggctagtcgtttacaactgcctgtaaatattgtcggagtgcttgcttgtgctgaaaatatgataaatgaagcgtcaatgaagcctgacgatgtatttacagcattgagtggtgaaactgtagaagtaatgaatacagacgctgaaggtagattagtccttgcagatgctgtgtattatgcaaatcaatatcagcctagtgtgattatggactttgctacattaacgggtgcagcaattgttgcactaggcgacgataaagctgctgcatttgaatcgaatagtaaagtgatattaaaagacatattacaaataagttccaaagtcgatgaaatggtatttgaattaccgattactgcaaccgaacgtgcaagtattaaacacagtgatatcgctgatttagttaaccatacgaatggacaaggtaaagcgctatttgcggcaagttttgtaacacattttagtggtcaaacaccccacattcatttcgatattgcaggtccagcaacgactaataaagcttcatataatggtccaaaagggccaacaggatttatgattccgacgatagtacaatggttaaaacaacaataa

SEQ ID NO: 413739 - DNA, 486 bp, Staphylococcus aureus
atgggtggtacctttttaccaaaaggaaatgttgaagaacctgagcatgatggttctgcagaatggaatgcatattgggatccagaagcggttaaaattgtttttgatagcgatatagagattgatatggttgctttagaaagtacgaatcaagtaccgctaacgttagatgttagacaaagatgggcgaatgaacgccaatatacgggcattgatttcttaggagtaagttatgcagcggtaccaccattaacgcactttataacaaattctacttactttttatgggatgttttaacgactgcttatattggtaacaaggacttggttcattcaattgagaaaaaagtagatgtaataagttatggaccaagtcaaggtaagacatttgagtgtaaagatgggcgcaaaattaatgtcataaatcatgtcgataacaacgcattttttgattatataactgcacttgctaaaaaagtaaattaa

SEQ ID NO: 413740 - DNA, 702 bp, Staphylococcus aureus
atgaaaaaagaagaaagtagtaaagataaacaaattaaagaaaacttcaacaaaacgttgagcctgtatccaactaaaaatcttgaagacttttatgataaggaaggatttcgtgacgaagagtttgataaaggagataaaggcacttggattgttgattctgagatggtagttgagctgaaggataaaaaaatggaatctagaagtatggtgctctatataaatcgtaatactagaacaacgaaaggtaattttattgttagagaattgtgggaagatagtaaagggtatgcacaaagtaaagatacaaaatatccagtgaaaatggaacataatcgaattatcccaaccaaacagatagctgatgataaattaagaaaagaaatcgaaaactttaaattttttgtacaatacggtgactttaaagatattaatgattataaagatggtgacatttcatataatccaaatgtacctagttattcagcagaatatcaattgagtaacaatgactacaatgtgaagcaacttagaaagaggtataatataccaactaagaaagcacctaaattattaataaaaggtgatggtgatttaaaaggatcatctataggacacaaaaatttagagtttacctttgtagaaaacaaagaagaaaacatctattttacggatagtattaatttcaaacctactgaatag

SEQ ID NO: 413741 - DNA, 423 bp, Staphylococcus aureus
atgccgtataattacaagaaacaaaatggagagttaatgtctgtaatgagccaaggtgaaaagtttattcatcaatcacccgttaatgatgaacttagtgcattgattaagttattaatttcaaaaattaacggttgtcattattgtgttgatatccataaaaaagaattaaaggaattgggtgtaacacaaatgaaaattggtgaagtcttgagttttagacatttagatttatttactgatcaagaaaaagtgacgcttgaatttgcagaaatgttaaattcaatcaaagactttaagaagtttgaaattattgaccggctaaaatcattttatgatgaagaacaaattattgatcttgtctttgttgtaaaccaaattaacggttggaacagactaaatattattagtgataaactataa

SEQ ID NO: 413742 - DNA, 207 bp, Staphylococcus aureus
atgacacaatacttagtcacaacattcaaagattcaacaggacaaccacatgaacattttactactgctagagataatcagacgtttacagttgttgaggcagagagtaaagaagaagctgagcgcaaatacgaggcacaagttaaaagagatgcagttattaaagtgggtcagttatttgaaaatataagggagtgtgggaaatga

SEQ ID NO: 413743 - DNA, 204 bp, Staphylococcus aureus
atgacggaggttaaaattaaaactatttcagatagagtttattacacaacaacagatctagcttctgacgattatattaatcttgttatgaatctagtgattgaggattttcttccggtcaaagatgtgttcaacaatgaagtatgggttaaaagagatgagattgaatcatttacatttattaaggaggcaaacgatgattaa

SEQ ID NO: 413744 - DNA, 984 bp, Staphylococcus aureus
atgaataaacaaatacaaacagaagcagatgaattaggtttctttggtgaatacggagggcaatatgttccagaaacattaatgccagcaattattgagttgaaaaaagcttataaagaggcaaaagcagacccagagtttcaaagagaacttgaatactatttatcagagtatgtaggacgcgcgacgccacttacatatgctgcatcgtatactgaaagcttaggtggcgctaagatatatttaaaacgagaggatctaaatcatacaggcgcccataaaattaataatgcgttaggtcaagcgttgctcgctaaaagaatgggcaagaagaagcttgttgctgaaacaggtgcgggtcaacatggtgtagctagtgctacggttgctgcattatttgatatggaacttgttgtctttatgggaagtgaagatattaaaagacaacaacttaatgtatttagaatggaattacttggtgcaaaggttgtggcagttgaagatggtcaagggactttatcggatgcagttaataaagcattgcaatattgggtaagtcatgtagatgatacgcattatttattaggttctgcattgggtccagacccattcccaacgattgttagagattttcagagtgtgattggtaaagaaataaaatcacagatattgaagaaagaaggtcgacttccggatgcaattgtagcatgtatcggtggtggctcaaatgcaatcggtacattttatccatttattaaagatgatgttgctttatacggtgttgaagccgcaggtcaaggcgaggatactgataaacatgcacttgcaattggcaaaggatcacctggcgtattacatggtactaaaatgtatttaattcaagatgaaggtgggcaagtgcaactagcacattctatttcagcaggacttgattatcctgtattgggccagaacattcttattaccacgacattggtagagtaa

SEQ ID NO: 413745 - DNA, 531 bp, Staphylococcus aureus
atgatttcacacttgataacggatacttcgaagaagaaacatcagacagtgactcagacagtgattcagattcagatagcgattcagactcagatagcgattcagactcagacagtgaatcagactcagacagcgactcagattcagacagcgactcagactcagacagcgattcagactcagatagcgactcagattcagaaagcgactcagactcagacagcgattcagactcagatagcgactcagattcagacagcgactcagattcagaaagcgactcagactcagacagcgactcagattcagacagcgactcagactcagatagtgattcagattcagacagcgactcagattcagacagcgactcagactcagaaagcgactcagattcagacagcgattcagaatcggatagcgactcagacagcgactcagactcagacagcgactcagactcagatagcgactcagattcagacagtgactcagatagcgactcagattcaggaaaacatacacctgtga

SEQ ID NO: 413746 - DNA, 267 bp, Staphylococcus aureus
atgattaacattgctgattatactgattcaaaatacaacatctcaccaaatgaacttaaaacacttcccccggtgttcattgcgcattgtaatggcgattatgatgtccctgttgaagaaagcgaacacatccacaatcatgtgccacactcaacatttgaacgcgtgaataaaaacgagcatgattttgatcgtagacctaatgacgaagcaatcactatttatcgtaaagttgttgatttcttaaacgctataacaacggcgtaa

SEQ ID NO: 413747 - DNA, 276 bp, Staphylococcus aureus
atgtgtataagagacagttataatcctaatgcgcctaactattcagctgaatataaaattaatgatgatgataataacatcaaacaattaaaaaatcgattcaatattaagtctaataaaaatcctaagttattgttcaaaggagcaggtaatataaaagggtcttctgttggatataaggagatacagataattttcaataggaacaaagaagaaagtgtttcttgtattgatagtatagagtttaaaccgagtgaaggagactataatgagtaa

SEQ ID NO: 413748 - DNA, 1158 bp, Staphylococcus aureus
atgacaacacaacatagcaaaacagatgtcatcttaattggtggcggtattatgagtgcaacattaggaacattacttaaagaattatcacctgagaaaaatattaaagtgtttgaaaaattagcacaacctggcgaagagagttcaaatgtatggaataatgccggtacagggcattcagcactttgcgagttgaactatacaaaagaaggtaaggatggcacagttgattgtagtaaagcaattaagataaatgagcagtaccaaatttcaaagcagttttgggcatatttagttaaaacaggacaattagataacccagatcgctttattcaagcggtgccacacatgagttttgtcattggcgaagataacgtagcttttataaaaagtcgtgttgcaacgttaaagaaaaatgttttattcgaaaaaatgaaattatcgcaagatgaagaagaaatgaaatcttgggtaccgttaatgattgaagggcgtaagtctgatgaaccaattgctttaacttatgatgaaactggtacagatgttaactttggtgcgttaactgcaaagttatttgataatttagaacaacgtggtgtggaaattcaatataagcaaaatgtattagacatcaagaaacagaaatctggagcatggctagttaaagttaaagatttagaaactaacgaaacgacaacatatgaatctgattttgtatttattggtgctggcggtgcgagtttaccattactccaaaagactggaattaaacaatcaaaacatattggtggtttcccggtaagtggattattcctgcgctgtacaaatcaagaagtgattgatcgtcatcatgctaaagtgtacggaaaagcagcagtgggtgcgccaccaatgtcagtgccacacttagatacacgttttgtagacggcaagcgttcattgttatttggtccatttgcaggtttctcacctaaatttttaaaaacaggttcacatatggatttaattaaatcggttaaaccaaataatatcgtgacgatgttatctgcaggtatcaaagaaatgagtcttacgaagtatttagtgtcacaattgatgttatctaatgatgagcgtatggatgatttaagagtctttttcccaaatgctaaaaattga

SEQ ID NO: 413749 - DNA, 336 bp, Staphylococcus aureus
atgctaaaaattgaagattgggaagtgattacagcagggcaacgtgtccaagtaatcaaggatacggaggattctaaaggtaacttacaatttggtaccgaagtcattacgtcagatgatggcacattagctgcattacttggtgcatcacctggtgcgtcaacagctgtagatattatgtttgatgttttacagcgatgctatcgtgatgaattcaaaggatgggaaccaaagattaaagaaatggtgccgtcatttggttatcgcttaacagatcatgaggatttatatcacaaaattaatgaagaagtaactaagtatttacaagttaaataa

SEQ ID NO: 413750 - DNA, 315 bp, Staphylococcus aureus; identical to SEQ ID NO: 408371

SEQ ID NO: 413751 - DNA, 897 bp, Staphylococcus aureus
atgaatgccatagaagtaagtaatgttaattattcaagtgatcagtttaatttaaagaatatctctttcaaagttcctcaaggattcgtcactggttttattggtagaaatggcgctggtaaaaccacaataataaggttaattatggatttgtatcaaccacaaactggtgttattagagtattagaagaggatatggctctcaatccgatagagttaaagaatagaattgggtttgtttacgctgaaaattattttaatgagagatggactacgaagcaacttgaaaaaatgattgcccctttttatcgtaaatgggaccatcaagtatttgaattttatcttgaaaagttcgatttaccaatcaataaatcaataaaaacattttcgactggcatgaaaatgaaattatcattagcagttgcattttcacatcatgctgaattgtatatttttgatgagcctacttcaggtcttgatcccttagctagaaatgaactattggagataattcagcaagaattaattgatgaaaataaaacaatattcatgtcgacacacattatctcagatttagaaaaaatagctgattatatcattcacttaagtgacggtgaagttatcttaaatggttcaaaagaacaactgttacaaagatatcaagttgtgagtggtgcaattgaggaccttgatgatgaattagcatctctacttatttttgaagaacataagcgtacaggatttataggattaacagaacatgcgcaagtatttaaagaaattttaggtcataaagtgaatatcactacaccttctattgaaaacttaatggtttatcttgaaaagagaaaacctaaatatcatgaaaacatcaaattgatggaagaaggtttttaa

SEQ ID NO: 413752 - DNA, 921 bp, Staphylococcus aureus
atgtttaaaagaactaaactaatcttaatagcaacactactgctatcaggatgttcaactaccaataacgaatccaacaatgaaacaaaatcagtaccagaagaaatggaagcttccaaatatgtaggacaaggctttcaaccacctgcagaaaaagatgcgattgaatttgcgaagaagcataaagataaaatagctaaacgtggtgaacaattttttatggataacttcggtctaaaagttaaagctaccaatgttgtaggtagtggcgacggtgtagaagtattcgtgcattgtgatgaccacgacatcgtatttaatgcgagtattccatttgacaaatcgataatagagagtgatagctcattaagaagtgaggataaaggcgatgatatgagtactttagtaggtacagtgttgagcggctttgaatatagagctcataagcaagagttggatagtttaacagaagttttgaaagaatataaaagtaaatataaatatactggttatacagaaaatgcaattatgaaaacgcagaatagtggttttagaaatgaatattattatttgactgcaattccatatactttagatgaatataaaaagtattttcaacccttaatcaaagaggatgataagacttttagtgatggtatgaaaaactcaaaaaaacaacttaaagataaatctcgtccatatgttgttacaactttatttagcactaaagacaattacactaaagataatacaatagacgagatgattgatttttctgaagtactaaaaaagaaaaagaatattcctcatgatttgaatgtttctcttcaaattactgataaatatataaattcagcaagacctagttacagtaagaaagattcaatagaagtaggagtatttaatcatgaaaaaaattaa

SEQ ID NO: 413753 - DNA, 372 bp, Staphylococcus aureus; identical to SEQ ID NO: 408362

SEQ ID NO: 413754 - DNA, 231 bp, Staphylococcus aureus
gtgggctcggagatgtgtataagagacagttacaatacagatctaccagcaatacctcataccaaattgagagatgcccttgctcacgaaataaataaagttgatttaaaaaacaatcgttttaaatatgataatagtagaggtaatagaaatgaaaatattatagaagttagtattgacgaaataattaatgagttagaagaatggtttttaaatttagaatttccgtaa

SEQ ID NO: 413755 - DNA, 1107 bp, Staphylococcus aureus
atgtctgataacacagttaaaattaaaaaacaaacaattgatccgacattaacattagaagatgttaagaagcaattaattgaaaaaggtaaaaaagagggtcatttaagtcatgaagaaattgctgaaaaacttcagaatttcgatatcgactctgatcaaatggatgatttctttgatcaattaaatgataatgatatttcactagttaatgaaaaagatagttcagatactgacgagaaactgaatccaagtgatcttagtgcccctccaggtgttaaaataaatgacccagttcgtatgtaccttaaagaaattgggcgtgttaacttattaagtgcacaagaagaaatcgaattagccaaacgtattgaacaaggtgatgaagtagcaaaatcaagacttgcagaagcgaacttacgtttagttgtaagtattgctaaaagatacgtaggtcgtggtatgttattccttgatttaatccaagaaggtaatatgggtcttattaaagctgttgaaaaatttgactttaacaaaggatttaagttttcaacatatgcaacatggtggattagacaagcaatcactcgtgcaattgctgaccaagcacgtacaattcgtatccctgtgcatatggtagaaacaattaataaattaattcgtgttcaacgtcaattattacaggacttaggtcgagatccagcaccagaagaaattggtgaagaaatggatttaccagcagaaaaagttcgtgaaattttaaaaattgcgcaagaacctgtttcattagaaacaccaattggtgaagaagatgatagtcatttaggggactttattgaggatcaggaagcacaaagtccttcagatcatgctgcttatgaattattaaaagagcaattagaagatgtgcttgatacattaactgatagagaagaaaatgtattacgattaagatttggtcttgatgacggcagaacaagaacacttgaagaagttggtaaagttttcggtgttacacgtgaacgtattcgacaaatcgaagcaaaagcacttagaaaattaagacatccaagtcgtagtaaacgtttgaaagactttatggattaa

SEQ ID NO: 413756 - DNA, 189 bp, Staphylococcus aureus
ttgtacgaacaaggtggcgacattgttaaagggtatgttaaatatcataatgatgatgaaaaaaatgtagaatatgatttttataatttaaatggtgagtatggtcatgaggtattaaaaatgtatgctgataataaaactatcaatagtgacaaattgcatttagatatctatttattcaaatcataa

SEQ ID NO: 413757 - DNA, 252 bp, Staphylococcus aureus
atgtatcaatatttagttcctagtgatttaggattgaaaaattcacaagttgttcagtttccaataagtaatatttctagtaagaaaatcttgcacaataaatttaaatcaatagttaacactgaagaaattgatgaaaatatttctttttataaacttgtgaacaagtttttacctgaagtagcacctgaagatacagtggatttacttcagataataaaaaggaggagtaaagatggaaattttaaatga

SEQ ID NO: 413758 - DNA, 456 bp, Staphylococcus aureus
ttgaaagaatacatggaaattatttcaaaatatcaagttagaacagttacatttgcggacactgtaggatgttcgacaccattagaatacggagatatttttaattactttgtaaaaaaatattctaacataattttttctgctcattgtcataacgatctagggttggctactgcaaatacattagctgcaattttaaatggtgcgaagcaaatagaaactacatttttgggaattggtgagagagcgggtaatgctcctattgaggaaataattactattttgacaaaaaaacaaatagaaagtacggaattcactttacccgacgtatataaaactagtattaatatttctaaaattctcgattttcaaatatcagaaaacaaacctataattggtgaaaatatatttaaacatgaatcaggaattcatcaagatggtactaaaaaaatataa

SEQ ID NO: 413759 - DNA, 798 bp, Staphylococcus aureus
atgtatcataacagtaacgcaaactttgtaaatggtatcactttaaatgtgagagataagaatgaattaaagccattttatgaggacgtattaggattaaatattataaatgagacattaacatcgatccaatatgaagtaggtcaaaataatcatgtcattacacttgttgaattacaaaatgggcgtgaacctttaatgtcagaagcgggactgtttcatatcgcaattaaactacctcaaattagtgatttagctaatttactaattcatttaagcgaatatgatattccagttaacggaggtatacagcctgcttcgttatcattattttttgaagacccggaaggaaacggttttaaattttatgttgataaagacgaagcgcaatggacgaggcaaaatgatttagtaaaaattgatattagaccattaaatgtaccgagattagtgagtcatgcaacaaaattgttatggttaggtattccagatgacgctattataggtgcattgcatattaagacaattcatttatcagaggtaaaagactactacctcgattattttggattagagcaatcggcatatatggatgattattcaatatttttagcatcgaatggctattatcaacatttggccatgaatgattgggtatcagcaacgaaacgtgtagaaaattttgatacgtatggattagcaattgttgactttcattatcctgaaacaacacatttaaatttacaaggtccggatggtatctattatcgctttaatcatatcgaagttgaagattag

SEQ ID NO: 413760 - DNA, 525 bp, Staphylococcus aureus
atgctatatttaaataagtacaaagaaagggtgacatcagtgcgtattcaaaatcgctgggttgtgtttatattatttttaatctgttcttttggtgtattaattggtttatatcaatatcgtcatacgaaaactgtggatttgtctaatcttgaaataaacgatattaaattaaatgagaagtttgataaaaaaggctatgaagtaaataaaaaaattaagtttgatcgttttaaattttataacagtaaagctcaccctgaccttaccgttaaagtgagagaaaaggataacatcgttaaggggataatattagtaagagatgaaaagatacatactaattttgatggaggaattggttcgccgataaataacgcgattgaaaatcttggattcggatataaaagaacaaaagttggcaatgatttctcatcggtaaagtatattgatagagataaccatttaaaattaaacttactttatcaagatttagaaattaaacgtattgaattttttagtaaatag

SEQ ID NO: 413761 - DNA, 1095 bp, Staphylococcus aureus
gtgttagatacttatttaaaagtaaatcaatcaatgtattataatccgaatagtccgcataaagctggtttgcaagcagatcaattattacagcaagcaaaagttcaaataaatgatatggtcaatactaatatgacatatgatgttgttttcactagtggtgcaacggaatctaacaatatcgcgcttaaaggtgtggcttatcgtaaatttgatacagcaagagaaataattacatctgttttagaacatccgtctgttttagaagttgtcagatatttggaagagcgcgaaggctttaaagttaaatatgttgatgtaacaaaagatggcacgattgatttgcaacattttaacgatttaatgtccgataaagtcggtttagtaacatgtatgtatgtaaataatgtaacaggtcaaattcaacccattccacaaatggctgaagttataaaaaattatcctaaggcacattttcatgtagatgcggttcaagcattcggcaaaatttcaatggatttcaataacgtagatagtattagtttaagtggccacaaatttaatgggttaaaaggtcaaggcgtcttacttgttaatcatattcaaaatattgagccaatcattcaaggtggcggtcaagagtatggtgttagaagtggtacagtcaatttacccaatgatattgctatggttaaagcgatgaaaatggctaatgaaaaccttgaagcattgaatgcatttgttactgagttaaataatgacgtccgtcaatttttaagccaatatcaaggtgtttatattaattcatcaacttcaggttcaccattcgttttaaatattagttttcctggcgtaaaaggtgaagtattagttaatgctttttcaaaatatgacattatgatatctacgacgagtgcttgttcatctaaacgtaataaattaaatgaagtattggctgcaatgggattatcagacaaatctattgaaggtagtataagattatcatttggagctactacaactaaagaagatatagcgaggtttaaagaaatatttatcatcatttatgaggaaattaaggagttgctaaaataa

SEQ ID NO: 413762 - DNA, 231 bp, Staphylococcus aureus
atgattcgaattcaagataatacaataagggatggtatgcaacaaagtaatgttcgaaaaagtctaattataaaaaaagaagtattgaaacaaattaacaagttaaatataaattctgttgaagtaggcatgtgtacaactatcgaggatgaatttaatattcatcaattcagagacattttaagtcctgaaaaagaattagtagtattgctgtctcttatacacatctga

SEQ ID NO: 413763 - DNA, 864 bp, Staphylococcus aureus
atggacgaaaaaacaccacatatgcattatggcgttgttccaataactgatgatggtcgtttaagtgctaaagaagttgtaggtaataaaaaagctttaacagcgtttcaagatagatttaatgagcatgttaaacaacgaggatatgatttagaacgtgggcaatcaagacaagtaacaaatgctaaacatgagcaaataagtcagtataaacaaaaaacagaatatcataagcaagaatatgaacgtgagagccaaaaaacagaccatataaagcaaaagaacgataaattaatgcaagagtaccaaaaatcgttaaatacgcttaaaaagcctataaatgttccgtatgagcaagaaactgaaaaagtaggtggtttatttagcaaagaaatacaagaaactggaaatgttgtaataagccaaaaagatttcaatgaatttcagaaacagataaaagctgctcaagatatttcggaagattacgagtatataaagtctggtagagccttagatgataaagataaggaaatacgagagaaagatgatttattaaataaagcagttgagcgtattgaaaacgcagacgataattttaaccaactttacgaaaatgcaaagccacttaaagagaatatagaaatagcgttaaagcttttaaaaatcttactaaaagagttagaacgagttttaggaagaaatacctttgcggaaagagttaataagttaacagaagatgaaccaaaactaaatggtttagcaggaaacttagataaaaaaatgaatccagaattatattcagaacaggaacagcaacaagaacaacaaaagaatcaaaaacgagatagaggtatgcacttatag

SEQ ID NO: 413764 - DNA, 300 bp, Staphylococcus aureus
atgactggttggataagtattgatcgctcaattcaaaatcattggctatttaaagaaaagagaacattttcaaagttcgaagcatggatatatttactcatggaagcgaatcattcagaggcaaaagtgcctataggaaaccaaattgtaaccgttgaaagaggacaaagattaacatctattttgaccttgtctgacctttttaactggtcacgatttaaagtgaaaaccttccttgacttactcgagagtgatggaatgttagaagtcaaaacaacatcaaaccaacacaaacaataa

SEQ ID NO: 413765 - DNA, 384 bp, Staphylococcus aureus
atgattgaagataaaaatttagaaagaaatgtttttcttaaaggatatacaacaactccacaaaaatgcttggaagattttaaattagttgtttctacatctcaatatgaaggtcaagggttaagtatgatagaagcaatgatttctaaaaggcctgttgttgcctttgacatcaaatacggaccaagtgattttatagaagacaataaaaatggttatttaatagaaaaccataatattaacgacatggctgataaaatactaaagcttgttaataatgatgttttagcagaggagtttggttcgaaagcgagagaaaacattatagaaaaatattcaacggaatcaatattagaaaaatggttaaatcttttcaatagctaa

SEQ ID NO: 413766 - DNA, 1362 bp, Staphylococcus aureus
atgcttcgttgtttaattgcgaacagaggagaaattgctgtaaggattataagagcttgcagagaatatgggattgaaactgtagcagtttatgcaaaaggggacgagcaaagcttgcatgtacatttagcagatcaagctatatgtattggagaagctaatgctttagatagttatttaaatattgaccacatcatatctgctgcacaaatcactggtgctaatgcaattcacccaggatatggctttttatcagaatcaacaaaatttgctcaaatcgttgaggaacaaggcatagcgtttatagggcctactaaaaaaacgatggaaatgatgggggataaaataacagcaagacaaacagttcatcatgcaggtgttcctgtgattccaggatcaaatgatgctgtgaatcatgtgtctgaaattgagaagcttgccaaagacatcggttatccagttgttatcaaagctgccagtggcggtggtggtaaaggtatacgtattgtaaagaaagctgaagatttagaaaaggcatttaaagaagctaaaagtgaaggaaaaaaatactttgatgatgatcgtgtttatgttgaggcttttatacctgttgcaaaacatgttgaagttcaagttatgggggatgggcaggataattatgtacatttaggggaacgtgattgttctgtacaacgtaaaaatcaaaaattaatcgaagaatctccttgtgcagcattaactgaagaaagacgacaacaaatatgtaacgatgctgttaaagttgcacgtgcagcaaattatagaagtgcaggtacgattgaatttttagtaactgataacgcacattactttattgaaatgaatgctcgaattcaagttgaacatactgttacagagatgcgagcagaacgtgatttggttgcagcacaattgtatttattggaacataatcatttaccattttcacaaagcgatattcaatttaatggtcatgtgatagaagcgagaataaatgccgaaaatcctgaaaagaaatttcaaccaacaccaggtaaagtgacagcgttacatttaccacaaggctttaatgtgcgagtcgattctttactatatcacggttatcaagtttcaccatattatgattctttagtagctaaagtgattgtaaaatctcatgatagagcttcagcaattgataaattgaaagccaccttagatgaaatggtgatagatggattttctacaactgccgattttttatatgcagttttaaattatccactatatcgtgatggagatgcaaaagatgttgatattaaatttttagaaaaacatcaaattgttaaaggggtggaattataa

SEQ ID NO: 413767 - DNA, 156 bp, Staphylococcus aureus
atggcagctgctgcagtatttagtttccaattgtctgcactaattaattttttgtgctcaatcgcatctgcaaagacagtgccaaaaccgcctttaatgttcataacaccaagaatgatgataactaaagcaccgcctaatagaatgacgccttga

SEQ ID NO: 413768 - DNA, 213 bp, Staphylococcus aureus
atgaagttatttcaagagattcatcaattggaacagacgattttaatggtaactcattcaaatatcgatgcgtcttatgcagagcgagtcatttttattaaagatgggcgtctatatcatgaaatatatcgtggtgaagaaagtcgattagtttttcaacaacgaataacagatagcttagcacttgtgaatggaggaagcgtcaatatatga

SEQ ID NO: 413769 - DNA, 480 bp, Staphylococcus aureus
atgttgctagaagttaaacatgtaaaaaaggtttacggtaaaggtttgaatgctacgacagcacttaatcaaatgaatttatcagttggagctggtgaatttgttgcaattatgggtgagtctgggtcagggaagtctacactactaaatttaattgcttcttttgatggattaactgaaggtgacattattgtggatggcgcacatttaaataatatgaaaaataaaagtaaagcattgtatcgtcaacaaatggtaggttttgtttttcaagattttaatcttttaccaacaatgacgaataaagaaaatataatgatgccattaattttagctggtgctaaacgaaaagatatagaacaaagggtacatcagttgacagtacaattacatttagagggattcttaaacaaatatccttctgaaatctcaggggggtcagaagcaacgcattgccattgcacgtgcattagttactaa

SEQ ID NO: 413770 - DNA, 456 bp, Staphylococcus aureus
atgtcgaccaataaaaacgattatgagcatatgttgttttattttgcatataaaacgtttattactaccgctgatgaaattatagagaagtatggtatgagccgtcagcatcatcgttttttgttttttatcaataaattacctggtattactattaaatcattactagaaatattagaaatttctaaacaaggatcacatgcaacacttcaaaaattaaaagagcaaggtctcattattgaaaaagttttagagactgatcgacgtgtcaaaaaattatattcgacggataaaggcgatcaactcattgctgaattgaacaaggcgcaagatgaattattgcaaaatatatatcaacaagtcggttcggattggtatgatgtgatggaagcattggctaaagggcgacctggttttgattttattaagcatttgaaagatgaaaaagaaagctag

SEQ ID NO: 413771 - DNA, 621 bp, Staphylococcus aureus
atggacattgtgggtatgcagtttaattatttaaaagtattggaattttatggtagaaataaacataaaaagaagttatataaatgcttatgtacaagatgtggtaatgaaaaaattatgatcggtactgcagtgaaaaacgggtattctaaaagttgtggttgtctagcgaaagataaccatcataaaaaacacggaatgacaggcactttaatttatcataaatggaaagccatgaaacaaagatgctataatcataattatgatttttataatgcgtatggtggtaggggaataaaggtttgtgatgaatggaaagatgactttatgcaattctataaagatatgggagatgtgcctttcaaaggtgctgaactagatagaattgataatgacgatgattataaaccttcaaattgtcgatgggtaagccataaagaaaactcaaataatcgcaggaaatatcacaataaaacaggatatactggtgtcacttttaaacctaaaataaataagtatcaagctcaattgtacaaaaacaaaaaatttatatacttaggtgtttacgaaactgcagaagaagcgtatttagcgtataaaaaagctaaaaatgaatattaa

SEQ ID NO: 413772 - DNA, 321 bp, Staphylococcus aureus; identical to SEQ ID NO: 410735

SEQ ID NO: 413773 - DNA, 804 bp, Staphylococcus aureus
atgggagaagtatcgtggataaaacttaaagttggcatgtttgatgacagcaaaatcaaatatatcgaagctttacctgaaagagatacgatcataactatttgggttaagttgctaactttatcaggaaagtacaacgaacaaggttacattatgctatctgaaaatttgccgtacaacgaagaaatgttagcaaatgagtttagccgacctatcaactcgataaggttagcaatacaaacttttgagacattaggcatgattgaaaaagttaacggtgtcataaaagtgacaaactgggaaaagcaccaaaacatcgaaggactcgagaaaatcagggcgcagaacaggttgaggaaacaaaagcaacgagaaaacaacagaaaattgctaaatggtcacgtgacgtcacgtgacagtcacgcaacagaagaagataaagaattagataaagaattagaaagagataaagaaaaagatatagataagaacttaagttcaattaatagcgcaactgacgttacgcatgagcaatttgaggaatggtggaaactttacgacaagaagaaagataagaagatgtcttttactaaattcaaatcatgcttaaagaaacattcttttgaacaaatcatgcaaggcactcgagagtatttaaaaactattacagacaaacaatatcaaaagtaccccaaaacattcttaactaatgaaagctatatgaatgattatagcgaagagattaaagaaactggcatagatcaattggaacgtatgaagtacgacgaaagttattgggattag

SEQ ID NO: 413774 - DNA, 177 bp, Staphylococcus aureus; identical to SEQ ID NO: 408900

SEQ ID NO: 413775 - DNA, 399 bp, Staphylococcus aureus
atgtcattgacacgaaacacatcaaggttttatcaatattggttagatcatattgatgaagatttagctgaagcaaaagcagcgattcaagacaaagattttaaacgccttggtgaagtaattgaagaaaatggtttgcgtatgcatgccacgaatctaggatcaacaccgccgttcacatatcttgtgcaagaaagttatgatgtaatggcgctcgttcacgaatgccgagaagcggggtatccgtgttattttacgatggatgcgggtcctaatgtgaaaatacttgtagaaaagaaaaacaagcaacagattatagataaattattaacacagtttgataataaccaaattattgatagtgacattattgccacaggaattgaaataattgagtaa

SEQ ID NO: 413776 - DNA, 1179 bp, Staphylococcus aureus
atgacaagaccatttaatcgtgtacatttaatcgtaatggattcagtaggtattggtgaagcgccagacgcagctgattttaaagatgaaggttcacatactttaagacataccttagaaggcttcgatcaaactttaccaaaccttgaaaagttaggtctagggaacatcgataaattaccagtagtaaatgcagttgaacaaccagaagcatactatactaaattgagtgaagcttcagttggtaaagatacaatgactggtcactgggaaattatgggattaaatattatgcagccttttaaagtataccctaatggattccctgaagagttaattcaacaaattgaagaaatgacaggtcgtaaagttgttgctaacaaaccggcatcgggtacgcaaattatcgatgagtggggcgagcaccaaatgaaaactggtgacttaattgtttatacaagtgcagacccagtattgcaaattgctgcacatgaagacattatcccattagaagagttatatgatatttgtgaaaaggttcgtgagttgacaaaagaccctaaatatttaattggtcgtattatcgcacgtccatatgttggtgaaccaggaaactttacacgtacatctaatcgacatgactatgcgttaaaaccatttggtaaaactgtcttagatcatttgaaagacggtggttatgatgttattgccatcggtaaaattaatgacatttatgatggtgaaggtgtaacagaagcggttcatacgaagagtaacatggacggtatggatcaattgatgaaaattgttaagaaagatttcacaggtattagcttcttaaacttagtagactttgatgcattatacggtcatcgtcgtgataaaccgggttatgcacaagcaattaaagatttcgatgatcgcttgccagaactgtttagcaacttaaaagaagacgatttagtaattattacagcagaccatggtaatgacccgacagcgccaggtacggaccatacgagagaatatatcccagtaattatgtatagtccgaaatttaaaggtggtcatgcactagaaagtgatactacattcagttctatcggtgcaactatagcagataatttcaacgtaacattaccagagttcggtaaaagttatttaaaggaattgaaatag

SEQ ID NO: 413777 - DNA, 357 bp, Staphylococcus aureus
atggaaatatatcatgaaaacaatttgaaattaactgtactcaacttttcacaaatcattatcgtaatcatcttagtaattattattttatttgatgtgaaatattattttgaacagcatcgaaaattactcgtaatcaaaaagctatatggttattcaacattaagagccaattaccaatacttattaataaataatatagttgttgtttttattggaatattgacgaatgtaattttacattatcactatataatgatgatatttgcaacgattattgtcgttcaaatattattgcagatttgcagcctatactatcatggccgacgttttaatgaagttatcaaggagttttaa

SEQ ID NO: 413778 - DNA, 1491 bp, Staphylococcus aureus
ttgaattatcaagccttatatcgtatgtacagaccccaaagtttcgaggatgtcgtcggacaagaacatgtcacgaagacattacgcaatgcgatttcgaaagaaaaacaatcgcatgcatatatttttagtggtccgagaggtacgggaaaaacgagtattgccaaagtatttgctaaagcaatcaactgtttaaatagcactgatggagaaccttgtaatgaatgtcatatttgtaaaggcattacgcaggggactaattcagatgtgatagaaattgatgctgctagtaataatggcgttgatgaaataagaaatattagagacaaagttaaatatgcaccaagtgaatcgaaatataaagtttatattatagatgaggtgcacatgctaacaacaggtgcttttaatgcccttttaaagacgttagaagaacctccagcacacgctatttttatattggcaacgacagaaccacataaaatccctccaacaatcatatctagggcacaacgttttgattttaaagcaataagtttagatcaaattgttgaacgtttaaaatttgtagcagatgcacaacaaattgaatacgaagaagaggcattggcgtttattgcgaaagcatctgaaggtggtatgcgtgatgcgttaagtattatggatcaggctattgctttcggcgatggcacattgacattacaagatgccctaaatgttacgggtagcgttcatgatgaagcgttgaatcacttgtttgatgatattgtacaaggtgacgtacaagcatcttttaaaaaataccatcagtttataacagaaggtaaagaagtgaatcgcctaataaatgatatgatttattttgtcagagatacgattatgaataaaacatctgagaaagatactgagtatcgagcactgatgaacttagaattagatatgttatatcaaatgattgatcttattaatgatacattagtgtcgattcgttttagtgtgaatcaaaacgttcattttgaagtgttgttagtaaaattagctgagcagattaagggtcaaccacaagtgattgcgaatgtagctgaaccagcacaaattgcttcatcgccaaacacagacgtattgttgcaacgcatggaacagttagaacaagaacttaagacgcttaaagctcaaggagtgagtgtcgctcctactcaaaattcttcgaaaaagcctgcgagaggtatacaaaaatctaaaaatgcattttcgatgcaacaaattgccaaagtgctcgataaagcgaataaggcggatatcaaattgttgaaagatcattggcaagaagtgattgatcatgccaaaaataatgataaaaaatcactcgttagtttattgcaaaattcggaacctgtggcggcaagtgaagatcacgtacttgtgaaatttgaggaagagatccattgtgaaatcgtcaataaagacgacgagaaacgtagtagtatatga

SEQ ID NO: 413779 - DNA, 633 bp, Staphylococcus aureus
atgattgcgaatgtagctgaaccagcacaaattgcttcatcgccaaacacagacgtattgttgcaacgcatggaacagttagaacaagaacttaagacgcttaaagctcaaggagtgagtgtcgctcctactcaaaattcttcgaaaaagcctgcgagaggtatacaaaaatctaaaaatgcattttcgatgcaacaaattgccaaagtgctcgataaagcgaataaggcggatatcaaattgttgaaagatcattggcaagaagtgattgatcatgccaaaaataatgataaaaaatcactcgttagtttattgcaaaattcggaacctgtggcggcaagtgaagatcacgtacttgtgaaatttgaggaagagatccattgtgaaatcgtcaataaagacgacgagaaacgtagtagtatagaaagtgttgtatgtaatatcgttaataaaaacgttaaagttgttggtgtaccatcagatcaatggcaaagagttcgaacggagtatttacaaaatcgtaaaaacgaaggcgatgatatgccaaagcaacaagcgcaacaaacagatattgctcaaaaagcaaaagatcttttcggtgaagaaactgtacatgtgatagatgaagagtga

SEQ ID NO: 413780 - DNA, 771 bp, Staphylococcus aureus
atggatttgaatttaacgatgattataatcataattttgtttggttttatcgcggcgtttatagattcggttgtagggggtggtggtttaatttctacgccagcattattagcaatcggtctaccaccatctgtggctttaggtacaaataaattggcaagttcatttggttctttaactagtgcgataaaatttataaggtccggtaaagtggacttatatgttgttgccaaattatttggttttgtatttttggcatctgcatgtggtgcatatattgcaacgatggttccgtcacaaatattgaaacctttaatcattattgcactttcgtcggtgtttatattcacattacttaaaaaagattggggcaatacacgtacgtttactcaatttacatttaagaaagccttactatttgcagcactttttatattaatcggcttttatgatggatttgtaggtggaggaacaggttcatttatgctttttgtattgttaatctttggttttgattttttaagcgctgcaggaaatgctaaagttttgaactttgcttctaatataggtgcgcttgtattatttatggtattaggacaagtagattatgtaataggtttagttatggctgcgagtatgattgttgggtcatatgctggggctcattttgctattaaacaaggtgttggctatgtaaaagtattatttattattattactgcgattttaattttaaaaaatgcttttgattatattcaacaatttgtataa

SEQ ID NO: 413781 - DNA, 210 bp, Staphylococcus aureus; identical to SEQ ID NO: 407536

SEQ ID NO: 413782 - DNA, 195 bp, Staphylococcus aureus
ttgaaagctcgtgaatcaatgggtcgttaccacagtatctttactgataaagtggatatgaatgtagcgacaccaatatttattgatagtattggtcaagacgatgagaagaatgagcgagacttaaaagaattggaaaagcaatatccaaatgctgattttcatattgatgatattgggagatttgaggagtaa

SEQ ID NO: 413783 - DNA, 156 bp, Staphylococcus aureus
atgaagaataatacaaatggtgttgtgacaatcacaacgccaatgttagcaatcgtttctgcaaacgttgcaattttagacccaaagccatctgtaaattcacttaacatagatggtattttcttaggtaaagaatttaaccaatcattaatttga

SEQ ID NO: 413784 - DNA, 492 bp, Staphylococcus aureus
atgcacaaaaaatattttattggcacttccattttaatagcagtatttgtcgttatatttgaccaggttactaaatatattatagctactacaatgaaaattggagattcatttgaagtgataccgcactttttaaacataacgtcacatcgaaataatggtgctgcatggggaatattgagtggaaaaatgacatttttctttattattaccattattatattaatagccttagtatatttctttattaaagatgctcaatataatttatttatgcaagttgctattagtttactttttgcaggtgcacttggaaactttattgatagagttttaacaggagaagttgttgactttattgatacaaatatttttggttatgattttccaatatttaatatcgcagattcaagtttaacaattggtgtaatattaattattattgccttattaaaggatacttccaataaaaaggagaaggaggttaagtaa

SEQ ID NO: 413785 - DNA, 1983 bp, Staphylococcus aureus
atgacgccttctgataaaaagcgtatgatggatcgtaaaaagcattcaaaagtcaatgtgcctgaattaaagcctgtacaaagtaagcaagctgtgagtgaaagcaagactgcgagtgaagccacaccatcatcaagctctgaatcacaagagtcaaatacaaatgcatataaaataaataatataacatcaaacaatgttgagaacaatcaacttattggtcatgcagaaacagaaaatgaatatcaaaatgcacaaccatattcagagcagaaaccttctgttgattcaactcaaacggaaatatttgaagaaagtcaagatgataatcaattggaaaatgagcaagttgatcaatcaacttcgtcttcagtttcagaagtaagcgacataactgaagaaagcgaagaaacaacacatacaaacaatactagtgaacaacaagataatgatgatcaacaaaaagatttacagccttcattttcaaaccaaaatgaagatacagctaatgaaaatagacctcggacaaaccaaccagatgttggaacaaatcaagctgtacaaacatctaagccgatgattcgtaaaggcccaaatattaaattgccaagtgtttcattactagaagaaccacaagttattgagccggacgaggactggattacagataaaaagaaagaacttaatgacgcattattttactttaatgtacctgcagaagtacaagatgtaactgaaggtccaagtgttacaagatttgaattatcagttgaaaaaggtgttaaagtttcaagaattacggcattacaagatgacattaaaatggcattggcagcgaaagatattcgtatagaagcgccaattccaggaactagtcgtgttggtattgaagttccgaaccaaaatccaacgacggtcaacttacgttctattattgaatctccaagttttaaaaatgctgaatctaaattaacagttgcaatggggtatagaattaataatgaactattacttatggatattgctaaaacgccacacgcactaattgcaggtgcaactggatcagggaaatcagtttgtatcaatagtattttgatgtctttactatataaaaatcaccctgaggaattaagattattacttatcgatccaaaaatggttgaattagctccttataatggtttgccacatttagttgcaccggtaattacagatgtcaaagcagctacacagagtttaaaatgggccgtagaagaaatggaaagacgttataagttatttgcacattaccatgtacgtaatataacagcatttaacaaaaaagcaccatatgatgaaagaatgccaaaaattgtcattgtaattgatgagttggctgatttaatgatgatggctccgcaagaagttgagcagtctattgctagaattgctcaaaaagcgagagcatgtggtattcatatgttagtagctacgcaaagaccatctgtcaatgtaattacaggtttaattaaagccaatataccaacaagaattgcatttatggtatcatcaagtgtagattcgagaacgatattagacagtggtggagcagaacgcttgttaggatatggtgatatgttatatcttggtagcggtatgaataaaccgattagagttcaaggtacatttgtttctgatgacgaaattgatgatgttgttgaatttatcaaacaacaaagagaaccggactatctatttgaagaaaaagaattgttgaaaaaaacacaaacacaatcacaagatgaattatttgatgatgtttgtgcatttatggttaatgaaggacatatttcaacatcattaatccaaagacatttccaaattggctataatagagcagcaagaattatcgatcaattagagcaactcggttatgtttcgagtgctaatggttcaaaaccaagggatgtttatgttacggaagcagatttaaataaagaataa

SEQ ID NO: 413786 - DNA, 180 bp, Staphylococcus aureus
atgcctacaccagaagctaaaccaattaatgcacttataattggtaaacctgcagcaataactgaaccaaatgtgattaataacacaacaaaggcaacaataataccaactaattcagaattaccacctatatctgtagaggtcatacctgttcctgttaattctgtctgtacattatga

SEQ ID NO: 413787 - DNA, 318 bp, Staphylococcus aureus
atgcaagataagaaagcaaagttaaatccagctatttgttttactatgctaggtcattatttaggtgtagatattgaaacgattattgattactatttatatcaaaatgtttcaagtttaactcaaaatgctgttcgtgctattccacttggacaaactgctggtcaaaagatagttactcacatgattccttatatagaagaaacaagaaagcagatttccgaattaaaagaagcagattttggcatgacagcgcctggtttagaactaaatcaaatggcgcatgagaacgtcaatgttagaattttcatatcatag

SEQ ID NO: 413788 - DNA, 207 bp, Staphylococcus aureus
atggcgaaggaacacaatattaaagtagatattaaacaaatcaaaattacagaagttgggccttatgaagacactgcagatttattagttacaactgcaatgacaaagaaagaatataaattcccagttatcaacgcacgtaatttcttaactggtattggtattgaagaaacaaagcaacaaatcttaacagagttacaaaaataa

SEQ ID NO: 413789 - DNA, 273 bp, Staphylococcus aureus; identical to SEQ ID NO: 407792

SEQ ID NO: 413790 - DNA, 975 bp, Staphylococcus aureus
atgtcattaaaacgtcaaggtaagtcttaccttgaaatattagaaatgggtggtggcatattatctaccgttaatgctactagagaaacatccgaagatgacttgtttaaaaaagcagagcatgatttgcttactatgattaaacacggcgtgcttgcagttgaaagtaagagtggttatggattagatagagaaaatgaactgaagcaattgaaagtgtctaatcgtttagctgagaaatatgatttagacatgaaacatactttcctagggcctcatgctgtacctaaagaggcaagttcaaatgagacatttttagaagaaatgattgcgttacttccggaagtaaaacaatatgcagactttgcggatattttctgtgaaacaggtgtatttacaatagaacaatcgcaacattatatgcaaaaagcaaaagaagcaggttttaaagtgaaaatacatgcggatgaaattgatccgttaggcggactggaattagcaattgatgaacaagcaatatcagcagaccacttagtagcttcaagtgataaaggaaaagaaaagttgcgaaatagtgatactgtagctgtcctcttacctgcaacgacgttctatttaggtaaagaagattatgcagatgcaagaggcatgcttgacaataacggtgcgattgcattagcaactgattataaccctggtagtagtgtcacaaacaacttacaacttgttatggcgattgcagccttgaaattaaagctatcacctaatgaagtttggaatgctgttacggtcaatgctgctaaagcaatagacattaacgcgggtacaattaacacaggtgataaggctaatttagtaatttgggatgcaccaaatcatgaatatattccatatcattttggtatcaatcacgcagaaaaagttattaaagacggtaaggtcatcgtagataacacattatcttttaaagcataa

SEQ ID NO: 413791 - DNA, 1722 bp, Staphylococcus aureus; identical to SEQ ID NO: 413710

SEQ ID NO: 413792 - DNA, 921 bp, Staphylococcus aureus
atgaaatggtttttagcgatgccaagagcgaaagcgtggatgattaacacacgtacaccagattggttatataaatcaccgcgaacgacgtacttacaaacatggcatggcacgccattgaaaaagattggtttggatattagtaacgttaaaatgctaggaacaaatactcaaaattaccaagatgactttaaaaaagaaagccaacgttgggattatctagtgtcacctaatccatattcgacatcgatatttcaacatgcatttcatgttagtcgagataagattttggaaacaggttatccaagaaatgataaattatcacataaacgcaatgatactgaatatattaatggtattaagacaagattaaatattccattagataaaaaagtgattatgtatgcaccaacttggcgtgacgatgaagcgattcgagaaggttcatatcaatttaatgttaactttgatatagaagctttgcgtcaagcgctggatgatgattatgttattttattacgcatgcattatttagttgtgacacgtattgatgaacatgatgattttgtgaaagacgtttcagattatgaagacatttcggatttatacttaatcagcgatgcgttagttaccgactactcatctgtcatgttcgacttcggtgtattaaagcgtccgcaaattttctatgcgtatgacttagataaatatggcgatgagcttagaggtttttacatggattataaaaaagagttgccaggtccaattgttgaaaatcaaacagcactcattgatgtattaaaacaaatcgatgagactgcaaatgaatatattgaagcacgaacggtattttatcaaaaattctgttcattggaagatggacacgcgtcacaacgaatttgccaaacgatttttaagtga

SEQ ID NO: 413793 - DNA, 351 bp, Staphylococcus aureus
atgtctgagcttgacagaaacattgatgctgtcatcaatatcgaagttccggaagaagaattaatgaaccgtcttacaggtcgtcgaatctgtgagtcatgtggtacaacgtatcatcttgtatttaatcctccgaaggtcgaaggtatttgtgatatcgatggtggtaaattgtatcaacgagaagatgataatcctgaaacggtagctaatcgtttgagtgttaatattaaacaatctaagcctattttagatttctatgatcaaaaaggtgtattgaaaaatattgatggttcaaaagatattagcgacgttaccaaagatgtcattgatattttagatcatttgtaa

SEQ ID NO: 413794 - DNA, 846 bp, Staphylococcus aureus; identical to SEQ ID NO: 409385

SEQ ID NO: 413795 - DNA, 270 bp, Staphylococcus aureus
atgaaaaaattcaaattatttttagattttagtactttattattaatttcagggctattatttttatttttcttcaaagaaaatgaagaaattatacctgaaagttccaatattttaacaatctctaattgggataaatctaacagtaaatcaaaagtgttagatgtcattgaatcaggcgccaaaaatcaaaatatacaaataattaaatccgttaaagattttgataataaaaaagaatttttttgttttcaactcaaaacgaaataa

SEQ ID NO: 413796 - DNA, 231 bp, Staphylococcus aureus
atgattgtaatgaatgctggcacagcaacttcaaaacttttccagtttatctcagcaaagtttgcagccattaatacacctaccaccactaaagctggtgtcgtaactgcacttgttacaacagcgattaacggactaaagaataacgctaataggaaacaacaacctgttacgatactagcaaatcctgttctagcacctacagcaacacctgaagttgattcgatataa

SEQ ID NO: 413797 - DNA, 216 bp, Staphylococcus aureus
atggttaatacaacagtaaatgcaaagaatgcatttaatcccatacctggtgctaacgcaattggatatttagctattagtcccatgaatagcgagcctacaaatgctgctaatgcagtcgctacaaaaatggcaccttggtccattttcatatcttctgatacgcctttaacaccggctaaacttaaaacttgcgggttaactgctaaaatatag

SEQ ID NO: 413798 - DNA, 438 bp, Staphylococcus aureus; identical to SEQ ID NO: 407662

SEQ ID NO: 413799 - DNA, 1437 bp, Staphylococcus aureus; identical to SEQ ID NO: 413720

SEQ ID NO: 413800 - DNA, 225 bp, Staphylococcus aureus
atgtcggatgatggcaattgttttgttatatttgatgaaacagatgtatcgataccgatttttaaatcgttttcatcaccgttaaaaataaaatacataagcgtcaatattaaaattggtgctagaaacattagcgcaagtgtacgtttatcacgtaacatttcttttaatactcgtctaacaatagctaaaattttcatgattgacgaacctcctcagctttaa

SEQ ID NO: 413801 - DNA, 297 bp, Staphylococcus aureus
atgaccattggcaacttaacgctaaaccaatcctatttggaactccaagtatctaataaaacgatgacgttaccgaacaaggaatttcaattattatttatgcttgcagcacgtcctaagcaaatctttactcgtgaacagataatagaaaaaatttggggctatgattatgaaggagatgaacgaacagttgacgttcatattaagcgactacgccaaagattaaaaaaattaaatgccacacttacaattgaaacagtaagaggacaaggctataaggtggagaatcatgtttaa

SEQ ID NO: 413802 - DNA, 210 bp, Staphylococcus aureus
gtgctctcagtagttgctggtttatcagttgtgccgttattagttagttctactgctggtttatcagttgtaccattacccgttgccgaattgtctgttgatgcatctacactagaattgttattagctgtcggtttatcatttgcatcatcagttgatgaattgtttgttgatgttcctgttgtttcacctgttgctgaatcattatga

SEQ ID NO: 413803 - DNA, 1140 bp, Staphylococcus aureus
ttgataaataaagacttcaaaaaagaagaaagcaatgatgaaaataatgattctgcttctagtcatgcgaatgataataatatcgatgattctacagactctaatattgaaaatgaggattatagatatactcaagaaattgacgaccaaaatgaatcgaatggaattgcagtcgacaacgaacaacatcaatcagctcctaatgaacaaaatagcgactcgaatgatgaggaaacagtaacgaaaaaagaacgaaaaagtaaagtaacacaattaaaaccattaacacttgaagaaaagcggaagttaagacgtaagcgacaaaaaagaatccaatacagtgttattacaatattagtattgttgattgctgttatactaatttacatgttttcaccacttagtaaaattgcgcatgtgaatattaatggcaataatcacgtcagtacttcaaagataaacaaagttttaggtgttaaaaatgattcgaggatgtatacgtttagtaaaaaaaatgctattaatgatctcgaagaggatccattaatcaaaagtgttgagatacacaagcaattaccgaacacattaaacgtagatatcacagaaaatgaaattattgctttagtgaaatataaaggtaaatatttacctttattagaaaatggtaaattgcttaaaggttcaaatgatgtcaaaattaatgatgcacctgtcatggatggtttcaaaggtacaaaagaagatgatatgattaaggcgttatctgaaatgacacctgaagttagacgatatattgccgaagtgacatacgccccaagtaaaaacaaacaaagcagaattgaattgtttacgacggatggacttcaagtaatcggtgatatttcgacgatatctaagaaaatgaaatattatccgcagatgtcacaatcattatcaagagatagttcgggtaaactaaaaacacgaggctatattgatttatcagtcggtgcttcatttatcccatatcgtggaaacacgtctactcaatcagaaagcgataaaaatgtgactaaatcatctcaagaggaaaatcaagcaaaagaagaattacaaagcgttttaaacaaaattaacaaacaatcaagtaagaataattaa

SEQ ID NO: 413804 - DNA, 390 bp, Staphylococcus aureus
atgaacaaagcggcgcaacaattcataggtacacatgattttacgggattttgttcgcaaaaaactgaagtagaaagcaaagttagaacattataccaaagtgaaattgtaaaaacagatgatggctttgattatattgtcactggatctggatttttatataacatggtgcgagtcttagttgcatttttaatagaagttggaaaaggacgacatgaaatttctgatgtgccgaagcttcttgaatcaaagaatcgtaagaatgtaccttttactgcaccggctgaaggactatatttagagaagatttatttagatgaaaatgagttattaaaagactttggcaacgatataaaaatacatcgtaaaaaatcattacaaaatgactga

SEQ ID NO: 413805 - DNA, 570 bp, Staphylococcus aureus
atgtcattaattaacaaagaaatcttaccatttacagcgcaagctttcgatccaaaaaaagatcaatttaaagaagttacacaagaagatttaaaaggttcttggagcgtagtatgcttctatcctgctgacttctcattcgtttgtccaactgaattagaagacttacaaaaccaatatgaagaattacaaaaattaggcgtaaatgtattctcagtatcaactgatactcacttcgtacacaaagcatggcatgaccattcagatgcaattagcaaaatcacttacactatgattggtgacccatcacaaacaatcactcgtaattttgatgtattagatgaagctactggtttagctcaacgtggtacattcattatcgacccagacggtgttgtacaagcatctgaaattaacgctgacggaattggccgtgacgctagtacattagctcacaaaatcaaagcagctcaatatgttcgtaaaaaccctggcgaagtatgcccagctaaatgggaagaaggcgctaaaacattacaacctggtttagatttagtaggtaaaatctaa

SEQ ID NO: 413806 - DNA, 768 bp, Staphylococcus aureus; identical to SEQ ID NO: 407496

SEQ ID NO: 413807 - DNA, 480 bp, Staphylococcus aureus
atgggactacttgatattgcaagtatacgttctatagaaagaggctttagttattatcaaagtaaatgtgtcattaacttaaaatcatattctgaaactcaatttgaggctgaagtaaaaggtagtggtagcaatgtatatcgttgctatattgatatggaacatcctagaaaatccaaatgcaattgtcctcatgctgatggaagacgcgtgatatgtaaacatttaattgcattattatttacagctagtccagaagaagcaaataaacatataatcatgttaaacgaagttgaagaagactatcacttacgtagaaatatgtggattgattctcttaaagaaatggttaatgatatgagtaaagaagaacttcgcgatgcatatttaaatatgctaattgaacatggagaaatggcagagttgtttggattagacgaagaagaagatttatttgaagatgaagacgaattctattaa

SEQ ID NO: 413808 - DNA, 552 bp, Staphylococcus aureus
atgcaacaattttatggtcgcactgttggatatatttcacaaaattatgctgaaagttttaatgatcactcgaaattaggaaaacaattgattgcaatttatcgtactcattttaaagttagtaaagaagcagcattatctcaaattgataaagcattgtcgtgggttaacttaagtagcgaagaaatattaaagaaatacagttttcaactttctggtggtcaacttgaacgcgtatatattgcaagtgttttaatgttagaacctgagttaattattgcagatgaaccagtagcatcattagatgttattaacggctataaaattatggatttacttcaacacattgtaaaagaacacggtcaaacattatttataatcactcataacttaagtcacgttttaaagtattgtgactatattaatgttataaaagacggtgacattgttgagcgcggtgacataaagcactttaagtacgatacattacaaccttataccgaatttttaattaaatatcgaacacaattaaagagggatcataatgattga

SEQ ID NO: 413809 - DNA, 690 bp, Staphylococcus aureus
atgaagttatcatttcatggtcaatcaacgatttatttagaagggaacaacaaaaaagttatcgtagatccatttatttcaaataaccctaagtgtgatttgaatattgaaacagtgcaggtagactatatcgttttaacgcacggtcattttgatcactttggtgatgttgtggaactagcaaagaaaacaggtgcaacagtaataggaagtgcagaaatggctgactatctttcttcatatcacggtgttgaaaatgttcatggtatgaatattggtggtaaagcaaactttgatttcggaagcgttaaatttgttcaagcatttcatagttcaagttttactcatgaaaatggtattccagtttatttaggtatgccaatgggtatcgtgtttgaagttgaaggaaaaacaatttatcatactggtgatacaggtctgtttagtgacatgtcacttattgcgaaacgtcatccagttgatgtatgttttgtaccaattggagataattttacgatgggtattgatgatgcaagttatgctattaatgaatttattaaaccaaaaatttctgtaccgattcattatgatacattcccattaatcgaacaagatccacaacaatttaaagatgctgttaatgtaggggacgtgcaaattttaaaaccaggtgaatctgttcagttttaa

SEQ ID NO: 413810 - DNA, 1056 bp, Staphylococcus aureus
atgacaaaaatatcaaaaataatagacgaactaaacaatcaacaagctgatgcagcatggattacaacaccgttgaatgtatattattttactggataccgtagcgaaccccatgaaagattatttgcattattgattaagaaagatggtaaacaagtactattttgtccaaaaatggaagtcgaagaagtcaaagcatcacctttcacaggtgaaatcgttggatatttagacactgaaaatcctttttcactttatcctcaaacaatcaataaattactaattgaaagcgagcacttaacagtagcacgccaaaaacaattaatctctggtttcaatgtcaattcattcggagatgttgatttaacaatcaaacaattgagaaatattaaatctgaagatgaaattaacaaaatacgtaaagctgctgagttagcagataagtgtatcgaaataggtgtttcttatttaaaagaaggtgtgactgaacgtgaagtagtcaaccatattgagcaaacaatcaaacaatatggcgtcaatgaaatgagttttgatacgatggttttatttggagatcatgccgcatcacctcatggcacaccaggagatcgcagattaaaaagcaatgagtatgtactatttgatttaggtgtaatttatgagcattattgtagcgatatgacacgtaccattaaatttggtgaacctagccaagaagcacaagaaatttataatattgtattagaagcagaaacatctgcaatccaagcaattaaacctggaatacctttaaaagatatcgatcatatcgctagaaatattatttcagaaaaaggttatggtgaatatttccctcatcgcttaggtcatggtctaggattacaggaacatgaatatcaagatgtttcaagtactaattctaatttgttagaagctggcatggtcattacaatcgaaccaggtatttatgtaccaggtgttgcaggtgtaagaattgaagatgacatacttgtcactaatgaaggatacgaagtattaacacattacgaaaaataa

SEQ ID NO: 413811 - DNA, 705 bp, Staphylococcus aureus
atgtcagctcaagttggcgcagagttcctacaaaaacttaatggtggtatgggaattctactaggtggtgttccaggagtacctaaaggtaaagtaactattatcggtggtggtcaagcaggaacaaatgcagctaaaattgcactaggactaggtgcagatgttacgattttagatgttaatccaaagcgtttacaacaattagatgatttattcggtggacgtgtacatacaattatgtcaaatccgttgaatattgagttgtatgttaaacaaagtgatttagtaataggtgcagttttaattccaggtgctaaagcgccaagacttgtaacagaagacatgattaaacaaatgaaaaatgggtcagttattattgacattgctattgatcaaggtggtatttttgaaacaactgataaaattacgacacatgatgatcctacatatattaagcatggtgtggttcattatgcagttgcaaatatgcctggtgcagtaccgcgtacttcgacgttagcattaaataatgctacgctaccttatgcgctcatgctagctaataaagggtatagagaagcatttaaatcaaatcaaccattatcattaggtttaaatacttacaaaggtcacgtaaccaataaaggcgttgcagaggcatttgaaatggaatataaatctgtagaagaagcattacacttataa

SEQ ID NO: 413812 - DNA, 1662 bp, Staphylococcus aureus; identical to SEQ ID NO: 411357

SEQ ID NO: 413813 - DNA, 1098 bp, Staphylococcus aureus
atgtatatcaatatgaaagattatgggttaacaggcataaacaaaactaaagatactcgagcaatacaacgtgcgttaaatcatggaagatgtaaaccaacgacagtttatataccgaaagggacgtatgatatttgcaaaccattaacgatatatggcaatacaacacttttgttggataatgaaactattttacgtcgatgtcattctggtccgttattaaaaaatgggcatcgctttggtttttatcgtggttataatggacacagttatattcatattaaaggtggcaagtttgatatgaatggcgtatcgtatccttataataatacagctatgtgcattggacatgctgaagatattcaattaataggtgtaaccattaagaatgtagtgagtggtcatgcaattgatgcttgtgggattaatggactctatattaaaaactgttcatttgaaggattcgttgactatagtggcgaacgtttttattctgaagcaatacaattagacattcaagtacctggtgcttttccaaaattcggaacgacagatggtacgataacgaaaaatgtcattatcgaagattgttattttggaccttcagaattgcccgaaatgggaagttggaatcgtgctattggctcacatgcaagtagacataatcgttactatgagaatattcatattagaaataatatatttgaagatatacaaggttatgcattaactcccttgaagtataaagatgctttcattattaataataagtttattaactgtgagggtggtattagatatttaggagttagagatggtaaaaatgctgcagatgtgatgacaggaaaagacttaggttcccaagcaggaataaatatgaatatcattgggaacgaatttaaagggtcaatgtctaaagatgcgatacatgtacgtaattataataatgttaaacataaagatgtattaatcgttgggaatacattcaataattcgactcaatcaattcatttggaagatattgatacagtgtttttaagtcctgttgaagcgggtattcaagttactacaatcaatgtagatgaaataaaaaagtaa

SEQ ID NO: 413814 - DNA, 1593 bp, Staphylococcus aureus
atgcagttaatcggtaatatcgtaaaagcgttagtggcatttggtactgcaatggctcctatagctagtaaattactagatttcattactaatttagctggatttatcgccaaactattcgaagcacacccagcagtcgctcaaattatcggtgttatcggtattttaggtggcgtattttgggctttaatggctccgatcgcagctgttagcagtgtgttaagtaatgtgtttagtatgactttattgaatgttgtcaaaagaatactggatttaactagaataactggggtggtaagtaaagcgttcggtttattgactggtgctttcacaagtatttcttggccaatattagcagtagttgcagtcattggtgtattcattggtattcttgtttatttatggaaaacaaacgagaatttcagaaaaacaataacagaagcttggaacggtattaaaacagcagtttccggtgcgattcaaggtgtagtagattggttaactcaattgtggggcaaaattcaatcaacattacagccaatcatgcctatattacaagtattaggacaagtattcatgcaagttttaggtgttttggtaataggcattattacaaatgttatgaatatcatacaaggtttgtggacgttaattacaattgcgttccaagccataggaacagtgatatccgtagctgtccaaatcatagtgggtttattcactgctttaattcagttgcttactggcgacttctcaggtgcttgggagactattaaaactacggttaccaatgtacttgatacgatttggcaatacatgcaatcagtttgggagtcaattatcggctttttaactggcgtaatgaatcgaacgctttcaatgtttggtacaagttggtcacagatatggagtacaatcactaattttgttagcagtatttggaacactgttacaagttggttcagtcgtgttgcttggagtgtggctgaaaaaatgggacaagcattaaactttattatcacaaaaggttctgaatgggtttctaacatttggaatacagttacaagtttcgcgagtaaagtagctgatgggtttaaaagagttgtctcaaatgtaggtgacggtatgagtgatgcacttggtaagattaaaagtttcttcagtgatttcttaaatgccggagcggaattaatcggcaaagtagctgagggtgtagccaatgctgcgcacaaagtagtcagcgcggtaggcgatgcgatttcatcagcttgggactctgtaacttcattcgtaagtggacacggtggaggtagtagcttaggtaaaggtttagcggtatcacaagcaaaagtaattgctacagactttggcagtgcctttaataaagagctatcctctactttgacagatagtatagtaaatcctgtaagtacttctatagacagacacatgactagcgatgttcaacatagcttaaaagaaaataatagacctattgtgaatgtaacgattagaaatgagggcgaccttgatttaattaaatcacgcattgatgacatgaacgctatagacggaagtttcaacttattataa

SEQ ID NO: 413815 - DNA, 1530 bp, Staphylococcus aureus
atggtcctagtgcgtaatattaatctagcactgcgcgcgcaatatttgtttgaatctaatgtcgattactttgtatataatggtgatattgttttaattgaccgtattacaggtcgtatgttacctggaactaagttgcaagctggacttcaccaagctattgaagcgaaagaaggtatggaggtttcaacagataaaagtgttatggcaacaatcaccttccagaatttatttaaactttttgaatcattttcaggtatgacagctacaggaaaattaggcgaatcagagttctttgatttgtattcaaaaatagtcgtacaagtaccaactgataaagcgattcaacgtatcgatgaaccagataaagtgtttcgttcagttgatgagaaaaacatcgcaatgattcatgatatagttgaacttcatgaaacggggcgaccggttttactcataacgagaactgctgaagcggctgaatacttttcaaaagtatttttccaaatggatattcctaataatttactcattgcgcaaaatgttgcaaaagaagcgcagatgatagctgaagcagggcaaattggttccatgactgttgcgactagtatggcaggtcgaggcacagatattaaacttggtgaaggtgtcgaagcattaggtggattagctgttattattcatgaacatatggaaaatagccgtgtagacaggcaattacgtggtcgttctggtagacaaggggatccaggatcatcttgtatatatatttcactagatgattatttagttaagcgatggagcgatagtaatttagcggaaaataatcaattatattcattagatgcacaactattatcgcaaagtagtttgtttaatcgcaaagttaagcaaattgtagttaaagcgcaacgtatctcggaagaacaaggggttaaagctcgtgaaatggctaatgaatttgaaaaaagcattagtatacagcgagatcttgtatacgaggaacgcaatcgagttttagaaatagatgatgctgagaatcgagattttaaagcgttagctaaagatgtgtttgaaatgtttgtaaatgaggaaaaggtgctaacaaaatcgcgtgttgtcgagtatatttatcaaaatttaagtttccaatttaataaagatgtggcttgtgttaattttaaagataagcaagcagtagtgacatttttattagagcaatttgaaaagcaagtagctttgaatcgtaaaaacatgcaaagtgcatattattataatattttcgttcaaaaagtctttttgaaagcaattgattcatgttggttagaacaagtcgactatttacaacaattaaaagcaagcgttaatcaacgacaaaatgggcaacgtaacgctatttttgaataccatagagttgcattagattcatttgaagttatgacacgaaatatcaaaaaaagaatggtgaaaaatatttgtcaaagcatgattacatttgataaagaaggtatgccagttatacattttccataa

SEQ ID NO: 413816 - DNA, 1353 bp, Staphylococcus aureus; identical to SEQ ID NO: 407565

SEQ ID NO: 413817 - DNA, 258 bp, Staphylococcus aureus
atgcaatggagtactaatccagcagtacaaagcggtgtgattcaacacgttgaaggcgacacaagccaagtaatgagttggaacatgtctagtttaaacgctggtattggtgttggaggcattattggaggcttggtcatgacacatgtttctgttcaagctatcacgtatacgagtgccatcattggcgcattaggattaatcgttgttttcacattgaaaaataatcattatgctaaaacattcaaatcatcataa

SEQ ID NO: 413818 - DNA, 855 bp, Staphylococcus aureus
atggctcaagaacaaaacaagaaaaaagaagaaaaaatgaaagagttacaagactttattgctcgtttctcagctaacgcttctaaatctaaacaagcaacaagtcgtaaaaaacaacttgaaaaaattgaattagatgatattcaaccatcatcaagaagatatcctttcgttaaattcacgcctgagcgtgagattggtaacgacttattaatcgttcaaaatctctctaaaacaattgacggcgaaaaagtattagataatgtatcattcacaatgaatccaaatgataaagcgattttaattggagatagtgaaattgcaaaaacaacattacttaaaatattagctggcgaaatggaaccagacgaaggttcatttaaatggggtgttactacatcattaagttacttccctaaagataactcagagttctttgagggtgtaaatatgaatctcgttgattggttaagacaatatgctcctgaagatgaacaaacagaaacatttttacgtggtttcttaggtcgtatgttatttagtggtgaagaagttaagaaaaaagctagtgtgctttcaggtggagaaaaagttcgttgtatgctaagtaaaatgatgttatcaagtgcaaacgttcttttacttgatgaaccaacaaaccacttagacttagaaagtattactgcagtcaatgatggtcttaaatcatttaaaggttctatcatctttacttcttatgacttcgaatttatcaacacgattgcaaaccgtgttatcgatttaaataaacaaggcggcgtttcaaaagaaattccatatgaagaatacttgcaagaaatcggcgttttaaaataa

SEQ ID NO: 413819 - DNA, 549 bp, Staphylococcus aureus
atgatgggtgaattttcaatttcctcatatattgctattagactaaaggatcagtttgaaacaataagtataggttcatatgatattacaggagctaagatgttagcaatcttgctaatgattaatacggtcgtcgtcattttactcacgtattcaatctcgaaagttgtattgaaaatagattttaaaaaagctttaatcactggtttgctgatttatattgttggctatagtggtctaacctatcttaatcagtttggcttattagttgtttttatgataattgcgactgtaggtgaaattatttattcgcctatagtttcagaacaacgttttaaaattattcctaaagctaaaagaggaacatatagtgcagttaatgcattaggcattcatttttcagaaacactagctaggttaggtattgtgttgggtgctttcttaacgacattacaaatgggactgtatatgtttatagttttaacaattggtgctagcatgcttgttgctggtgtattcggggggcaaaaacaagttaatacaaattga

SEQ ID NO: 413820 - DNA, 624 bp, Staphylococcus aureus
ttgaaagaagataggcgaattagaaagacaaagtcctccattaaacaagcgttcactaaattactacaagaaaaagatttagaaaagattaccattcgcgacataacaacacgcgctgatatcaatagagggacattttacttacattacgaggataaatatatgttactcgcagatatggaagatgagtatatttcagaactaacgacatatactcaatttgatttgttacgcggttcttcaattgaagacattgcgaatacttttgtaaataatatactcaaaaatattttccagcatattcatgataatttagagttttatcatactattttacaattggaacgcacgagtcaattagaattgaaaatcaacgaacatattaaaaataatatgcaacgttatattagtatcaatcattctatcggaggcattccagagatgtatttttacagttacgtttccggagcaacaatttcaattattaaatactgggtaatggacaaacagcccatttcagttgatgaattagctaaacatgtgcataatattgtttttaatggtccattaagaataatggcagaaaaccgtttgcataaatcaaaccttgattcactaacttaa

SEQ ID NO: 413821 - DNA, 822 bp, Staphylococcus aureus
atgggacgtttagaatcatacaatgcagttgctgcagcaattttgggacagtctgaagtatttatttcaattaaaaaacaattaccatacatacctaagcaacgtttatacacattaacagcttcagcaatgtcgactgtatctgcttcaattatcggtgcgtactttaccttaattgaacctaaatatgttgtaacggctgttgtcttaaacttatttggtggtttcattatcgcttcaattattaacccttataaagttaatgaagaagatgacaaattattagttgaagaaactgaagaaagacaacaatcattcttcgaaatgctaggagaatatattttagatggatttaaagtagctgtcattgtaggcgcaatgttaatcggatacattgccattatcgctctattaaatggaattgtaagcaatatctttagtacagtttcaggtggcgctatttcttgggatttccaaacattaattggttttgtctttgcaccatttgcattcttagtcggtgtgccatggcaagatgcagttcaagccggttcagttatggcgacaaaactattatctaacgaatttgtagcaatgcaagcacttggtaaacttagtgatttatctgaacacgcaaaaggtgttacatctgtattcttagtatcatttgctaactttagctctattggtattatttcaggtgcgattaaatcacttaatgacaaaaaaggagatacagttgcccgctttggtttgaaactattattcggtgcaacactagtatcattcatttcagctgcaatcgctggattctttatttaa

SEQ ID NO: 413822 - DNA, 279 bp, Staphylococcus aureus
ttgaatattactgtacaacgaaactcattcggtagacaagttgacagctttgaaacagaattagatattaaaggtatcgctacagatattgaaggtgtgtttataagagcgccacatattgaaaaagtaggtcaaggcgtagatatcctatgtaaggttaatgagaaaattgtagctgtccagcaaggtaaatatttaggcgtatcattccatcctgaattaactgatgactatagagtaacggattactttattaatcatattgtaaaaaaagcatag

SEQ ID NO: 413823 - DNA, 1047 bp, Staphylococcus aureus
ttgacttatgccggctatgatattgatgatctagctgaaaatgcgcaatttgaagaagttattttcctattatggaactatagattgccaaatgaagaagagcttgctcatttaaaggggaaattaaatcaatacatgacattaaatcctcgtgtgtatacacattttgaggagtatgttacagatcacgtgcatccaatgacagcattacgtacgtcattatcatatattgcacatttcgatcctgatgctgaaaatgaatcagatgaaaatcgttatgaaagagcaatgcgtatacaagctaaagtagcatcattagttacagcgtttgctcgagtaagacaagataaagaaccacttaagcctaatcctgacttaagttatgcggcaaacttcctatatatgttacgtggggaattaccaacagatatagaagtagaagctttcaataaagcacttattttacacgctgatcatgagttgaacgcatctgcatttacagcacgttgtgcggtatcatcattgtcagatatgtactcaggtattgtagcagctgtaggttctctgaaagggccattacatggtggtgcaaacgaacaagttatgacgatgttatctgagattgggtcaattgaaaatgttgatgcttacttagatgaaaaatttgcaaataaagataaagtaatgggcttcggtcatcgtgtatataaagatggtgatcctagagcgaaatatttaagagaaatgagccgtcaaattacgaaagacgctggtcgagaagaattatttgaaatgtcagtgaaaatggaaaaacgcatggcagaagaaaaaggattaattccaaatgttgatttttatagtgcgagtgtttatcactgtatggaaatacctcatgatttattcacgccaatctttgctgtaagtcgttctgcaggatggattgctcatattttagaacaatataaagataatagaattatgcgtcctagagcgaaatatattggcgaaacgaatcgtaagtatattccgcttgaagaaagaaaataa

SEQ ID NO: 413824 - DNA, 864 bp, Staphylococcus aureus
ttggttacagagttgtcgtcattccagttacttggaatcgaaaagtataaaccacacattgctataattactaacatttattcagcgcatctagattaccatgaaaatttagaaaactatcaaaatgctaaaaagcaaatatataaaaatcaaacggaagaagattatttgatttgtaattatcatcaaagacaagtgatagagtcggaagaattaaaagctaagacattgtatttctcaactcaacaagaagttgatggtatttatattaaagatggttttatcgtttataaaggtgttcgtattattaacactgaagatttagtattgcctggcgaacataatttagaaaatatattagcagctgtgcttgcttgtattttagctggtgtacctattaaagcaattattgatagtttaactacattttcaggaatagagcatagattacaatatgttggtactaatagaactaataaatattataatgattccaaagcaacaaacacgctagcaacacagtttgccttaaattcatttaatcaaccaatcatttggttatgtggtggtttggatcgagggaatgaatttgacgagctcattccttatatggaaaatgttcgcgcgatggttgtattcggacaaacgaaaactaagtttgctaaactaggtaatagtcaagggaaatcggtcattgaagcgaacaatgtcgaagacgctgttgataaagtacaagatattatagaaccaaatgatgttgtattattgtcacctgcttgtgcaagttgggatcaatatagtacttttgaagagcgtggagagaaatttattgaaagattccgtgcccatttaccatcttattaa

SEQ ID NO: 413825 - DNA, 279 bp, Staphylococcus aureus
atggcatcatatttaaaagatgctgatgtcattgtcagtgcagttggtaagcctggtttagtaacaaaagatgttgtcaaagaaggagcagtaattatcgatgttggtaatacgccagatgaagatggcaaattaaaaggtgacgttgattatgatgcagttaaagaaattgctggagctattacaccagttcctggtggcgttggcccattaacaattactatggtattaaataatactttgcttgcagaaaaaatgcgtcgaggtattgattcgtaa

SEQ ID NO: 413826 - DNA, 351 bp, Staphylococcus aureus
gtgctttgtgaatcggattcactgctttgcattgacgctgacgttgaatcacttaatgatgttgacgacgaatcggattcacttgcgcttgctgacgtactaattgcattcgatgtactttctgatgttgagttgcttgtacttgttgagtcactgagcgatgttgacgcactttctgatgttgattcacttgcacttgttgatacactttgtgaatcagattcactctctgaaccacttaatgatgctgatgtgcttgttgaacctgattggctcgtacttttagacatacttgttgaatcgcttagtgacgttgatgtcgatgtggattcactttggcttgttgactga

SEQ ID NO: 413827 - DNA, 477 bp, Staphylococcus aureus
gtgtggtgggaaacgttacaacaagaacatcgcttgccatggactactgagacaagacaagaagcgccatttattacgatgtgtcatggtgatacagaacaatatttgtatacaaaagatttaggcgaagcacattttcaagtatgggaaaaggttgtcgcaagttatagtggttgttgttctgtagagagaattgcacaaggtacatatccttgtctttctcaacaagatgtactcatgaagtatcagccattgagttataaggaaattgaagcggttgttcataaaggggaaactgtgccagcaggtgtgacacgctttaatatttcaggacgatgtcttaatcttcaagtaccgctggcattacttaaacaagatgatgatgttgaacaactgcgcaattggaagcagtttttagcagataagtttgccaatatgagatgctatactgaaaaagtatacttggtggagcaatag

SEQ ID NO: 413828 - DNA, 216 bp, Staphylococcus aureus
atgatggaattaggtgccgatggtgtattcgttggatcaggtatttttaaatcagaagatccagaaaaatttgctaaagcaattgttcaagcaacaacacattaccaagactatgaactaattggaagattagcaagtgaacttggcactgctatgaaaggtttagatatcaatcaattatcattagaagaacgtatgcaagagcgtggttggtaa

SEQ ID NO: 413829 - DNA, 216 bp, Staphylococcus aureus
atggatgatttaagaaaaatcaaccaagaattaggcatcacaattttaattaatttacattttgttgacttggcaaaagaatatggcacacgcatcattggtttacgtgatggtgaagttgtctatgatggtcctgcatctgaagcaacagatgacgtatttagtgaaatatatggacgtacaattaaagaagatgaaaagctaggagtgaactaa

SEQ ID NO: 413830 - DNA, 1173 bp, Staphylococcus aureus
atgaaaatagcaactctgaacaaaggcaaagaaacaaaatattttaatggatatcctttaattgaagaagaggatatctattcacaagatcatttaaaagaaggagatatttttcaaattgtgactgataaatcacaatatgttgcaacggcttatgttggtcgccaacataaaggattaggttgggttcaaacatacgataaagctcaagaaatcaacacagctttctttgtgaaattatttaatactgcattagcagaacgtgattattattttaatatagatggaacaaatgcttttagattatttaatgctgaaggtgatggagttgggggattaacgatcgacaattacgatggtcatttgttgattcaatggtactcaaaaggtatttataaatttaaatatgccattcttgaagcggttagaaaagtatttgattataaatctatatacgaaaaagtaagatttaaagacagcgaatatagtggtggttttgttgaaggcgatgcacctgagtttccaattgttatcgaagaaaacttcacattttacaatgtagaccttgaagatggtttgatgacaggtatctttttagatcaaaaagaagtgcgcaagaaattaagggatcaatatgccaaagaacgccatgttttaaacttatttagttatacaggtgctttttctgtaatagcagcaagtgaggcatcttcaacaacaagtgtagatttggctaatcgttctcgtagtttaactgaagaaaattttggattaaatgctattgatcctaaatctcaatatatttatgtcatggacacttttgatttctataaatatgctgcacgtcatggacatagttatgacacgatcgtgattgatccacctagctttgcacgcaacaaaaaacgtacattttcagtgcaaaaagattatgacaaattaattactggcgccttaaatatcttatcatctgaaggaacattattattatgtacaaacgcaagtgtatatccattaaagcaatttaaaaatactattaaaaagacgcttgaagagaatggcgttgattatgaattaactgaagttatgggattaccaaaagattttaaaacacatccacattataagccatctaaatatttaaaagctgtttttgtaaatattagacattaa

SEQ ID NO: 413831 - DNA, 192 bp, Staphylococcus aureus; identical to SEQ ID NO: 410719

SEQ ID NO: 413832 - DNA, 537 bp, Staphylococcus aureus; identical to SEQ ID NO: 407402

SEQ ID NO: 413833 - DNA, 534 bp, Staphylococcus aureus; identical to SEQ ID NO: 413144

SEQ ID NO: 413834 - DNA, 294 bp, Staphylococcus aureus; identical to SEQ ID NO: 408498

SEQ ID NO: 413835 - DNA, 1935 bp, Staphylococcus aureus; identical to SEQ ID NO: 409387

SEQ ID NO: 413836 - DNA, 312 bp, Staphylococcus aureus; identical to SEQ ID NO: 408496

SEQ ID NO: 413837 - DNA, 627 bp, Staphylococcus aureus; identical to SEQ ID NO: 409389

SEQ ID NO: 413838 - DNA, 306 bp, Staphylococcus aureus; identical to SEQ ID NO: 413146

SEQ ID NO: 413839 - DNA, 300 bp, Staphylococcus aureus; identical to SEQ ID NO: 413147

SEQ ID NO: 413840 - DNA, 546 bp, Staphylococcus aureus; identical to SEQ ID NO: 412734

SEQ ID NO: 413841 - DNA, 186 bp, Staphylococcus aureus; identical to SEQ ID NO: 409375

SEQ ID NO: 413842 - DNA, 276 bp, Staphylococcus aureus; identical to SEQ ID NO: 409377

SEQ ID NO: 413843 - DNA, 264 bp, Staphylococcus aureus
ttgattacagtatttacaggacgttctggttcaggtaagtcatcactggttttcaataccatagctgctgagtccgaacaacttttaaatgaaagttattctagctatattcaattccatttaaatcagcaacctaaaccaaaagtaaaagaaattaaaaatcttcctatagccataacgattagtcaaaaaagatttaatggtaattcgcgctctactgtaggtagagtgtctgatatctatgcctctgttagattgttataa

SEQ ID NO: 413844 - DNA, 720 bp, Staphylococcus aureus; identical to SEQ ID NO: 411654

SEQ ID NO: 413845 - DNA, 258 bp, Staphylococcus aureus; identical to SEQ ID NO: 410863

SEQ ID NO: 413846 - DNA, 597 bp, Staphylococcus aureus; identical to SEQ ID NO: 411616

SEQ ID NO: 413847 - DNA, 318 bp, Staphylococcus aureus; identical to SEQ ID NO: 410185

SEQ ID NO: 413848 - DNA, 1698 bp, Staphylococcus aureus; identical to SEQ ID NO: 411618

SEQ ID NO: 413849 - DNA, 525 bp, Staphylococcus aureus; identical to SEQ ID NO: 406840

SEQ ID NO: 413850 - DNA, 729 bp, Staphylococcus aureus; identical to SEQ ID NO: 411620

SEQ ID NO: 413851 - DNA, 1428 bp, Staphylococcus aureus; identical to SEQ ID NO: 411622

SEQ ID NO: 413852 - DNA, 1464 bp, Staphylococcus aureus; identical to SEQ ID NO: 411623

SEQ ID NO: 413853 - DNA, 4500 bp, Staphylococcus aureus; identical to SEQ ID NO: 411624

SEQ ID NO: 413854 - DNA, 885 bp, Staphylococcus aureus; identical to SEQ ID NO: 411625

SEQ ID NO: 413855 - DNA, 1113 bp, Staphylococcus aureus; identical to SEQ ID NO: 411626

SEQ ID NO: 413856 - DNA, 783 bp, Staphylococcus aureus; identical to SEQ ID NO: 411627

SEQ ID NO: 413857 - DNA, 486 bp, Staphylococcus aureus; identical to SEQ ID NO: 411628

SEQ ID NO: 413858 - DNA, 396 bp, Staphylococcus aureus; identical to SEQ ID NO: 411629

SEQ ID NO: 413859 - DNA, 270 bp, Staphylococcus aureus; identical to SEQ ID NO: 411630

SEQ ID NO: 413860 - DNA, 1005 bp, Staphylococcus aureus; identical to SEQ ID NO: 411631

SEQ ID NO: 413861 - DNA, 843 bp, Staphylococcus aureus; identical to SEQ ID NO: 411632

SEQ ID NO: 413862 - DNA, 660 bp, Staphylococcus aureus; identical to SEQ ID NO: 411633

SEQ ID NO: 413863 - DNA, 1026 bp, Staphylococcus aureus; identical to SEQ ID NO: 411634

SEQ ID NO: 413864 - DNA, 915 bp, Staphylococcus aureus; identical to SEQ ID NO: 411636

SEQ ID NO: 413865 - DNA, 1338 bp, Staphylococcus aureus; identical to SEQ ID NO: 411637

SEQ ID NO: 413866 - DNA, 735 bp, Staphylococcus aureus
atgagaattaaaacaccgagtccatcttatttaaaaggcacaaatggacatgcgatattattattacattcatttacaggtacaaatcgggatgttaagcatcttgcagctgagttaaatgaccaaggatttagttgttatgcaccgaattatccaggtcatggtttattgttgaaagatttcatgacatataatgtagatgattggtgggaagaagttgagaaagcttaccaatttttagtcaatgaaggttatgaatctatcagtgcaacgggtgtgtctttaggtggattaatgacattaaaattggcgcaacactatcctttgaaacgtatcgctgtcatgtcagcaccaaaggaaaagagtgacgatggcttaatagaacatttagtttattatagtcaacgcatgtcgaatattttaaatttagatcagcaagcatcgagtgcgcaattagcagcaattgatgattatgaaggtgaaattacgaagtttcaacattttattgatgatatcatgacaaatttaaatgttattaaaatgccagctaatatattatttggtggtaaagatgcgccatcctatgaaacaagtgcacactttatttatgaacatttaggatcagtagacaaagaattaaatggtctgaaggattcgcatcatttaatgacgcatggagaaggcagagatattttagaagaaaatgttattcgctttttcaatgctttaagataa

SEQ ID NO: 413867 - DNA, 675 bp, Staphylococcus aureus; identical to SEQ ID NO: 411639

SEQ ID NO: 413868 - DNA, 363 bp, Staphylococcus aureus; identical to SEQ ID NO: 411640

SEQ ID NO: 413869 - DNA, 2706 bp, Staphylococcus aureus; identical to SEQ ID NO: 411641

SEQ ID NO: 413870 - DNA, 1485 bp, Staphylococcus aureus; identical to SEQ ID NO: 411642

SEQ ID NO: 413871 - DNA, 195 bp, Staphylococcus aureus; identical to SEQ ID NO: 410129

SEQ ID NO: 413872 - DNA, 309 bp, Staphylococcus aureus; identical to SEQ ID NO: 411645

SEQ ID NO: 413873 - DNA, 324 bp, Staphylococcus aureus; identical to SEQ ID NO: 410127

SEQ ID NO: 413874 - DNA, 417 bp, Staphylococcus aureus
atgtatgtggttaatccagaactacccgagcggtataaatatgaaactgactatagaaaaatacccagagagtaccttaatagcaatattcctaagggaagagataaagtcaaatgggctccatttaagacggtatctgaccaatataagttgttagacgaatatatagaagaacaaaacaaggttgaaatgcctttgttgtctgacgatcaattacagatacttaacgaaacagtttactacaacagtatgaacaatattcttacagaattaagttattgggataacggctatataaattcaatggaatgctatataaacaaagttgacttgttagaacgtgtaattgtagttactagtaaaaataaagaaaccaaaacaaaaatttcacttaataccattgtaagtattaagtga

SEQ ID NO: 413875 - DNA, 438 bp, Staphylococcus aureus
atgagaatatcaatgcaagatataaaagttgattatcaaaatattataaaacagtctgagaaggataaacttcaagcatattttttagggctattaatcatggtgcttttgattatagaaaatatatttcatatggttttaaatgtaagtatgtttcctttgattattttaactagcatagtaggattacttattaacgcaaatatatatgttaaaatacgtgggaataaagaattgaaaaatcttatatgcacagcaacgcataatgacatagatttagaacatcttatgaatatgaatcaagatgaccttaaaaaaattgaatggattaaattaagtaaatcagaatatgtacttgattatgttagattaggtatgtgtgtttatacatgcgtcgcattgtgttttcctagcgtaatggtaacttatttcacttaa

SEQ ID NO: 413876 - DNA, 195 bp, Staphylococcus aureus
atggtaacatacattcaaaatatagaagaattgaaaaaatatgaaaaaagaaaaatcagcgaaagtaggaaatatcgaggacgtataccaaagaaaaaaagaattaggaataaaatacaaaagcaaagagaaattgaaaaaatgagaaaattttatatggatgaatttcatcttactggtgttaataagaaataa

SEQ ID NO: 413877 - DNA, 990 bp, Staphylococcus aureus
atgtctgaacaaagatttaatatccaacaacaatatagagagaaattttaccaactaccaaaagtattttttactaacgaaaaatatatgcaattaagtaatgatgcaaaaattgcttatgcattgttaaaggatagactagaattatcaattaaaaataattggtttgatgaaaatggtgatatatttttcatcttcacaaacgaaaatcttaaaactatattaaattgtcacgatggaaaattaacaaaaattaaaaaagaattatctaaagctgatcttttagaacaagtcagatgtggtcaaggtaaaccaaacaaattatacttgaagaatcctacaattactaaagaagatgtttacgaattaaaaaaacaagaagaaacaagtgttgaacctagtaatgacgctgaaatgcgattttcgcatttcttgaaatgcgaaaatcgcatttctagaaatgctgaaatcgcacaacaagaaatgcgaaaatcgcacactaatgatactgatttaagtaatactgaatatattgatactgacaataatgatatgaatgacttgaatgatatagagttcaaaaataaaattagtaatcattcaaatcattcacatcatgattcactaaattctgatgaagaagctttgaaattcacagaacttcaagaattccctgaacaatcaaaacactatcttaataatttttcttatagagaactcaaagtagtaaaagaaattattttaaaagcaaagaaatcgtttaatactgaacataacacaacttatatgctagaagatatcgattatgaccttgtaaatgttttaaaacgctttaaatcaaaagtttatacgaaaaatgaaagtgttgagactatgcaaggatatttgatgaaatgtataaaaatggaacttgaagaattacattcattaaacatgcgaaaaaagaattttaaaaatagtttttggaatatttttagccaaaatgattaa

SEQ ID NO: 413878 - DNA, 255 bp, Staphylococcus aureus
atggaaacaagagatattaaaataagaagcgttgatgtagaaactataaagagaattgaccgaatggcaaagcaaaaaaacatatcaaggaacgaatttttattggacataatagaacagattgatccattagaatgttaccgaagtttgtatgccgaacaatcacaccaacaagcacaaaatacgaaagctttaaaagaattagcggataaaatagaccgagtttataacactattaatgatttagaatattaa

SEQ ID NO: 413879 - DNA, 735 bp, Staphylococcus aureus; identical to SEQ ID NO: 407375

SEQ ID NO: 413880 - DNA, 477 bp, Staphylococcus aureus; identical to SEQ ID NO: 407374

SEQ ID NO: 413881 - DNA, 540 bp, Staphylococcus aureus
atggtacattacctagacgatgaaggtaccatggcagttgtactcccacatggtgtcttattccgtggtgctgcagaaggcgtgattcgtcgttatttaatcgaagaaaagaactacttagaagccgtgattggcttaccagcgaatattttctatgggacaagtattccaacatgtattttagtatttaaaaaatgtcgccaacaagacgataacgtactatttatcgatgcatccaatgattttgaaaaaggaaaaaatcaaaaccatttaagcgatgcccaagtcgatcgtattatagccacatataagcgtaaagaaacgattgataaatatagctacagcgcgacattacaagagattgccgataacgattacaacttaaacataccgcgatatgttgatacattcgaagaagaagcaccgattgatttagatcaagtccaacaagatttgaaaaatatcgacaaagaaatcgcagaaattgaacaagaaatcaatgcatacctgaaagaactaggggtgttgaaagatgagtaa

SEQ ID NO: 413882 - DNA, 183 bp, Staphylococcus aureus
atgttaagttatggtggattgcttaaacaaaagcataaaattttaaatttagatgacgctgaagatggtaatttgattaacacaagtgatgaagataaaacgaccgttgaagaagaaaaagcacattcgattacagcgatttggaatttcgaaaagcaaaattattatttaagacatcagtga

SEQ ID NO: 413883 - DNA, 396 bp, Staphylococcus aureus
atggctaaaaataagaaaacgaacgcgatgcgtatgcttgatcgtgcaaaaattaaatacgaagttcatagctttgaggtaccagaagaacatttatctggccaagaagtcgcagaacgcatacaagcaaatgttaaaacagtatttaaaacacttgttctagaaaatgcaaaacatgaacattttgtatttgttatcccagtaagtgaaactttagatatgaaaaaggcagctgctatggttggagagaagaaattgcaacttatgcctttagataatttaaaaaatgtaacgggatacattcgtggtgggcttcgaacaatgcaaatcacgatagctgttgaggatttgattacaataactaaaggcaaaattggagcagttatccatgaatga

SEQ ID NO: 413884 - DNA, 978 bp, Staphylococcus aureus
atgattacagataggcaattgagtatattaaacgcaattgttgaggattatgttgattttggacaacccgttggttctaaaacactaattgagcgacataacttgaatgttagtcctgctacaattagaaatgagatgaaacagcttgaagatttaaactatatcgaaaagacacatagttcttcagggcgttcgccatcacaattaggttttaggtattatgtcaatcgtttacttgaacaaacatctcatcaaaaaacaaataaattaagacgattaaatcaattgttagttgagaatcaatatgatgtatcatcagcattgacatattttgcagatgaattatcaaatatatctcaatatacaactttagttgttcatcctaatcataaacaagatattatcaataatgtacatttgattcgtgctaatcctaatttagttataatggttatcgtattttcatcaggtcatgttgagcatgtacatcttgcttcagacatgccgtttagtaatgacaaactaaatacaatatcaaattttgttactaacaaactaactgagtttaatcagaatttacaagatgatattgtctcttttgttcaatcagagcaggaagaaatatttatcaataaattgttaaatacgatgaataatcatatttctaatcaaagtaatagcatttatatgggtggaaaggttaaacttattgatgcattgaatgaaagtaatgtatcttcaattcagcccattctacaatatatagaatcaaatagaattgcagaattattacaagatatatcttcaccaaatattaatgtaaaaattggtgatgaaattgatgacagcttgagtgatatttcaattgtaacaagtcaatatcattttgatgaaacgttaaaaggtcaaattgctgtgattggacctacagctatgcattatcaaaatgtcattcaattattaaatagaatttggtaa

SEQ ID NO: 413885 - DNA, 786 bp, Staphylococcus aureus; identical to SEQ ID NO: 408607

SEQ ID NO: 413886 - DNA, 192 bp, Staphylococcus aureus; identical to SEQ ID NO: 404921

SEQ ID NO: 413887 - DNA, 696 bp, Staphylococcus aureus
atgacagtattaacagataaagtagcagtagttacaggtgcaggtagtggtattggagaagcaatcgcaacattactacatgaagagggtgtgaaagtcatcttagccggtagaaataaagataaactacaaaatgtggcgaatcaattagctcaagatagtgtgaaggtagtgccaacagatgtaacgaaaaaagaagaagtcgatgaattgataaaaattgcacaacaaacattcggtggtttggatattgtcatcaatagtgcggggcaaatgttgtcgtctaagattactgattatcaagtagatgagtgggatagcatgattgatgtgaatatcaaaggcactttatacacggcacaggctgcattaccaactatgttagaacaatcaagtggccatcttattaacattgcatctatttctggctttgaagtaacgaaaagcagtacgatttatagtgcgacgaaagcagcagttcacactattactcaaggattagaaaaagagttggcaaagacaggcgttaaagtaacaagcatttcaccaggaatggtagatacagccataactgccgcatacaatccaacagaccgtaaaaaacttgaaccacaagatattgcagaagcagtattatatgcattaacacaaccaaagcatgttaacgtgaatgaaattacagtgcgtcctgtataa

SEQ ID NO: 413888 - DNA, 303 bp, Staphylococcus aureus
atgtgtcataaagtacgtccggataatccggagaatgtcattcgttcggaaacgtcaagacaaatatgtccgcattcgattcaaccacagtttacgacgcaacgacgcattggttcagtaaccgttgataatttgaataacggacgttatcaaggtgaaatgcaaattgtgagacaaacgcttagtgcacatgacaatgtgaatgttgttgcacaaattattaaagaagacttaccactgttaagttgtatcgagccgaatgatacatttgattttcaaaaaactagggagtgtaagaagtga

SEQ ID NO: 413889 - DNA, 249 bp, Staphylococcus aureus
atgtttgatgagttaagagaaacttttaaaaaagagggtcttgaaccatggacatcatgcgaattcgattttacaagagagggtaaattaaacgtatcttttgattatatagattggattaaattaggttttggtccatcaggaaaggaaaactactatatgtataaaaagtttggtgttttaccagaaacggaatatgaaattaataaagttaaagaagtagagaagtatgttaaagagcaagagtag

SEQ ID NO: 413890 - DNA, 1017 bp, Staphylococcus aureus
ttgttaaaattatactataaattcaactttgcaacagaaccgaaaaagggttatgaaggtaaatatactattctacgagaatactgtaaaaataaaaaacaaaatgagactaaaaaagcaactatacgcgtagaaactaatcccggtatagctgctcaagtagactggaaagaagatatggtaatgcatgataagtttggcagaacttatcaattcaacatctttctttacgttctacactattcaaaaatgaagtatatcacattaacttgggatagaaaacaagataccttatttgaatgtttaaaagacgcttttgaatacaccgaaggggttccaaaagaaatctggttcgataatatgagaactgtagttgatcgaccgagaacacaatataaaaaagtcgtttttaataatttattttatcaatttagtaaggatgccaactttgaacctattgcttgtagaccctatcgccctcaaacaaaagggtctgttgaatcattagctaaatttgttgaacagcgcttaagaccctatgattatgaattttatgatgctgtagaacttattgagctagtagacgatttatgtcacgaattgaatcacttagaaatttcacaagtaacagaacaacgacctatcgacgttttcaattatgaagaaaaagaacatttaaatttttttaatgccaagttactagatacttacatcgaaaatgagtgtataagaatcgtttctaaagaaccgatgattaactttagaaaaggtaaatactcggtacctactaaatacattggtgaagaagtacaagtgatattcaacaattctactgatgaattgctgatttattatgatggtgaattaataagacggcataatctatccgaaagaaaatttaattatatcgttgaagatatgagtgaaatattaaaatcagatgtatttaaacataaggatgacaaagaaattcttacgtatatagaaaattcattattactgtatgacgaaatttag

SEQ ID NO: 413891 - DNA, 618 bp, Staphylococcus aureus; identical to SEQ ID NO: 408623

SEQ ID NO: 413892 - DNA, 207 bp, Staphylococcus aureus
atgtcacgtccgtttttaaatcaagttgaaaataatggcattgcacatacagtagcttatgtagaatcatttattgaacacatgaaatcaataatgacgatgttagatgctaaaaatattgacgacttaacacaaaaacaaatcgtatttagtccggaaatattgtcatggatagaacaacgtagcttgaatatacatcgaggataa

SEQ ID NO: 413893 - DNA, 444 bp, Staphylococcus aureus
gtggaaagacaacaaacttacaaagaaaaagcgcaacacctatataaagttaaaaaaatcaaaaatagatataatacgaaaagtgcagaagaatattttttctcgattcctcaagtaaaatacattctttcagcaggaagaatgaaaaaacataaagagaattataatgcttcagagataaaaataaaaaaagcagctttagaaaagagtaggaagaataagaattggaaaattgaagaacgtttaataaaagctaagagatatactcaaaaagttgatccagaatacttaaatatttatatgaaagcttatcataagaaagatataactacagaagaaaaactagaaattctaacggaattaaaaaaatttgatacagaaaatatagtgcgtttttttagattttcaaagtattctatttcaaaactaacccaatcagattga

SEQ ID NO: 413894 - DNA, 594 bp, Staphylococcus aureus
ttgacaaatcaacttattaaaaagttatttagtagaaatgcagtaagtgttgtgagtatgttagtgattatgttaattctactttgttttaccttttataatataaactactatttattccaattaagcgaccttgatgccttaccgtcattagatcgaatggcgtctatttttgaagaggggtttgcatcattaaatgatagtggatctgagcgaagtgttgtatggataaatgccatttcagtaattaaatatacattaggttttggtgttggcttagtggattatgtacatattggctcgcaaattaatggtattttacttgttgcccataatacatatttgcaaatttttgcggaatggggcattttattcggtgcgttatttatcatatttatgatttatttattatttgaattatttagattcaatatttctgggaaaaatgtaacagcaattgttgtaatgttgacgatgctgatttactttttaacagtatcgtttaataactcaagatatgtcgcttttattttaggaattatcgtctttattgttcaatatgaaaagatggaaagggatcgtaatgaagagtga

SEQ ID NO: 413895 - DNA, 870 bp, Staphylococcus aureus; identical to SEQ ID NO: 408584

SEQ ID NO: 413896 - DNA, 420 bp, Staphylococcus aureus
gtgactcagatagcgactcagactcagatagcgactcagattcagacagtgattcagactcagatagcgactcagactcagatagcgactcagactcagacagtgactcagattcagatagcgactcagactcagacagtgactcagattcagatagcgattcagactcagatagcgactcagactcagacagtgactcagattcagatagcgattcagattcagacagcgattcggactcagatagcgattcagactcagatagcgattcagattcagacagcgattcggactcagatagcgactcagattcagatagcgactcagattcagatagtgattcagattcagacagcgactcagactcagatagcgactcagattcagatacaggaaaacatatacctgttaaaccaatga

SEQ ID NO: 413897 - DNA, 429 bp, Staphylococcus aureus
atgtcaataccaattaatttacctacaaacagtactatgattaatgaattatgtacattacaaagtagaactataaacataaaaggagaagtgctaataactgaaatatatgatgattactttttaaaaaatgatgaatggcacatttcagcttttaacaagttcgagcaatttcaagatagtatcaagaactataaagacaaaagaaaaaatattttctttaggattaaaagtgaaaatttgaatttagaatttaaatacctttttttgaaacttatagttaaagaggattggtctttatctaatgtatttaatactggagcagtgaaacttaacaagattgctgagttctttaatgaagtttatccaaatttaaattctttactagattgtgatattaatatgttagaaaagtactggtgtcaatag

SEQ ID NO: 413898 - DNA, 411 bp, Staphylococcus aureus
gtgtatacttatactattaaaattagaaatgagattattatgaaaatagtagaagtaaaatctaagaatggtatcaattttatgattttagatggtaataatgaacctatagtagatgcagtaagatatttgaagtatctggatagtgttaataaaagtttaaataccaagaaaacctatgcctatgcactaaaaaaattttttgtttacttagaaagtaaaaagatatgctataaagaagttagttttgataactttgttgattttataagatggatgaaaacaccttttgaatatgagaatgtcctctcttatcaccgaaaaggaaaaagcattagtcctaagacaattaatctgactattactgtagtatctaattttatgattatctctataggagcaaaaaattag

SEQ ID NO: 413899 - DNA, 315 bp, Staphylococcus aureus
atgttggataaagagttaatgggaaatgttgacaaaagaaggaagaaacaaggtttaacagtgagacaaataggatatttactgggtttctctgacacttattttattaagttaagaaatggttcaagaagaataactgatcagaagagagatagaattaatcgttatttaaacggagaatacgacaatgtaaaaatccctaaatattcaagagattctgaacaagtagcatatgacaaagggtataaacaagctttaaaagatttagaagaatttataaaaaataaaaaaactgctacttgcgacaacaagtaa

SEQ ID NO: 413900 - DNA, 225 bp, Staphylococcus aureus
gtgaagagaaaaattaaaaatccaataatagtattcattatttttacggctattattccaataattttagctgtaggcatgatttatttacctctagtaattaaagttacaggagatgcgaatgaatggcttggattttgggggagttatcttggtggaatcataggaacactaggtgttcttgttgtggctcatcttcagcacaaagaacaaaaaaatttttaa

SEQ ID NO: 413901 - DNA, 549 bp, Staphylococcus aureus
atgaaaaagaaaaattggatttatgcattaattgtcactttaattattataattgccatagttagtatgatattttttgttcaaacaaaatatggagatcaatcagaaaaaggatcccaaagtgtaagtaataaaaataataaaatacatatcgcaattgttaacgaggatcaaccaacgatatataacggtaaaaaggttgagctgggtcaagcatttattaaaaggttagcaaatgagaaaaactataaatttgaaacagtaacaagaaacgttgctgagtctggtttgaaaaatggcggataccaagtcatgattgttatcccagaaaacttttcaaaattggcaatgcaattagacgctaaaacaccatcgaaaatatcactacagtataaaacagctgtaggacaaaaagaagaagtagctaaaaacacagaaaaagttgtaagtaatgtacttaacgactttaacaaaaacttggtcgaaatttatttaacaagcatcattgataatttacataatgcacaaaaaatgttggcgctattatga

SEQ ID NO: 413902 - DNA, 174 bp, Staphylococcus aureus
atgaaaattttagctattgttagacgagtattaaaagaaatgttacgtgataaacgtacacttgcgctaatgtttctagcaccaattttaatattgacgcttatgtattttatttttaacggtgatgaaaacgatttaaaatcggtatcgatacatctgtttcatcaaatataa

SEQ ID NO: 413903 - DNA, 387 bp, Staphylococcus aureus
atgagtgctagtttgtacatcgcaataattttagttatagcaattattgcttatatgattgttcaacaaattcttaacaagcgagctgttaaagaattagatcaaaatgaattccataatgggattagaaaagctcaagtcatcgatgttagagagaaagttgactatgactacggtcacattaatgggtctcgcaatattcctatgacaatgttcaggcaacgattccaaggattaagaaaagaccaaccggtatacttatgtgatgccaatgggattgctagctatagagccgctcgtattttgaaaaagaatggatatacagatatctatatgttaaaaggcggctataaaaaatggactggaaaaataaagtctaaaaaatag

SEQ ID NO: 413904 - DNA, 831 bp, Staphylococcus aureus
atgactgaaacttggaattttattaatacaggaagtaaagacccatattataatatggcaatggatgaagcgttattaaattttgtctctagaggtgaaattgatccagttatacgtttttacacatggaatcctgcaacattatcaataggttatttccaaaggctacaaaaagaaattgatattgataaggttaaagagaaaggttttggtctcgtaaggcgtcaaactggtggccgtggggtgcttcatgataaagagctaacttacagtgtgatagtgcctgaatcgcatcccaatatgccttctactgttacagaagcgtacagagtgatttcacaaggattattagaaggatttaaaaacttaggatttgatacttattttgcggtacctaaaacgcctgaagagcgtcaaaaattaaaacaacctcgaagttcagtgtgttttgatgcaccaagttggtatgagctagttgttgaaggccgtaagattgctgggagtgctcaaacgagacaaaagggcgtaatcctccaacacggttcaattttacaagatattgatattgatgaattgtttgatatgtttatttataaaaatgaaagattaaaattaaaaatgaaagaggcattcgttgaaaaagcagttgccatcaatgatatttcagatgaacacattactattagtcaaatggaagaagctttcgagaaaggttttaagaaaggtttaaatatagaattaaagccacttgaattaacagaagctcaattggcagaagtggaagaattaactgaaaaatatcgttcagatgaatggatgtttagaaagtag

SEQ ID NO: 413905 - DNA, 219 bp, Staphylococcus aureus
atgcgtaatataatattttaccttgtacttattattgctgcgattggattagtaatgaatctagatgcctttattttttcaatcgtcagaatgttagtcagctttgcagtaatagctggtattatttatctgatttattatttcttcatcttgactgaagaccaacgcaaatatcgcaaagcaatgcgtaagtataaaagaaatcaaagaagaaaatag

SEQ ID NO: 413906 - DNA, 582 bp, Staphylococcus aureus
atgaaaaaattggtttcaattgttggcgcaacattattgttagctggatgtggatcacaaaatttagcaccattagaagaaaaaacaacagatttaagagaagataatcatcaactcaaactagatattcaagaacttaatcaacaaattagtgattctaaatctaaaattaaagggcttgaaaaggataaagaaaacagtaaaaaaactgcatctaataatacgaaaattaaattgatgaatgttacatcaacatactacgacaaagttgctaaagctttgaaatcctataacgatattgagaaggatgtaagtaaaaacaaaggcgataagaatgttcaatcgaaattaaatcaaatttctaatgatattcaaagtgctcacacttcatacaaagatgcaatcgatggtttatcacttagtgatgatgataaaaaaacgtctaaaaatatcgataaattaaactctgatttgaatcatgcatttgatgatattaaaaatggctatcaaaataaagataaaaaacaacttacaaaaggacaacaagcgttgtcaaaattaaacttaaatgcaaaatcatga

SEQ ID NO: 413907 - DNA, 1062 bp, Staphylococcus aureus
atgagcagaataacacaagtgcatcgtattttaaaacaaaaacatttagatgcgattatcattctttcggattacaatagaagatatttatcaggttttactggtaccagtggagcacttatcatatctaaagataaacaatatttgataacagactttagatatattgatcaagcaactaagcaggcgccaaattatgaaattattaatcgtaaatctactattattggtgagattaaagaattgctacaccaagaaaattttgaaaatgtaggttttgaggggcaccatgtaagttatgatacataccttgaattaaataaaagccgtatatcattaataagcatttctaatactgtagataaaattagagacgtcaaagatgctgacgaaattgctttaattcaaaaagcagctaatattgttgatgaaacatatgaatatattttaactgttgtaaaagcaggtatgaccgaaaaagaattaaaggcaatattagaaagtaaaatgctagaattaggagcagatggaccatcattcgatacgattgtagcatctggtcatagaggtgcattaccacatggtgttgcaagtgacaaagttatcgaaaaaggcgacatgattacattagattttggcgcgtattataacggctattgttcagatattactagaacatttgctattggagaaccagatcctaaactgaaagaaatatatcaaatagtacttgaatctcaaatgaaagcaattaatgagattagacctggcatgactggtgcagaagctgatgccatttcaagaaactatttagagtcaaaagggtatggaaaagaatttggacattcactaggacatggtattggtttagaaatccatgaagggccaatgctggctcgtacgatacaagataaacttcaagttaacaactgtgttacagtagaacctggtgtttatatagaaggtttgggcggtataagaatagaagatgatattttaattacagaaaatggttgtcaagtctttactaaatgcacaaaagaccttatagttttaacataa

SEQ ID NO: 413908 - DNA, 558 bp, Staphylococcus aureus
atgatttcggttaatgattttaaaacaggtttaacaatttctgttgataacgctatttggaaagttatagacttccaacatgtaaagcctggtaaaggttcagcattcgttcgttcaaaattacgtaatttaagaactggtgcaattcaagagaaaacgtttagagctggtgaaaaagttgaaccagcaatgattgaaaatcgtcgcatgcaatatttatatgctgacggagataatcatgtatttatggataatgaaagctttgaacaaacagaactttcaagtgattacttaaaagaagaattgaattacttaaaagaaggtatggaagtacaaattcaaacatacgaaggtgaaactatcggtgttgaattacctaaaactgttgaattgacagtaactgaaacagaacctggtattaaaggtgatactgcaactggtgctactaaatcggcaactgttgaaactggttatacattaaatgtacctttatttgtaaacgaaggtgacgttttaattatcaacactggtgatggaagctacatttcaagaggataa

SEQ ID NO: 413909 - DNA, 465 bp, Staphylococcus aureus
atgaactttaaagaaatcaaagaattaattgaaattctggataaatcaactttaacggaaatcaatattgaagatactaaaggcaaagtgacgcttaagaaagaaaaagaaactgagattatcacgccacaaatctcacaaatgccagttgaagctgcggcaatgcctatgcctcaagtacaatcaactgatagcaataaaactgaagctccaaagccaacttcagacaatcacaaaacaattaatgcacctatggtaggtacattttacaaatcgccatctccagatgaagaagcgtatgttcaagttggggacactgtttcaaatgaaacaacagtgtgtattttagaggcaatgaaactatttaatgaaattcaagcagaaatttcaggtgaaattgttgaaatcttagtagaagacggacaaatggtagagtatggccaaccgttatttaaggtgaaataa

SEQ ID NO: 413910 - DNA, 1356 bp, Staphylococcus aureus
atgaaaaaggttttaattgcaaaccgcggtgaaatcgcagttaggattattcgcgcttgtcgtgatttaggcatccaaactgttgcaatctattctgaaggggataaagatgcgctacatactcaaattgctgatgaagcatattgcgtaggtcccactttgtctaaagattcatatttaaatattccgaatatcttatctattgcaacttctacaggttgtgatggcgttcatccgggttatggctttttagctgaaaatgctgactttgcagaattatgcgaagcatgccaattgaagttcattggaccaagttatcaatctatccaaaaaatgggtatcaaagatgttgctaaggcagaaatgatcaaagccaatgttccagttgttcctggtagtgatggtttaatgaaagacgtctcagaagctaagaaaatcgctaagaaaattggctatccggtcatcattaaagctactgctggtggtggtggaaaaggtatccgtgttgctcgtgatgaaaaagaacttgaaactggcttccgaatgacagaacaagaagcacaaactgcatttggtaatggtggactttatatggagaaattcatcgaaaacttccgccatattgaaatccaaattgttggggacagctatggtaatgtaattcatttaggagaacgtgattgtacaattcaaagacgtatgcagaaattagtggaagaagcaccttccccaattttagatgacgaaacacgtcgtgaaatgggaaatgccgcagttcgtgcagcgaaagctgtaaattatgaaaatgcgggaacaattgagtttatatatgatttaaatgataataaattttattttatggaaatgaatacacgtattcaagtagaacatcctgtaactgaaatggtaacaggaattgatttagttaaattacaattacaagttgctatgggtgacgtgttaccgtataaacaagaagatattaaattaacaggacacgcaattgaatttagaattaatgctgaaaatccttacaagaactttatgccatcaccaggtaaaattgagcaatatcttgcaccaggtggatatggtgttcgaatagagtcagcatgttatactaattatacgataccgccatattatgattcgatggttgcgaaattaatcatacatgaaccgacacgagatgaagcgattatggctggcattcgtgcattaagtgaatttgtggttcttggtattgatacaactattccattccatattaaattattgaataacgatatatttagaagcggtaaatttaatacaaactttttagagcaaaatagcattatgaatgatgaatgttaa

SEQ ID NO: 413911 - DNA, 363 bp, Staphylococcus aureus; identical to SEQ ID NO: 405962

SEQ ID NO: 413912 - DNA, 390 bp, Staphylococcus aureus
atgagtcgtaaagaatcccgagtgcaagcttttcaaactttatttcaattagaaatgaaggacagtgatttaacgataaatgaagcgataagctttattaaagacgataatccagatttagacttcgaatttattcattggctagtttctggcgttaaagatcacgaacctgtattagacgagacaattagtccttatttaaaagattggactattgcacgtttattaaaaacagatcgtattattttaagaatggcaacatatgaaatattacacagtgatacacctgctaaagtcgtaatgaatgaagcagttgaattaacaaaacaattcagtgatgatgatcattataaatttataaatggtgtattgagtaatataaaaaaataa

SEQ ID NO: 413913 - DNA, 1338 bp, Staphylococcus aureus
atgtcagattatttaagtgtttcagctttaacgaaatatattaaatataaatttgatcaagacccacatctccaatctgtattgattaaaggtgagctttcaaatttcaaaaagcattcaagtggtcatttatactttaatgtgaaagataaagaaagcgttataagtgccatgatgttcaaaggtagtgcttctaaattaaacttcgaacctaaagaaggagatgaggtcttattagaagcacgtgtttctgtttttgaacgtcgtggaaactatcaaatttatgtaaataaaatgcaattagatggtatagggaacttatatcaaaaattagaagcattaaagaaaaaattaactgaagaaggttgttttgataatgcgaataagaaatcaatacctaagtttcctaaaaaaattgcagttttaacagcgagtacaggtgccgcaattcgagatatccattcaacgataaatagtcgttttccattagctgaacaaatacaaattagtactttggttcaaggtgaaaaagcaaaagacgacattattgaaaaaattgaatatgcagatagtttaggtgtagataccatcattgtaggtcgaggcggtggatccattgaagatttatggaatttcaacgaagaagctgtcgtccgtgcaatatataattgtaagacaccgattatatcagcagtaggtcatgaaacagactttacattaagtgattttgctgcagacatcagagcggcgactccaactcaagctgctgttattgcaacaccagaccaatatgaattgctgcaacaaatacagcaatatcagtttacattgactcgtttcatcaagaaacatttagaacaacaacgtaaacatgttgaacatttgtcatcgtattacaagtttaaacaaccaactttattgtatgatcaacagatacaacgtcgagatgatttagaaaagagactgaaacaacaaattcaggcaacttttgaacaacagagacatcgattaatgctgttgcaacaacgctataatttaaaagcgttactaagtagtgttaatcaagaacaacaaaataatcttcaattgacaaaccaacttgttaaattattgaattctaagatattaagttataaaaatgatttgaaaaataaagtagaaaacttaaacaatttaagtccaactaacacaatgttgcgtggatatgcaattgttaataaaaaagacgaagtcattacgagtactaaagatttaacagaaaatgatcaattgacgttaacaatgaaagatggcttagtagatgcaaaagttacgaaagtaaggtgtaataatgactaa

SEQ ID NO: 413914 - DNA, 231 bp, Staphylococcus aureus; identical to SEQ ID NO: 405965

SEQ ID NO: 413915 - DNA, 882 bp, Staphylococcus aureus
atgacgaatctaccgatgaataaattaatagatgaagtcaataatgaattatcggttgcgataaataaatcagtaatggatactcagctagaagaaagtatgttgtattcattaaatgctggaggtaaacgcatccgaccagttctgttattactcactttagattcactaaataccgagtatgagttaggtatgaagagcgcaattgcactagaaatgattcatacatattcacttattcatgatgacttaccagcgatggataatgatgattatcgacgaggtaaattaacaaatcataaagtatatggtgagtggacggcgatattagcaggtgatgctttattaactaaagcatttgaacttatttcaagtgatgatagattaactgatgaagtaaaaataaaagttctacaacggctgtcaatagcaagtggtcatgttggaatggttggcggtcaaatgttagatatgcaaagcgaaggccaaccaattaatcttgaaactttggaaatgatacacaaaacaaaaacaggagcactattaacttttgcggttatgagtgcagcagatatcgctaatgtcgatgatgcaactaaagaacatttagaaagttatagttatcatttaggtatgatgtttcagattaaagatgatttattagactgctatggtgatgaagcgaagttaggtaaaaaagtgggcagcgatcttgaaaataataaaagtacatacgtgagtttattaggaaaagatggcgcagaagataaattgacttatcatagagacgcagcagtggatgaactaatgcaaattgatgaacaattcaatacaaaacacttattagaaatcgttgatttattttatagcagggatcactaa

SEQ ID NO: 413916 - DNA, 453 bp, Staphylococcus aureus
gtgcccaaaaaatcggttaggcatataaaaattagagaaattatttcaaatgaacagatagagacacaagatgaattagttaaacgattaaacgattatgatttaaatgtcactcaagcaactgtttctcgtgatattaaagaactacaacttattaaagtacctataccttcaggtcaatatgtttatagtttaccaaacgatagaaaattccatcctttagaaaaattgggacgttatttaatggattcctttgttaatatagatggtactgataatttacttgttctaaaaacattacctggtaatgcacaatctattggagctatattagaccaaatcaattgggaagaagtactaggcacaatttgtggtgatgatacttgtttaattatttgtcgaagcaaagaggcaagtgatgaaatcaagtcaagaattttcaatttgttataa

SEQ ID NO: 413917 - DNA, 1680 bp, Staphylococcus aureus
atgttacaaaccttatcaatcaagcaatttgctattattgaagagttagaaattcaattttctgatggtttaactgttttaagtggtgaaacgggttcaggtaagtcaattattatagatgcaattggacaattaattggaatgagagcttcatctgattttgtaagacatggtgaaaaaaaggctgtcatcgaaggtatatttgatattgacgagagtaaagatgctatacatatattgaaaaatatggatattgatgtagatgaagattttttattagttaaacgggaaatttttagctctggtaaaagtctttgtaaaattaataatcaaacagttactttacaagatttacgaaaagttatgcaagaattattagatattcatggccaacatgaaacgcagtctttgttgaaacaaaaataccatttaacattattggataattacgcagaatcacgttatcaagatttgttggataaatatcaccaaacttttcaaaattataaagccaaaaagaaagagttagaagatttagaatcagcagaccaagcattgctgcagcgtttagatttaatgaaattccaattagaagaattgtctgaagcacatctaaaagaaggcgaaatagagcgacttgaaatagatattaaacgcattcaaaactctgaaaaattaagcttagcgcttaataacgcacatatgacattaacggatgaaaatgctatcactgatcgtttgtatgaactaagcaaccatttgttaacaataaacgatatagttccaaacaaatatgacaaattaaaagaagatattgatcaattttattacattttagaagatgcaaaacatgagttatatgatgaaatggctaatacagaattcgacgaacaagtgttaaacgagtatgaatctcgtatgaatttgctgaataatttaaaacgcaaatatggaaaagatatttcagaattaatcgcatatcaagaaaaacttaataatgaaatcaataaaattgaaaactatgaacaaagtacatcgcagttacgagaagaaataaatgcattgtataatcaagttatagaggttggacaagcgttatctaagcagcgtcgtatagtcgctagggagttaagagaccacattgtatcggaaattcaaaacttacaaatgaaagatgcaaatcttgagatttcatttaaaaaattagaagaaccgaatattgatggaattgaatttgtagaatttttaatcagtcctaataaaggagaaccattaaaaagtttaaataaaattgcgtcaggtggagaactttctagaattatgttagcgttaaaaagcatttttgttaaatcgagaggtcaaactgcaattttattcgatgaggttgactcaggtgtatctggacaagccgcacaaaaaatggcagagaaaatgcgagatatagcagaatatatacaagttatttgtatttctcacttgccacaagttgcatcgatgagtgaccatcatttattaatttcgaaatcatcaaaagatgatcgtacaacaacacaagttcaagagttaattggcgatgataaagtagatgaaattgcacgaatgatttcaggtgcaagtgttactgatttaactcgagaaaatgcaagagaaatgatacaacacaatcaaagacatagataa

SEQ ID NO: 413918 - DNA, 1422 bp, Staphylococcus aureus
atgtcagagaaacaatatgatttagtcgttctcggtggaggtactgcaggatatgttgctgcgatacgtgcgtctcaattaggtaagaaagtggcaatagtagaacgacaactattaggaggtacttgtctccataaaggttgtattcctactaaatcgctgcttaaatctgctgaagtatttcaaacagtaaaacaggcagcaatgtttggcgttgatgtcaaagatgctaatgttaattttgaaaatatgttggcacgaaaagaagacattattaatcaaatgtatcaaggtgtaaagcatttaatgcaacacaatcacattgacatttataatggcacgggacgtattctaggtacatctatattttcacctcaaattggcacaatttctgtcgaatatgaagatggtgaatcagacttattacccaaccaatttgtattaattgcaactggttcttcgcctgcagagttgccattcttatcatttgatcatgataaaattttatctagcgatgatatattatcattaaagacgttaccatcaagtattggtattattggtggtggtgttatcggaatggaatttgcatcattgatgatagatttaggtgttgacgtaacagttatagaagctggtgaaagaattttaccaactgaaagtaaacaagcttcacaactattaaaaaaatcattgtcagcacgtggtgttaaattctatgagggaataaaactttctgaaaatgatataaatgttaacgatgatggtgttacatttgaaattacctcagacataattaaagtagataaagtgttgctatcgattggtagaaaacctaacacatcagatattggtttaaacaacactaaaataaaactttcaacatcaggacatattttaacgaacgaatttcaacaaactgaagataaacatatttatgcagctggtgattgtattggaaaattacaattggcacatgttggatcaaaagaaggtgttgtggctgtcgatcatatgtttgaagggagcccaatcccagtaaactataacatgatgcctaagtgtatttattcacaacctgaaattgcttctatcggtttaaacattgagcaagcaaaggcagagggaatgaaagttaaaagttttaaagtaccatttaaagcaattggtaaagcagtgattgatagccatgacgcaaacgaagggtatagcgaaatggtgattgatcaatcaactgaagaaattgtgggtattaatatgattggtccacatgtaacagaattgattaatgaggcatcactgttacagttcatgaatggctcggcattagaattaggactaacaacacacgcacatccttccatctctgaagtgttgatggaattaggattgaaagcagaaagtagagctattcacgtataa

SEQ ID NO: 413919 - DNA, 993 bp, Staphylococcus aureus
atgattgattataaatcattaggccttagcgaagaagacctaaaagtaatatataaatggatggatttaggtagaaaaatagatgaaagactgtggttattgaaccgtgcaggtaaaattccatttgttgtaagtggtcaaggacaagaagcaactcagattgggatggcatacgcattagaagaaggtgatattacagcgccttattatagagatctagctttcgttacttatatgggtatctcagcgtatgatacgtttttatcagcgttcggaaagaaagacgatgttaactctggtggaaaacaaatgccatcacactttagtagtagagctaagaatattttgtcacaaagttcaccggtagcaacccaaataccccatgctgttggtgctgctttagctttaaaaatggatggtaagaagaaaattgcaacagcaactgttggtgaaggtagctcaaaccaaggtgacttccatgaaggtttaaacttcgcgggtgtacacaaacttccttttgtatgtgtcattataaataataaatatgcaatttcagtacctgattcattacaatacgcagctgaaaaattatcggatagagcacttggttacggtatacatggtgaacaagtagatggtaatgatcctttagcaatgtataaagcgatgaaagaagcaagagaacgagctatttctggacagggttcaacattgattgaagcagtaacttctcgtatgacagctcattcatcggatgatgacgaccaatatcgtacgaaagaagagcgtgaagcgcttaaaaaagcagactgcaacgaaaagttcaaaaaagagttgctttcagctggcattatcgatgatgcttggttgacagaaatagaagcagaacataaagacattatcaataaagcgacaaaggctgctgaagacgcgccatatccaagcgtcgaagaagcctatgcatttgtgtacgaagaagggagtcttaactaa

SEQ ID NO: 413920 - DNA, 984 bp, Staphylococcus aureus
atggctaaattatcttatttagaggcgattcgccaggcacaagacttagcattacaacaaaataaagatgtatttattcttggtgaagatgttggtaaaaaaggtggcgtatttggtactactcaaggactgcaacaacaatatggtgaggacagagttatcgatacaccattagctgagtcaaatattgtcggaacagccattggcgcagctatggttggtaaaagaccaattgctgagattcagtttgcagattttatcttacctgcaacaaatcaaattattagtgaagccgcgaaaatgcgttatcgttcaaataatgattggcaatgcccattaacgattcgtgcaccatttggtggaggtgttcacggaggactatatcattcacaaagtattgaaagtatatttgcttcatcaccaggtttaacaattgttataccttcaacaccgtatgatgctaaaggtctattattatcttcaattgaatcaaatgatcctgttttatactttgaacataaaaaggcttatagattcttaaaggaagaagtgccagaagaatattacactgtacctttaggaaaagcagatgttaaacgtgaaggtgaagatttaacagtattttgttatggattaatggtcaattattgtttacaagcagcggatattttagcagcagacggtatcaatgttgaagtcgtagatttacgaactgtttatccattagataaagaaacaattattgatcgtgctaaacatacaggtaaagttttacttgtaactgaagataatttagaaggtagtattatgtctgaggtgtcagcgattattgcagaacattgtctgtttgaactagatgcaccaatcatgcgtttagctgctccagatgtaccatctatgccattttcacctgtattagaaaatgaaattatgatgaatccagaaaaaatcttaaataaaatgcgtgaattagcagaattctag

SEQ ID NO: 413921 - DNA, 1275 bp, Staphylococcus aureus
atggaaataacaatgcctaagttaggtgagagtgttcatgaaggtaccattgaacaatggttagtttctgttggtgatcatattgatgaatatgaaccattatgtgaagttattacagataaagtgacggctgaagtcccttccacgatatcaggaacaattacagaaattttagttgaagcggggcagacggtagctatcgatacaattatctgtaaaattgaagctgctgatgaaaagacaaatgaaacaactgaagagatacaagcaaaagtggatgagcatactcagaaatctactaaaaaagctagttcaacagtggaacagacatctacttctaaacaaaatcaaccacgaaataatggtcgcttttcacctgttgtatttaaactcgcttcagagcatgacattgatttatcacaagttgtaggtagtggatttgaaggtcgtgtaactaagaaggatttaatgtcagttattgaaaatggtggtaccacagctcaatctgacaaacaagttcaaacacaatcaacttcagtagatacatcaagtaaccaatcatctgaagacaatagtgaaaatagcacaataccagtaaatggtgtgcgtaaagcaattgcacaaaacatggttaatagtgtaacggagattccacatgcatggatgatgatagaggttgatgctacaaaccttgtgaatacgagaaaccattataaaaacaactttaaaaataaagaaggatataatttaactttctttgctttctttgtaaaagctgtagcagatgctttaaaagcatatccattattaaatagtagctggcaaggaaatgaaattgtcttacataaagacattaatatttcaattgctgttgctgatgaaaataaattatacgtacctgtgattaagcatgcagacgaaaagtcaatcaaaggtatagctagagaaattaatactttagcaacaaaagcgcgtaataagcaattgacagctgaagatatgcagggcggtacatttacggtaaataatactggtacatttggttcagtatcatcaatgggtattataaatcatcctcaagcagcgattttacaagtagaatcaatcgttaaaaagccagtagtaattaatgatatgattgcaattcgaagtatggtgaatttatgtatttcaatagatcatcgcattttagatggtttacaaactggtaaatttatgaatcatattaaacagcgtatcgaacagtatactttagaaaatacaaatatatattag

SEQ ID NO: 413922 - DNA, 438 bp, Staphylococcus aureus; identical to SEQ ID NO: 405973

SEQ ID NO: 413923 - DNA, 981 bp, Staphylococcus aureus
atgttaaagttaaatccttacaagattggatttagaacaataaaaacagcagtgggtatgactttaggtgtaattattagtaagctgttaggtttagataattatgcttcaagcgccatattagtcgtattatgtattaaacatacaaaagtacattcgctacaagcgattatttcaagattagtatcatgttttttagtattgtttttaggttcagcaatatttagtttattaggtcagagtccaattgtactcggtattatcgtattgttatttataccattaactgtcgtattaaaagtacaagaaggtgtcattacgagttgcgttatattacttcatgtttttaatgcaaaatcaattgatacacatttaattgttaatgaaacattattactgttaattggactaagtattgcatttacaatgaatttaatgatgccaagtttagacaaacagctagacgaatacaaatgtaaaattgagcaacaaattgctgatatttttagtaaatatagttatatttgcgaaaaatatgaagataccattgcgattgaatttgaagcgttacttttaaatattaaaaaggcgaagtctatcgcgttccgagatgttaaaaatcattttgttagaaacgaaaattcatactatcattattttgatatgcgagaagagcaagtggaattgttaatgagaatgaaaccgctcatcgaaagtatctgtcataaagatccacttttaaatgatgttgcgtcactgctgaaagaaattggtctaaatgtgaatagtaatgactatacagcaatgcgtttacacaatttgtatgagacgcgtttgaaattggatgaactgccattgccaacaacacacaaagcgcttaactcgagagcaagtattattcaaatattaaatgaattagaagaatatttacaaatcaaatcgcaatttggttcattgaaaatgcatagtgaagtagcttaa

SEQ ID NO: 413924 - DNA, 1134 bp, Staphylococcus aureus
atgattaatgagcaaagattacttaatacgtttttagaacttgtacaaatcgattctgagacagggaatgaatcaacaatccaacctattttaaaagaaaaattcatagcattagggttagatgttaaagaagatcaagcggctaaacatcctaaattaggtgccaataatctagtgtgtacaatgaatagtactatcgaagaaggcgaagtacctaaattatatttgacgagccatatggatactgttgtacccgcaattaatgtaaagccaattgtaaaagatgacggctacatttactctgatggtatgactattctaggtgcagatgataaagcaggattagcagctatgcttgaagttttgcaagtgataaaggaacaacaaatctcacatggacaaattcaatttgtgattactgttggagaagaatcaggtttaattggtgctaaagaattaaattcagatttgttggacgcggactttggttatgctattgatgcaagtgctgatgtcggtactacggttgtaggtgcaccgacgcaaatgttaatttcagctaaaatttttggcaaaacggctcatgcaagtacgccaaaagagggtgttagtgctattaatattgcggcgaaagcaattagtcgaatgaaattaggacaagttgatgaaataactactgcaaatattggtaagtttcatggcggttcagctacgaatattgttgcagatgaagtcatcttagaagcagaggcacgttctcacgatccagaaagaataaaaacacaagtcaaacatatgactgatgtgtttgaaactactgcatcagaattaggtgggaaagcagtagttacagtggagcaaagttatccaggatttaaaattaatgataatgaaacggttgttaaaattgcacaagaaagtgctcgtaatttaggattatctgcaaatacaattatttctggtggcggttcagacggcagtattattaatacatttggtattccttcagtcattttaggagtgggttatgaaaaaatccatacaacaaatgagagaatgccgattaaatcattgaacttgcttgcaagtcaagtgttagaaataatcaaaatagttgcgcgacaatcgaaatga

SEQ ID NO: 413925 - DNA, 1407 bp, Staphylococcus aureus
atgacacaacaaattggagttattggtttagccgttatgggtaaaaacctagcttggaatattgaatcacgcggatatagtgtatctgtatttaaccgctcaagtgaaaaaactgatttaatggttgaagaatcaaaaggaaaaaatattcatccaacatactcattggaagaatttgttaattctttagaaaaaccacgtaaaattttattaatggttcaagcaggtaaagctacggatgctacgattgatagtttgttacctttattagatgatggagatattttaattgatggtggtaatacaaactatcaagatactatcagacgtaataaagcattagcacaaagtgcaatcaactttattggtatgggcgtttctggtggtgaaattggagcgttaactggtccgtcattaatgccgggtggacaagaagaagcttataacaaagttgcagatattcttgatgcaattgctgcaaaggcaaaagacggtgcttcatgtgttacttatattggacctaatggtgctggacactatgtgaaaatggtacacaatggtatcgaatatgctgacatgcaattaattgcagaaagttatgctatgatgaaagaattattaggtatgtctcatgaagacattgctcaaacgttcaaagactggaatgctggtgaattagaaagttatttaattgaaatcactggtgatattttcatgaaattagatgaaaataaagaagcattagttgaaaaaattcttgatactgcaggtcaaaaaggtacaggaaaatggacttcaattaatgcattagaattaggtattccattaaccattattactgaatctgtatttgcacgttttatctcttcaatcaaagaagagcgcgtaaatgcttctaaagaattaaatggtccaaaagcatcatttgatggtgacaagaaagactttttagaaaaaattcgtaaagcattatatatgagtaaaatttgttcttatgcacaaggtttcgcgcaaatgcgtaaagcaagtgaagataatgaatggaatttaaaacttggtgatttagctatgatttggagagaaggttgcattatccgtgcacaattcttacaaaaaatcaaagatgcttacgataataatccaggattacaaaacttattgctagatccttactttaaaaacatcgttactgaatatcaagatgcgttacgtgatgttgtcgcaactggtgttcaaaatggtgtaccaacacctggtttctcatcaagtattaattactatgatagttaccgtgcagctgatttacctgcaaacttaattcaagcacaacgtgactacttcggtgcacatacttatgaaagaaaagataaagaaggcgtattccatacacaatggattgaagaataa

SEQ ID NO: 413926 - DNA, 372 bp, Staphylococcus aureus; identical to SEQ ID NO: 411052

SEQ ID NO: 413927 - DNA, 1020 bp, Staphylococcus aureus
atggttacgattaaagatgttgcactaaaagccggtgtttctccttcgacagtttcaagagttataaaaggaaatcaacgtattagcgaagcgacaatttcaaaagtgaagaaagttatggaagaattgaattattttcctaataccgctgctagaactttaattacaaaccaaacatataaaattggtttagtgttaaaaggttctgaggagcctattcgactgaatccattctacatcaatgtattgctaggaatttctgaaacgtgtaaccagcatggctatggtacacaaacgacagtctcaaataatatgaatgatttaatggatgaagtttataaaatgattaaacaacgaatggttgatgcgtttatactgctctattcaaaagaaaatgatccgattaaacaaatgttaattgatgaaagcatgccatttattgtgattggtaagcctacatcggatatagatcatcaatttacacacattgataatgataatatattagcttctgaaaatttgacacgacatgttattgaacaaggtgtagatgaattaatatttattacagaaaaaggcgattttgaagtttcgaaagacaggattcaaggatttgaaacgatagcttctcaaaataaaattaattatcaaattattgagactagtaatgaaagagaagttatttttaattacatgcaaaatctacatacgcgtttgaaggacccaaatattaaacaggcaatcatttcgttagatgctatgttacatttagcgattttaagtgtcctatatgaacttaatattgaaattccgaaagatgtaatgacagcaacgttcaatgattcttatttaaccgaaattgcgtcaccacctcaaacatgtattgacatcaagcctcgaatgttaggtcaacaggctggtgcagcaattttaaatatattaaaaaacaaagcacaggatgttattgaactcgtcattatagatacagaattaaaaataagaaaatcaacacaacgatag

SEQ ID NO: 413928 - DNA, 1650 bp, Staphylococcus aureus
atgaataagcaatggtggaaagaagcagtagcatatcaagtatatccaagaagttttaatgatagtaatcacgatggtattggggatttacctggaatgattgataaattggactacttaaaagatttaggtatcgatgtcatttggctcagtccaatgtttaaatcacctaatgatgacaatggttatgatattagtgactaccaagagattatggatgaatttggaacgatggaagactttgatcgtttattaaaaggtgttcatgatagaggtatgaagcttattttagatttagttgtgaatcatacatctgatgaacatccttggtttatagaatccaaatctagtaaagacaatcccaaacgtgattggtacatttggcaagatccaaagccagatggctctgaaccaaacaactgggaaagtatctttaatggatctacatgggaatatgatgctaatactgagcaatattatttccatttattcagtaaaaaacaacctgatttgaattgggataatccggaagttagagatgctgtattcgaaatgatgaactggtggtttgataaaggcattgatggatttagagtagatgcaattacacatattaaaaagacgtttgaagcgggtgacttacctgtacctgagggtaaaacatatgccccagcatttgatgtagatatgaatcagccaggtatacaaacttggttacaagagatgaaagatcgctcattaagtaagtatgacattatgactgttggtgaagcgaatggtgtaagccctgatgatgctgatgactgggtcggggaagaaaatggtaaatttaatatgatattccaatttgaacatttgggactgtggaatagtggtgattctcactttgatgtaaattcgtataaatctgtattaaatagatggcaaaaacaacttgaaaataaaggttggaatgcgttgtttattgaaaatcacgaccaaccacgacgtgtatcgacgtggggtgacgatgacaagtattggtatgaatcagcaacaagtcatgcagcagtttatttcttgcaacaaggtacgccattcatttatcaaggtcaagaaattggtatgacgaattatccatttgaaagtattgaaacatttaacgatgttgctgttaagaatgactatcaaattgtgaaagctcaaggtggagatgtagacgctttacttgcgaaatataaagatgagaaccgagataactctcgcacaccaatgcaatgggatgatacgttaaatggaggatttacaaatggtgaaccttggttcccagtgaatccgaattataaatctattaatgttgcacaacaattagaagatgagcattcagtattacaattttataaagatttaattcaattaagaaagtctaatgatgtatacgtatatggtcaatttgatttagtagatgctgaaaattcacaagtttttgcatacacgagaacattaaatgaaaagcaagttcttattgtaggtaatcttactaaccacgaagcagaattaactgtaccatttgatgtaagtcatggagaagtgaagctatttaattatgatgccaaagttaatttaaaacagttacgtccatatgaagcatgtgttatcgaattaaattaa

SEQ ID NO: 413929 - DNA, 867 bp, Staphylococcus aureus
ttggacgttatcaagcaaatacaacaggcaattgtttatattgaagatcgtttattagagcctttcaatttgcaagaattaagtgattacgttggtctttcgccataccatcttgatcaatcatttaaaatgattgtcggcttatctccagaagcttatgcacgcgcgcgtaaaatgacactcgctgcaaatgatgtgattaatggtgctacacgactagtagatatcgctaaaaaatatcactatgcaaattcaaatgattttgcaaatgattttagtgattttcacggcgtatcacctattcaagcttctactaaaaaagatgaattacaaattcaagagcgattatatatcaaattatcaactactgagagagcaccctatccatacagattagaagagacagatgatatttcattggttggatatgcacgatttatagacactaagtatttgtcacatccttttaatgttccggattttttagaagacttgctcattgatggtaaaattaaagagttacgacgatataatgacgttagtccatttgaactatttgttattagttgtcctcttgaaaatggtttagaaatatttgtaggtgtaccaagtgaacgttatcctgcacacttagaaagtcgatttttacctggcaaacattgtgcgaaattcaatttacaaggtgaaattgattatgcaactaatgaagcttggtactatattgaatcaagtttgcagttaacattgccatatgaacgaaatgatttatatgttgaagtgtaccctctcgatatttcatttaatgacccattcactaaaattcagctttggattcctgttaaacagagtccttatgacgaagattaa

SEQ ID NO: 413930 - DNA, 1485 bp, Staphylococcus aureus
ttgagtactaaaaacaaacacatcccttgtttaatcacaatctttggtgcaactggtgacttaagccatcgtaagttgtttccatcaatattccatctctaccaacaagacaatttagatgaacatattgccatcatcggtattggacgtcgtgacattactaatgatgatttccgtaatcaagtaaaatcatcaattcaaaagcacgtaaaagatacaaacaaaattgacgcgtttatggaacatgtcttctatcatagacatgatgttagtaatgaagaaagctatcaagaattattagattttagtaatgaattagacagccaatttgaattaaaaggtaatcgactattctatttagcaatggcaccacaattctttggcgttatttctgattatctaaaatcttctggtcttactgatacaaaaggatttaaacgccttgttatcgaaaaaccattcggtagtgatttaaaatcagccgaagcattaaacaatcaaattcgtaaatcatttaaagaagaagaaatttatcgtattgaccactatttaggaaaagacatggttcaaaatatcgaggtattacgttttgcgaatgcgatgtttgaaccattatggaataacaaatatatttcaaacatccaagttacatcttctgaaatactaggtgttgaagatcgtggtggttattatgaatcaagtggtgcgctaaaagatatggtgcaaaaccacatgttacaaatggttgcattattagctatggaagcacctattagtttaaatagtgaagatatccgtgctgagaaagtaaaagtacttaaatcactgcgtcatttccaatctgaagatgttaaaaagaactttgttcgtggtcaatatggcaaaggctatatcgatggtaaacaagttaaagcataccgtgatgaagatcgcgttgcagatgactctaacacacctacatttgtttcaggtaaattaacaattgataactttagatgggctggcgtaccattctatatccgtactggtaaacgtatgaaatctaaaacaattcaagttgtcgttgaatttaaagaagtaccaatgaacttatactatgaaactgataaactgttagattcaaacctattagtaatcaatattcaaccaaatgaaggtgtatctttacatctaaatgctaagaaaaatacacaaggtatcgaaactgaacctgttcaattgtcttattcaatgagcgctcaagataaaatgaatactgtagatgcatatgaaaatctattattcgattgtcttaaaggtgatgccactaactttacgcactgggaagaattaaaatcaacatggaaatttgttgatgcaattcaagatgaatggaatatggttgatccagaattccctaactatgaatcaggtactaatggtccattagaaagtgatttattacttgctcgtgatggtaaccattggtgggacgatattcaataa

SEQ ID NO: 413931 - DNA, 921 bp, Staphylococcus aureus
atggaagttacattttttggaacgagtgcaggtttgccaactaaagaaagaaatacacaagcaatcgcattaaatttagaaccatattccaattccatatggcttttcgacgttggtgaaggtacacagcaccaaattttacatcatgcaattaaattaggaaaagtgacacatatatttattactcatatgcatggcgatcatatttttggtttgccaggattactttctagtcgttcttttcagggcggtgaacaaaagccacttacattagttggaccaaaaggaattaaagcatatgtggaaatgtctatgaatttatcagagtcacatttaaactatccaattacatatattgaaatcgatgatcatctaacatatcatcatgatggttttactgtagaggcgcatttacttaatcatggtattccatcatatggatatagagtaatggcacctgaaactacaggtacaatcaatgttgaagcgttaaaaaacattggtcttgaaccaggtcctaaatatcaagaagtaaaatctcatgatacatttgaacataatggtcaagtttatcaatcaaaagattttagaggtgagtccaaacagggtccaattgtagcaatttttggtgatacaaaaccatgttcaaatgaacgtgtgatttctagagatgctgatgtgatggtacatgaagcgacctatatagatggtgaaaagcatttagccaacaattatcatcatagccatattgaagacgtatttgcattgataaaagaagccaatgttaaacgtacgttgattacacatttgagcaatcgctataatacagaagatataaatgaaatttatcaaacattgatacaaaatgaagatacaccaaattttaattttgtgaaagattttgatagttttaaaatctaa

SEQ ID NO: 413932 - DNA, 816 bp, Staphylococcus aureus
atgaaactcgtattttatggagctggtaatatggcacaagctatatttacaggaattattaactcaagcaacttagatgccaatgatatatatttaacaaataaatctaatgaacaagctttaaaagcattcgctgaaaaactaggtgttaactatagttatgatgatgcgacattattaaaagatgcagattatgtatttttaggtaccaaaccacatgactttgatgctctagcaacacgcatcaaaccacatattacaaaagacaattgcttcatttcaattatggcaggtattccgattgattatattaaacaacaattagaatgccaaaatccagttgctagaattatgccaaacacaaatgcgcaagttggacactcagttactggcattagtttttcaaacaactttgaccctaaatctaaagatgaaattaacgatttagttaaagcatttggttcagtaattgaagtatcagaggatcatttacatcaagtaacagctatcaccggaagcggtccagcatttttatatcatgtattcgagcaatacgttaaagctggtacgaaacttggtctagaaaaagaacaagttgaagaatctatacgcaaccttattataggtacaagtaagatgattgaacgttcagatttgagcatggctcaattaagaaaaaatattacctctaaaggtggtacgacacaagctggccttgatacattgtcacaatatgatttagtatctattttcgaagattgtctaaatgctgccgtcgaccgtagtattgaactttctaatatagaagaccaataa

SEQ ID NO: 413933 - DNA, 756 bp, Staphylococcus aureus
atgaaaggacaacattttatagtgactggtggtacgagtggtttaggtttatcgattgtccgaaagttactaaaaaataaagtgcatgtaacattgttggtgcgtgatgttgataaagcaactagaatctttgaacaggaattggggaaaactataaatgttattccgtgtgacttaaatgatatgaagtcgatacaggcactgcaatttgaagacaatacatcattcgatggatttatttatagtgcaggtttaggttatttcaaatctatttcagaccatagtttttcagaaatgattgaaacgtatcagcttaatttaattagttttaatgttttatatactgttttgagaccatatttaacatctaacgcacatattgtaggtatttcaagtcaagctgcattttccacacaagcaaatgctgcacattatggggcatcgaaagcagggttttatgcattaatgaatgctttaagactagagtcaccaaacttacatatcatgacagttaatgttggcccgattgatacaccttttcatcaaaaagccgacccatcaatgaagtatgctaaaaagatggggaaaatgatgcttgatgctaatcagcttgcagaagatatcatttatggtattaaaacaaaacaattggaaattaatctgcctaaatggatgcattatgcgttgaaaatgtatcaaattgcgcctagattttttgaacgatgttttcctaaattatttaaaaataaagcataa

SEQ ID NO: 413934 - DNA, 249 bp, Staphylococcus aureus
atgaactgtcaatcggagagtgtggtaagattttgtgtgcgatatgcggaacaactatcagtatttgaagaatttacagtgctggatattttaggcgatatttctgtagaccaaatttcagacagtacattatattatacttgtgaaaaattcaaactacttgtgttgcaaggaaatgtgttgggtgtacaaataataactaataatgatgaatcaacatgcgaagtgaaatatagaaagatgttttaa

SEQ ID NO: 413935 - DNA, 909 bp, Staphylococcus aureus
atgcaaaaaaatatattaaaaagtggtattgcattatctgaattaggtctaggttgcatgagtttaggtacagatttaaaaaaagccgaacaaattatagattgtgctgttgaaaatggtatcacttattttgatacagcagacatgtacgataaaggtgtaaatgaatcagttgttggtaaggcacttcttaaatatcaacaacgcgatgatattgtcattggtacaaaagtaggcaatcgtttaacaaaagatggcagtacaacatgggatccgagtaaatcctatattaaagaggcagttaaaggttcactaaagcgtttaggtatagatcatatcgatttatatcaacttcatggcggaaccattgatgacccattagacgaaacaataagcgcatttgatgaattgaaacaagaaggaattatacgtgcttacggtatttcttctattcgcccaaatgtaattgattattatttaaaacatagtcaaatcgaaacgataatgtctcaattcaatttgattgataatcgtccagaatcattattagatgcaatccacaacaatgatgttaaagtattggcaagaggacctgtgtctaaaggattattaacttcaaacagtgttaatgtgctcgacaataaatttaaagatggtatttttgattattctcatgatgaattgggtgaaacaatagcctctattaaagaaattgaaagtaatttatctgcattgacatttagttatttaacatcacatgacgtgcttggttccatcattgtaggtgcaagtagcgtcgaccaattaaaagaaaatattgaaaactatcatactaaagttagtttagatcagattaaaacagcaagagctcgtgtaaaggatttggaatataccaaccatttagtgtag

SEQ ID NO: 413936 - DNA, 543 bp, Staphylococcus aureus
atggatttaaatgaaaaaacaattgatcgaacagttatttataatggcaaaattgtagatgtagaaattcatacagtgacattaccaaacggtgaaacgtcaacaagagaattagtttatcataatggtgcagttgctgtttgtgcagtgacgcctaaaaaagaagtcttattagtgaaacagtatcgtaaaccagtagaaaaaccattgctagaaattccagctggtaaattagaagatgatgaagatagagtcgaagcggctaagcgtgaattagaagaagaaacaggatatattgccaaagagttaacacatgttgtagatatgtatggttcaccaggtttttgtgatgaacaattatcaatatattttacggataatttagaagaaggcacagttcacttagatgaagatgaatttgtcgaagtcattaaagttccgattgagaatgttaaatcgatgctaatgaataaagaaatagaagatgcgaagactatcattgcattgcaacacctattattaaattataatcattctaaataa

SEQ ID NO: 413937 - DNA, 450 bp, Staphylococcus aureus
ttggaagaacgattaaatcgcgttaagcaacaattacaacaatcatcatataagctaacgccacaacgcgaagctactgttagagttctaattgaaaatgaaaaagatcatctaagtgctgaagacgtatatctaaaagtaaaagacaaagcgcctgaaattggcttggcgacagtatacagaacgttagagttgttagctgaactaaaagttgtcgacaaaattaactttggtgatggcgtcgctcgttttgatttaagaaaagaaggcgcaaaacatttccaccatcatttagtatgtatggaatgtggtcgtgtagatgaaatcgatgaagatttgttaccagaagttgaaaatcgagttgaaaatgagttcaattttaaaattttagatcatcgtttaactttccatggtgtgtgtgaaacgtgccaagctaaaggtaaaggatag

SEQ ID NO: 413938 - DNA, 888 bp, Staphylococcus aureus
atggaaacaattattgaagaatatttgcgctttatacaaattgaaaaaggactaagttctaacacaattggtgcttatagacgtgatttgaaaaagtatcaagattatatgactgaacatcatatctcgcatattgattttatagatcgacaattaattcaagagtgtttggggcatttaatagaccaagggcaatctgctaaatctattgcgcgatttatttcaacaatccgtagttttcatcaatttgctataagagaaaaatatgcggcgaaagatccaacggtattattagattcaccaaaatatgacaaaaaattgcctgacgttttaaatgttgacgaagtgttggctttattagaaacgccggatttaaataaaattaatggttatcgtgatcgtacgatgttagaacttctgtacgcaacgggaatgcgtgtatctgaattgatacatttagagttagagaacgtgaacttaataatggggtttgtacgcgtatttggtaaaggggataaagaaagaattgtaccattaggcgacgcagtcattgagtacttaactacttatattgaaacgattagaccgcaacttttaaaaaagactgttaccgaagtcttatttttaaatatgcatggtaaacctttatcacgacaagcaatatggaaaatgattaaacaaaatggtgtaaaggcaaacattaaaaagacgttaacgccacatacgttacgccactcttttgcgacacatttattggaaaatggcgcagatttaagagcagtgcaagagatgttaggtcactctgacatatctactactcaactctatacacatgtttcaaaatctcaaattagaaaaatgtataaccaatttcatcctagagcataa

SEQ ID NO: 413939 - DNA, 507 bp, Staphylococcus aureus
atgcaacaggcactgataaatttctattatcaatttcatactaagcaacattatttcctatgtcatgacattttagaagatgcatggaaagctgaaaataactacagtaagcaagatgcagttgttagtttaatcttgtttgcaactgcttgttaccattatcgccgcaataatttaaaaggcgcctataagtcttttaataaatctaaagaaataatacaaaatgctaaagatagagatgcgttataccttaatttaaatgattatcagttgttaattgagcaacagatagcaaagttgaatacagcaaagcctttttcatcagttatattaccaataactccagactttgaacgcatcatcaaggccaactatccagattatgattataatcacgaaacagcaacagatccttttattgtagaccatcacatgcggcgtgatcgttcagaagtgattgcagcaaaagaagaagcgattcaattaagaaaacatagacgtaattaa

SEQ ID NO: 413940 - DNA, 756 bp, Staphylococcus aureus
atgacgcaatacgaggtagatattatgtatgaagttaaattagatgctttcaatggaccattagatttattactgcatcttatccaaaaatttgaaatagatatttatgatattccaatgcaagcattaacagagcagtatatgcagtacgttcatgcaatgaatcagcttgaaattaatattgcaagtgaatacctagtattagcgtcagaactcttaatgattaaaagtaagatgcttttaccacaatcaacatcagatatggatgttgatgatgacccacgtgaagatttagttgggcgtttaatagaatatcaaaattataaagaatatactgctattttaaatgacatgaaagaagaaagagatttttattttacaaaaagaccgacagatttatctcatttggaaacagatgaatcttgggatccaaatcatacgattgacttaactgaattaattgtagcttatcaaagagttaaaaatagagttgagttaaatacacctaaatctgttgaaatccgaaaagagacatttaccattcaacaagctacagaacaagtgacatcgagattgaaagataaagatcattttaacttctttagtctgtttacgttttctgagccaattgaacaagtagtcactcactttttagctattttagagatgtcaaaggcaggaataattaatattgagcaacaacgtaattttgaagatattaacattgttagaggagtgaactaccattttggataa

SEQ ID NO: 413941 - DNA, 543 bp, Staphylococcus aureus
ttggataatcatggtatattagagtcgctattatttacagctggcgatgaaggtttagatgaaaaacagctattagaaattttagatatatcgaaagaccaactcgtagaattaattgaaaattattcatcacatggattaataatacaacgatttggaatgacgtatgttttaacgactaaaaaagaagcggcaacgtacattgaacaattaattgaacaaaagtcacaaatgaaattatcacaagcagcaatggaagtactatcaattattgcttataaccaaccattatcaagaagtgatattgaattaattcgtagtatcaattcagatggtgcagttaaaacattgattgccaaaggactagttgaggctaaagtggtcaatgaacagcgtagccaacaattaatcactactgatttatttttaaatgtatttggtatttcaagtatagatgatttgccaacaactgaagaagacgatgaagaaatggatgtttttttcagcaatctagtcaatcaaaaaggagaaaataatgactaa

SEQ ID NO: 413942 - DNA, 738 bp, Staphylococcus aureus
atgactaaagaattagagagattacaaaagcgtatagcgaacagtggttatacatcaagacgtaaggcagaaactttaatttctgaaggaaaagtgaaagtgaatggtacaactgtcactgaattaggaacaaaagtgaagccttcagacacgattgaagttgaaggtattaaaattgaacaagaggacaagatttacatattattccataagccaacacaagtgataacaagtgtatcagatgatagaggacgtacagtggttactgattactttaaagatattgatgctcgtatttatcctgttggacgcttagactatgatacatctggattgttattattaacaaatgatggagaatttactaatttaatgacacatcctcgatatcaaattaagaaaaaatatgttgcgaaactaaaaggctatcttatgcgagaagaagtaaaagcattagaaaaaggcatagaattagaagatggtttaacacaaccagctgatgtaaaagttaaaaaacaagataaagataaaaatacaactttggttgaaattacaattacagaaggacgaaatcgacaagttagaagaatgtttgaacactttggtcatcaagtaacaaaattatctcgtattgaatatggacctttaaatgttgttggtttaaatgctggcgaaggccgcgtattgacacctcatgaagttaaagtaatgcgtcatcttgctgaacacggaaaataa

SEQ ID NO: 413943 - DNA, 726 bp, Staphylococcus aureus
atgtcgaacgaaatacttatcgtagatgatgaggatagaatcagaagattacttaaaatgtatttagaaagagaatcttttgaaatccatgaagcgagtaatgggcaagaagcttatgatcttgcaatggagaataattatgcttgcatactactagatttaatgttgcctgaaatggatggtatccaggtggcaactaaattgcgtgaacataaacaaacaccaattattatgttgactgctaaaggtgaagaaacaaaccgtgttgaaggttttgaatctggtgcagatgattatatcgtcaaaccgttttcacctagagaagtagtcttaagagttaaagcacttctaagaagaacgcaatctacaactgtagaacaaagcgaacctcacgcacgtgatgtgattgaatttaaacatttagaaatagataatgatgcacatcgcgtacttgctgataatcaagaagtcaatttgactcctaaagagtacgaattattaatatatttagctaaaacaccaaataaagtatttgaccgtgaacaattattaaaagaagtttggcattatgaattctatggtgatttaagaacagttgatactcatgttaaacgacttagagaaaagttgaatcgtgtgtctagcgaagctgcgcatatgattcaaacagtctggggcgttgggtataaatttgaggttaaatctaatgatgagccggctaaatag

SEQ ID NO: 413944 - DNA, 1752 bp, Staphylococcus aureus
atgatgagccggctaaatagtgtcgtaattaaactgtggttaactattattttaatagtgacgacagttttaattttattaagtattgcgttaattacctttatgcaatactatttcacacaagaaaccgaaaatgccataagagaagatgctagacgaattagttcactggtcgaacaatcgcacaataaagaagaagcaatcaaatatagtcaaacattaattgaaaaccctggtgggttaatgattataaataataaacatcgtcaatcttcagcttcactttctaatattaaaaagcaaatgttgaatgaagtagtcaacaacgaccattttgacgatgtgtttgataaaggtaaatctgttactcgaaatgtaacgattaaagaaaagggctcatctcaaacatatattttgttaggctatccaacaaaagcacagaagaatagtcatagcaaatatagtggagtctttatatataaagacttgaaatcaatcgaagatacaaataatgctattacgattatcactataattacggctgttattttcttaacaattacaacagtctttgcttttttcttatcgtcaagaattacaaaacctttaaggcgcttaagagaccaagctacacgtgtatctgaaggggattactcttataaaccttctgtcacaacgaaagatgaaattggtcaattatcgcaggcatttaatcagatgagtacagaaatcgaagagcatgtcgacgcattatccacatctaaaaatattagagacagcttaattaactctatggtagaaggtgtcctaggtattaatgagagtcgacaaattatcttatcgaataagatggcgaatgatattatggacaatattgatgaagatgccaaagctttcttattaagacaaattgaagatacttttaaatcaaaacaaactgaaatgcgtgatttagaaatgaatgcacgattctttgttgtgaccacaagctatatcgacaagattgaacagggaggtaaaagtggcgttgttgtgacagttcgtgatatgactaatgagcacaatctagatcaaatgaagaaagatttcattgctaatgtatcacatgaattacgtacaccgatatcattacttcaaggctatactgaatcaattgtagatggtattgttacagaaccggatgaaataaaagaatcgcttgccattgtccttgatgaatcgaaacgtttaaatcgtttagttaatgaattgttaaatgtcgctcgcatggatgctgaagggttatccgtaaataaagaaattcagcctattgcagcgttactagataagatgaaaattaagtatcgccaacaagctgatgatttaggtctaaatatgacttttaattattgtaagaagcgtgtttggagttatgatatggatcgaatggaccaagtactaacgaacttaattgataatgcatcacgttatacgaaacctggtgatgaaattgcaattacttgtgatgaaaatgaaagcgaagatattttatacattaaagatacaggcacaggcattgcaccagaacatttacaacaagtatttgatcgtttttataaagttgatgcagcgagaacgcgaggtaaacaaggtaccggtttaggtttgttcatttgtaaaatgattatcgaagagcatggtggttccattgatgttaaaagcgaattaggaaaaggcacaacgtttattatcaaactaccaaagccggaataa

SEQ ID NO: 413945 - DNA, 765 bp, Staphylococcus aureus
atgtttaaaagaactaaactaatcttaatagcaacgatactactatcaggatgttcaactaccaataacgaatccaacaatgaaacaaaatcagtaccagaagaaatggaagcttccaaatatgtaggacaaggcttccaaccacctgcagaaaaagatgcgattgaatttgcaaagaagcataaagataaaatagctaaacgtagtgaacaattttttatggataacttcggtctaaaagttaaagctaccaatgttgtaggtagtggcgacggcgtagaagtattcgtgcattgtgatgaccacgacatcgtatttaatgcgagtattccatttgacaaatcaattattgacagtaatagctcattaagaagtgaggacaaaggcgatgatatgagtactttagtaggtacagtgttgagtggctttgaatatcgagcacaaaaagaaaagtatgacaatttatataaatttttcaaagataatgaaaagaaatatcaatatacaggatttacaaaagaggcaattaacaagacacaaaatagtggatgtgaaaatgaatatttttatattacgactataccgtataatttaactgagtatagagactattttgaaccattattaaacaaaagtgacagtgaattttcaaaagaattgtcaaatgttaagaagcaattaaaagataagtctaaagtttcggtaactactactctatttagtaaaaaaaagaactatactaaaaaagtaacagtgaaaatgtaa

SEQ ID NO: 413946 - DNA, 546 bp, Staphylococcus aureus
atgcaacaaaataaacgtcttatcacaataagtatgttgagcgcgattgcgtttgtgttaacttttatcaagtttcctataccatttttgccaccatacttaactttagattttagtgatgtaccgtcactactagctacatttacgtttggaccagttgccggtatcatagttgcactggttaaaaatttattgaactacttatttagtatgggcgatccagttggaccatttgctaactttttagcaggcgcaagtttcttattaactgcttacgccatctataaaaataaacgttcaacaaaatctttgattactggattaatcattgcaacaatcattatgactatcgttttgagtatcttgaactatttcgttttattacctttgtacggtatgatatttaacttagctgatatcgcaaataatcttaaagtaatcattgtttcaggaattataccattcaatattattaaaggtatcgtcatttctattgtatttatattactatatagaaggcttgcgaatttcttgaaaagaatttaa

SEQ ID NO: 413947 - DNA, 249 bp, Staphylococcus aureus; identical to SEQ ID NO: 407516

SEQ ID NO: 413948 - DNA, 954 bp, Staphylococcus aureus; identical to SEQ ID NO: 407515

SEQ ID NO: 413949 - DNA, 1380 bp, Staphylococcus aureus
atgttgcatgatattttacgaaacaaatttggtttcgagagttttaaaccgggacaacaggaaattatagaaagtataatgtctcaacaacacactctaggtattcttccaactggaagcggaaagagtttgtgttatcaaatacctacgtatttatcaggtaagccgacattaattatctcaccgttaatatctttaatggatgaccaagttatgcagttgaaaataaatggagaaaaacgtgtaacatgtattcactctggtatggatgaaattgagaaaaagcataatattaaatgtttacgacatagccgcttcatctttctaagtccagaatttctcctgcaaccgtcaaattttaaattaatatctatgatagactttggcatgattgttctagatgaagcacattgcctatctgaatggggatatgatttcagaccacattatgctctaataggaaaagtaacaaagcattttaaagaagcggtagtcttagcattgacagcaactgcaccaccgcatttacaagatgatttgacggaaatgttagcaattcaattcaacgttattaaaactacaatgaatcgcccaaacataagctttaagcatcttaattttcatgatgatgaagataaaattgagtggttgctaccgtttctacaacagtcgggaccaacgattatttatgtctcatcgaaaaagatgtgtctgaatttagcgcaacttatttatgattcaggttttctcactggcatttatcatggtgatatgaattatcaagagcgacacacagttcaacaacaatttttaaataatgatattccgattatagtcgcaacgagtgcttttggtatgggaattaataaaaaagatattcgcacaatcattcactttcatctttcaacaagtccttctaactacattcaagaaattggccgtgcgggtcgcgatggtgaactaagtcaggcaattagtttatttcaaccggacgataaatatattttagaaacgttattatttgcagatatgataacagaagaagatgtacaaaaattcgaaataggagaatttttagcacccgataaacaagacgttttgacaacgttgcattcattctatagtatcggcgccttgaaacagatatttaagcaatcatttaaacgaaagcaattaggattctttcgcatgattggctattgcaaattggatcaatgtagacggaagtatttattagaatttttcggtgaatatccaccggcaaaagatcgatgttgtgacaatgattctaatataactgatatcgtaattttaaataagaagaaggtaattagaagtattgggtttgatgaaaagttgcaaaatttatttctcagatag

SEQ ID NO: 413950 - DNA, 201 bp, Staphylococcus aureus
atgccagtgattaaaataaacaatcttaataaagtttttggagataatgaagttttaaaagatatcaatcttgaaatcaatcaaggggaagtagtagcaataataggtccatctggtagtggtaaaagtacattgttaagatgtatgaatttattagaagtacccactaaaggtcaagtgattttgaaggcaatgacttaa

SEQ ID NO: 413951 - DNA, 582 bp, Staphylococcus aureus
atggataacaagattaaaaatattttcgaaactttaattaatttttggaatgaacataatcaaacaataagtatactcgctgctgcattgattccaataatgattcccatagttgtattttatataacacgattacgtactaacaaaatcatagaaataataatccaaaaagataaaaatgaactaaagaaatatctcctgcacttagaaaatgtagaagatttaaaagaaaaccataatgatgtcataaaaatgaattcaaatgttaattatataactacctttttacaaacaaaaataaataaaataaaaataaaagaagcactaaccgaaacattgaaaaattatgaatcaactcttacaaaaactttagacaaccaccacaaatatctatctaaaaacaacaaagataaactatcaaaacgtatttctcacgctaatcacgcaatagagatattagcgaatttagacattaatactaacatagagttttttataataagagatgtaaaagcaataaataaaaatactcaaaatataaaagaactcaaaagaattttattaattctaaccagaaactaa

SEQ ID NO: 413952 - DNA, 405 bp, Staphylococcus aureus
atgaaaaataaaataaacaaaatagcaataagtagtatgatttttgggggaactttattaacttcaaattttaatttatatgcagaagaaggtataaatacttctgtttctaaaagcttagatttggatcaaagtggtaaattagaccacggcatattacatccagacggaacagtaacaaaccctaatgtatccccgaatcactatatattagaagttgagaaatctatggagtttcaagatgcgactaatagtaatgaacaaagtactatatcgcacgatcataagttacctgagacaggtgaacaatcatctaacttatcgataataacttttttagcttctttaacattgattatagggatattattaacatttagacgttttatcaaacctattaaataa

SEQ ID NO: 413953 - DNA, 624 bp, Staphylococcus aureus
atgaattttggagaacaaataaaacaattgagaaaatcaaatgaaattacacaacaagaaatgggggcaagattaggagtttctagacaggcgatttcacattgggaaaacaataggaatttacctgatattgaaatgttaattataatttcaaaggaattcgatatttctttagatattttaattctaggaggaaatgatatgaataacatgaccgaaaaaattattagagatggcagtgaattgaggaaaatgaaaatgaaaataaatgcagtgaaaataggagtgtttttatttatattaagcttaatttcatactttattggtttgttttttgctccaatatctaaagagaattactttggagatttctcggaatacacaatgttaagtggtttgatagttgtatttgttgtaggtttattgagtttttctgaaagaattcaagataaaaaaaatgatgaacgatatattttaaagatgattggaccagcatgcatgatctttggtgttttattatatacattcacattgtggactggattgatttcgggattgataggtattttattatcttttgtagggttcattttaattattttccaaaatttatctaaagaataa

SEQ ID NO: 413954 - DNA, 255 bp, Staphylococcus aureus
ttggacaaccaagaaatgattttagggctatgtaaagaattgaaaattattagagaagccagaggtattaagcaagtcaaagttgctagagctattgaaatggacccaccattgttaagtagaattgaaaatatgaaaaagcctacggttactatgatggaattaactagaatactaggatactataatataactttatatgaatttatcgaaaataataaagagtatatagaaaaaatttgtacttgtaaataa

SEQ ID NO: 413955 - DNA, 372 bp, Staphylococcus aureus
ttgaaagtaaattatcgacctgttgtaaatattaaagcgatcaaaccaaatcaaaaaggagataaagctattgagtctgccatcaaggagacatcaaaatattccgttaaatcatctgactttttaactgatagcgatgaaaaaaatcaagaaattgtcagtgatctagaaaaatgtttgtatcgaaaacgtatgttaagttatggtggactgcttaaacaaaagcataaaattttaaatttagatgatgttgaagatggtaatttaattaatacaagttacgaagataaaacaacagacgaagaggaaaaagcacattcaattacagcaatttggaatttcgaaaagcaaaattattatttaagacattag

SEQ ID NO: 413956 - DNA, 1323 bp, Staphylococcus aureus
ttgaataatgatgactcaattgttaaattaacaggtgtgcctggttgcggaaaaagtttgattctttatgatttttacaaagagtgcttaaaaattgataagaaagttgccttaatgcattgtggtgctgagttgaatgacggacagctagatttaataaaaggtcatgattggaatatatatcccccaaaggcaaacgaagagtttatatctttagatgctgacatctatatgattgatgaagctcaacgtaagtatcctcatcagttagagaaaatttattcttatattaaagaaaatgataaaaagttaattatttcttatgatcctgaacaaacattggtgaaaagagaaactaaatggaatatttctaaaactatagcagaagattacgaaggtaaaacattaaatctagaatccaggatacgtaataacaaagaaattagtagttttattaggttattattaaataaaaatcaatctaactatattcgggattttaaaaatattgaaatagtatatgcgaatgatattagtgaatcaaaaactattttaaaatttttagataatacatataccgttattgattacaccgctcctaattttaatagaaaaggctataatgaaatatctaacatgagatacggaaatactatattgaattctcataacgtcataggtcaagaatttgataatgtgtgtttaatcttaggtaatgaatttttttatgataatgatgggttcttaagagcgaatgatgttaatgatcaacttgatcttatgaaattactttatcaaaatgtgactagaacaaaacataaacttgttttagtagttaataggaataaagagttatatattgaccttttaactatactaaaacccagaattcagaagtcaataaaattaaaagaaattgaaaatataggttacaatacaataccaaattcaaaaggtgtgttttatatatttaagcataataacaatattttaaaaaacgaaaatactggtgaagatattaatgttaaaggaaatatattatatgtagagagttgtaaagacttgagaaaggcaattaaaagtttaataaccaatattataaccaaaaaattaaaaaaatttgaagatattgaaatcgctgatttacttaatctaaaagtatcgtggattgatagcaaaaataaggaacaaatattttcttatattgttgagcaacatatagaaaagtacggagaaattccttttttaaatatacctttaaaattaaaaggttattcagataatattattagaaattatagctatattgttgaatatgattaa

SEQ ID NO: 413957 - DNA, 273 bp, Staphylococcus aureus; identical to SEQ ID NO: 407792

SEQ ID NO: 413958 - DNA, 741 bp, Staphylococcus aureus
gtgattaatttaaactctaatattagtcaactgaatctgctttatgtcaaagatattaaaaatatagatatcgatgttaaaactggggcaaaagcgaaagcggatagctatgtaccatacacaatcgcagtaaatgggacaacaacacctattgcatcaaaactaaaactttcgaataaacaattaattggttatcaagatttaaataaaaaagttaaatcagttttaaaacatgatagaggtatcaatgatattgaattgaaatttgcgaaacaagcaaagtatactatacactttaaaaatggaaagacacaagtcgttgaccttaaatcagatatctttacaagaaatttattcagtgtcaaagatattaaaaagattgatattaatgtgaaacaacacactaaatctaataaagcgcttaataaagtgactaacaaagcgactaaagtgaagtttccagtaacgataaatggattttcaaatttagtttcaaatgaatttgcgtttttacatccacataaaataacaacaaacgacttgaatgctaaacttagactagcgttagcaagcgatcaaggtattactaaacatgatattggactttctgaacgcactgtgtataaagtgtattttaaagacgggtcatcaaaatttgttgacttaaaagctgcgaaacaagattcaaaagtatttaaagcaactgacattaaaaaagtagacattgaaattaaattttaa

SEQ ID NO: 413959 - DNA, 963 bp, Staphylococcus aureus
ttgcataaagatttaatacctgtagtttggatagcttttaaaacaggattaagaatttctgatgtattgacattacaaaataattgccttgcaaaagttaatggaaagtattcaataatcacagatattgctaaaacttttgttaaaggacatagaataccaattgataataaattagctgatataatagcagttttaatagccgattctaaaagtaaaagtacaaaagataataatcctaataattatatttttgctatttataaaggaaaaagaaagggaatgccctttacacaacatatggtcagagcacacttaaatcatttatcaaagactaaaaatattattgatgaacaaggagaaatcttccatttcaaaactcatcaatttagacatacctatgcagtaaaattgttaaatggtggagcagatatattaacgatacaagaattattagcacactcctcaccagaaatgactctaagatatgctaagttacttgatgatacaaagagaaaggcttttgaatcagttattgatcaaggagcttttagttttgatgttgacggtaaaattaaaaatatacagcatagtagtgaactatctgaaaaagcattgaattctttatggcaagaacataaattaaacgcaatggacaatccttatggcacttgtcatgctagattgagtggtgattgtccatacatggaagctccgccatgcctgacttgtaattctgggaaaccatgtaaggatttagctattggattttctgatttagatgttgaaaaatatgaattacatatcaaatcaacggtcaaatctatagaattagctaaaaataataatagacaagatatggttgaaaagcatataaatatattaaataaatatgaagaaatactaggtaatataaaagatggaaacattatattcgggagaagtaatagaataaaagtatag

SEQ ID NO: 413960 - DNA, 213 bp, Staphylococcus aureus
atggcaaaatcatgcttgcatatacttactaataatgaatatgcgacaacgcgttgccaagatggcatagtcttattttggccaattgacggggaaatcgaactacaaaaatttcgtaaaagtaaaataattgaagatgatatatatatatcattaatcatctggatgtatttagtattaagaataataaaaaaacgatcatgttgtatttga

SEQ ID NO: 413961 - DNA, 183 bp, Staphylococcus aureus; identical to SEQ ID NO: 410158

SEQ ID NO: 413962 - DNA, 345 bp, Staphylococcus aureus
atgaaaccaaattcgaaatccaataagaaaatcatgaagaattataattgggaatactttaaagcccaaattaatcaaaagctttctgaaccagaaacgaaaaaaatctatagtcaaagaaaaattgatgtagagcctgtttttggatttatgaaggctattttgggtttcactcgaatgtcagttcgaggaataaataaagttaaacgagagctaggttttgtattaatggcacttaatataaggaaaatagcagctcaacgagctgtacattataaaatacatatcaaaaaagctgatttctatcaaataattaatagaaatcagcttttttacattgcctaa

SEQ ID NO: 413963 - DNA, 732 bp, Staphylococcus aureus
atgtctcaaacgaatttaaatgaagttataaaaaatgtagaaacgttattaagaagccctattgcattaaaagaaataagcgaatccacaggtatatcagaaagtgtgttaaaaaaattgagctctggagagcgagaagtaacaaatgcaaaatttgaagttataaatctgttgtatcaattttatctggaaaataagagtgagatctttaaagataagtcatttatggaagaactatctagagtcaatttgcctaaaaatataagaaactttataaaagatttaagcaatgcaatagaccaagtaaataataatgaacaagaaatgctatatgaggttaaaactatttatgttaaagataagcagggtcatatagaagaaaaaggaaaatgtattgccgtagatgaaaaccttgccttaaatttagacgttaacacgggtcttgcaaaagatccatacgatttaaaaattaatacagaaatatcagacattgtagacgaattgaagcacgttaaaataatttttgatgaattaggtcttgaaaacgcattaaagcaaattaagtatgacgggggtaagattaaactttcaaaagaaaagcgtcatataatggtgtacccaaaagggacgtctttatatgaatataacaggtttgattatataggtgcattcgagcgtatgttcttttctttagagtataatcaagaaaaaattaggggaaaatggtcttga

SEQ ID NO: 413964 - DNA, 393 bp, Staphylococcus aureus
atgattttaagtaaaacagcaaacaaaattttaaaagaattaaagaataaggaaaaatatttctcaaatctttgtattgagaatagagacgtaaattcttcaaaacttacttacaaagaaataaaagataaatttcctgacacttctcatatagtaatttctatgactgtcaaatatttattagaagaaaaatttatttttaaccatactgctggcaaagagagtacttttgatattgaagacgcagaaaagggagattcacaatatgttattggtgaaaaagggatagcttatttagagcaaaagaagtttattttatttgcaaaaatagtaccaattgttatttcttttgttagtttgatgatttctgtggctaattatatttacaaataa

SEQ ID NO: 413965 - DNA, 309 bp, Staphylococcus aureus
atggaaaataaatatgatagcttgttaaacaaaaaaagaaatagaactagaaattacgaaaatacaatgttagatacttctgaaagatatagtattttaccaactcatagtttaagagtgaaaggtattattcatagtaaggcagtagcactaaaaaaaataggtttatatgataatttgaatgacgttttagaagcagctttagagaaattcattgaagaatattctgatagcgaaaaacaagaaataagaaaccaagaaaaagaagaaaatgaacaaaagttaagacgagtaaaaaacaaaaaatga

SEQ ID NO: 413966 - DNA, 900 bp, Staphylococcus aureus
atgacagaagtagtatcaataaataactttaaaggtggtgtatcaaaaacatcatcaactgctggaatagcttatgtattatctgaaattaaaaagaaaaaagtattagttgttgatttagaccctcaagcagatgttactgatctactattaaaaacatttaaagaaaacaataatagtttattaaatgaggtaatgaattctgataatattgaaagtattttagatgaaaaagaagatgaaatacttgatttacttttaaggaaatcaacgaatataaatgaaaatgatttgtaccatacgttgaaagaaaaaaaacatttaagaaaaacaataatagaattgagtaataatttatcaatagtaccatcagattttaatatgattggttatccgtatttattagaagatttaaaactcaatagaattgatggtgcaaaatactttgatagtttcttagaagaagtaaaagaagattatgattttatattaatagatacaccacctacattatcagattttgctaatagtggaatttattcatgtgattatagtttgattgttgtgcaaactcatgtaagaagttttaatgcagtagaaaaacttattagtcatttatcagattttcgagatttacatgataatgattttgatatagttggagttttaccagttatgtttaaaaaccaaggtaagatagatagatttattataaaactacttaagcatgtatatggaaactatgtatttgaaaataaagtgatgcaaagagaaagagttaaattttgggatgcaataggtattcaaaatgaagatattcatgatagaaatgtacttacaatgtatgagaatattgcagatgaattattagagaaaatgagggatagtaatggaaaataa

SEQ ID NO: 413967 - DNA, 780 bp, Staphylococcus aureus; identical to SEQ ID NO: 410124

SEQ ID NO: 413968 - DNA, 792 bp, Staphylococcus aureus; identical to SEQ ID NO: 411649

SEQ ID NO: 413969 - DNA, 771 bp, Staphylococcus aureus
atgaagtctataaaaaggattggattgtgcataagtctgttgattttaagcatttttgtaacatcttgcgatggtgataataagatcactggagattcaaaagaaacacaaatcaaaaagagcttttcgaaaacgttagatatgtatccaattaagaatctcgaggacttatatgataaagaaggataccgtgatggcgaatttaaaaagggcgacaaaggaatgtggactatatatacagattttgctaaaggcaataaatcagacgaattggatgatgaaggtatggttttaaatctggatagaaatactcgaacggctaagggatattattttgttaagaaattttatgaaaaggataaattttcagatagaaaaaattataaagttgaaatgaaaaacaataaaattattttattagacaaagtaaacgatccaaaccttaaagaaagaatagaaaattttaagttttttgggcaatatgcaaattttaaggatttggaaaattacaacaatggcgacgtgtcgataaattggaatgttccaagttatgacgtggaatataaaatgagcaataaagatgaaaatgttaagcaattaagaagtcgttataacattcctactgataaagctccaatgttaaaaatgcatattgacggtgacttaaaaggtagttctgttggatataaaaggttagaaatagacttttcaaaagaagatagggatatttcagtcattgattatttaagttataagccagcgaaaaaatag

SEQ ID NO: 413970 - DNA, 468 bp, Staphylococcus aureus
atgaatgcgataaatgatattgccaaaaagtataaaatgcctgtgatttattcaacgcatccaagaagttggaagaaaattgaagaaagtaaatttgaatttgatccattagttaaacagttaaagccatttggtttctttgattataatgcattgcaaaaagatgcatttgttgtgctatcagatagtggaacattgtcagaagagtcgtctattttgaagttccctggtgtccttattcgaacttccacagaaagaccggaagtactagataaaggtacggttattgtaggtggtattacctataacaatctaatccaatccgttgaactagcaagagagatgcaaaacaataacgaaccgatgattgatgctattgattataaagacactaacgtttcgacaaaggtagttaaaattattcaaagctataaagatattatcaatcgaaatacttggaggaaatga

SEQ ID NO: 413971 - DNA, 594 bp, Staphylococcus aureus
atggaaaaactgaaattaatgacaatagttggtacaaggcctgaaatcattcgtttatcatcaacgattaaagcatgtgatcaatattttaatcagatattagtacacactggtcaaaattatgattatacattgaatcaaattttctttgatgatttggaattaagacaaccggaccactacttagaggcagttggaagtaaccttggagaaacgatggggaatattattgcgaagacatatgacgttttattacgcgaacaaccagatgcacttttaattcttggtgatacaaatagttgtttagcagcagtatctgctaaacgattaaagattcctgttttccacatggaagcgggtaatagatgctttgatcagaatgtacctgaagaaatcaatcgtaaaattgttgaccatgtcagtgatgtgaatctaccttatacggaacatagcagacgttatttattagatgaaggcttcaataaagcgaatatctttgtgacaggatcaccgatgacagaagtgatagaagcgcatcgagataaaattaatcacagtgacgttttaaataaactaggattagaaccgcaataa

SEQ ID NO: 413972 - DNA, 1023 bp, Staphylococcus aureus
atgtacttaatagaacagattagaaatggagaatatattactgatggtgcgattgcactcgctatgcaagtttatgttaatcagcatatctttttagatgaagatattttattcccttattattgtgatccaaaagtggaaattggacgttttcaaaatactgctatagaagtgaatcaagattatatagataaacacagtattcaagtagttcgccgagatactggtggtggcgctgtgtatgttgataaaggtgccgttaatatgtgttgtattttagaacaagacacttcaatttatggtgattttcaacgattttatcagccagctataaaggcgttgcatacattaggtgcaacagatgtgatacaaagcggtagaaatgatttaacattgaatggtaaaaaagtgtcaggcgccgcaatgacattaatgaataatcgtatttatggcggttattcgctattacttgatgttaattatgaagcaatggataaagtgttaaagcctaatcgcaaaaagattgcatcgaaagggattaaatctgtgcgcgcacgtgttggtcatcttagagaagcactggatgaaaagtatcgtggtataaccattgaagaatttaaaaatttaatggtgacacagattttgggaatcgatgacattaaagaggcaaaacgatacgaattaacggatgcagattgggaagcgattgatgaattagttgataaaaagtataaaaattgggattggaattatgggaagtcacctaaatatgaatataatcgaagtgaaagattatcatcaggtactgtagatattaccatttctgttgaacaaaatcgtatcgcagattgtcgtatttatggggatttctttggacaaggtgatataaaagatgtggaagaagcattacaaggaacaaaaatgacaagagaagatttaatgcatcagttaaagcaattagacatcgtttattattttggtaatgttacggtagaatcattggttgagatgattttaagttaa

SEQ ID NO: 413973 - DNA, 201 bp, Staphylococcus aureus
atgaacaaaacaaagggttttacaaagtataagaaaatgagatatatgccagggctcgatggtttgagggcaatcgctgttctaggaattattatttaccacttaaacaagcaatggttgacaggtggctttttaggtgtggatacatttttttgtgatctctggttatttaattacaagcttattactcaaagagtatga

SEQ ID NO: 413974 - DNA, 1263 bp, Staphylococcus aureus
atgaaaaagagactattagtaacattattggtaggcctgttttttttagcgccagttagtacatttgccgcaaaaggtgatcaaggcgttgactgggcgatttatcaaggcgaacaaggtcgttttggctatgcgcatgacaaattcgctattgcccagattggtggctataatgctagcggtatttatgaacaatacacatataaaacgcaagtagcaagtgcaattgctcaaggtaaacgagcgcacacttatatctggtatgatacgttcggcagcatggatattgcgaaaacgacaatggattatttcttgccacgtattcaaacaccaaaaaattctattgttgctttagattttgaacatggcgctagtcctgatgtaaacgcaaatacggaaacaatcctgtacggtatgcgccgtatcaaacacgcaggatatacaccaatgtattacagctataagccttttacgttgcaatatgtagattatcagcgaatcatcaaagagtttcctaactctttgtggattgctgcataccctagctatgaagtgacaccaaatccattgtataactattttccgagtatggatggtattgcaatttggcaatttacctcaacttatattgcaggcggtttagatggtaacgtagacttaacaggaattacggataacggatatacggctactgacaaaccagaaacggacacaccagctattgaggaaggtaaagaagtagataaaacacctacttctgcagttaaagtcggtgataccgtcaaagtgaaatttaatgtagatgcatgggcaactggtgaagctattccgcaatgggtaaaaggcaatagttacaaagtacaagaagtaactggaagcagagtattgctagaaggtatcttgtcatggatcagtaaaggcgatattgaattattgccagatgcaacagttgtacctgataaacaaccagaagcaactcatgtggtacaatacggtgaaacgttatcaagtattgcttaccaacatggcacagactatcaaacgttagcggcattaaatggattggccaatccaaatctaatctatcctggtcaagttttgaaggtaaatggatcggcaacaagtaatgtttacacagtccagtttggtgataatttatctagtattgcagcaaaacttggcactacttatcaagctttagctgcattaaacggattagcaaatcctaacttaatttatcctggtcaaacattgaattattaa

SEQ ID NO: 413975 - DNA, 234 bp, Staphylococcus aureus
atgattgattggaaatcaagaataaaaaacaaacaattctggttgtctcttattcctgcagttttgttactgattcaagtagttgcagtcccttttgggtataaatttcaaattgatgtgattaatcagcaattgctagatgttattaatgcagtgtttgttgtattaactattttagggattgtgactgaccatacaacgcctggattatcagacagaaaaggggacaaatag

SEQ ID NO: 413976 - DNA, 222 bp, Staphylococcus aureus
atgaatttaacactagaacaatggttagcgctgattacatttttaggcggaattatcttcgcattaatgaaattctatcatgtcttctctcaattagaggatagcatgaaagaactaaaacaagctgttgaccgattaaataaccatgaggtgcgcattagtcgattggaagaacaaaataaaaccctctttcgaggaattggaggaaataaaaatgattga

SEQ ID NO: 413977 - DNA, 138 bp, Staphylococcus aureus
atgtattcatacgatgacattaagctaatgtttgactgggggctgtttactcctgaacaggtcgcagaatttgtacctagttgtattacagaagaggaatttactaaaatgacaggaaaaccgtttagcaaaagctag

SEQ ID NO: 413978 - DNA, 375 bp, Staphylococcus aureus
atgaaaaaaatatataaagtactctacccagtaggatttcgaattttcgaagttcaagatgattatgttgtagccttgccatttgtagaggagaaaccactagaaaatttagtgaatgaacaatcccaattctataacttttcagaacagaaatgggaagaagcagtgacacaggattatacaaaaaaattgaatttgttagaaaatcttgctaatggcttagaagtttcaaatagtgagttaaaacaagcaaacgaagaacttgctgctaaagcagaattactagcacaaatcaattctaaaacaatgcttacttcacttcaaaatacaaaagaaattgacgctattaaagaacaaatcggaggtgcagaataa

SEQ ID NO: 413979 - DNA, 612 bp, Staphylococcus aureus
atggagttcttattattaattgtcgtagccggactgtattatattatatatttaactgctgtgatgtattctgaaaaaatagtagtattgcctataatcatctatgccattgtgtttgtagtaattggtatcacttatatttttataggtgacagctataatcagttaacaaatttcaatgtgattttgtatatggggagtttgttttatgtatggatggcttttagaaatctttggaacagaccactattactaaaatataagaacattacagatagttcaagtggaatagttaataaatctgaatacaattcagttgaaagcttacgtataaatattgaaatagctaagtataaagggattatttctttgatagtagctatagtactaacggtattaatgacattaaagtcaacacctcaaattactgcggaaacacgtgacttaagtatctcatttttcatactcagcttatttatcattgttatatttgctgtttgggatttaattattagagttagaaaaggagcgtttgcttttgttgtaataaggccaatattattcagttgttggttatttattctgaatatgattttatcgagattattataa

SEQ ID NO: 413980 - DNA, 375 bp, Staphylococcus aureus
atgtacgataaaattttaaaaatgcttactgacacaataaaacagttctcgaatgcgcctatctatcttggtgatgtaatgcaatcgtcagaaccgttttattttgtgttaagtcttgaagagagtctgactgataatgtaggtcaaaacgttcaaaataaagcatacaatgttgatattgcactggttgatagtaagaaagataaacaattagtaacaagcctaacagaaagctgtggggctttttttaatgtgttgaatttggacggaaatgaattgtttccagaagattatcaaacgtttaaaacagacggaattcaacatatcaattttaatgttgcgttcccacaattaattgaatggagtgaaaaatag

SEQ ID NO: 413981 - DNA, 1038 bp, Staphylococcus aureus
gtgggcggcaaagaagttatacctggtcaaaatggtggtggcggttctggagctggaacaggtggttatccatcagaagttacaagcgatgcagataaatttgcttgggacttatggagttacctattagctaatggatacagcaaagcagctgctgcaggtatccttggaaatgtacaaggagaagttggtccaagtatgaacccagataccgaacaaataggcggtccagcttacggatgggttcaatgggacggttcagcatatccattggtaggcgcaccaacttggaatggccgagaatatgtacaacgcttaatcgcagctgcaggtatcaaacaagactataggacgtcattagcccaagctcaattaattaattggtgtatgttcaatgggcaatggttaggacaagtaagtccattaacagttgatgaatttaaagttgtcagctcgcctaaaacagctgcttatgcgtttgaattaaactttgaacgtccagctgcagcacatccagaaagacaaacctatgcacaagtatggtatgacaaattcaaagatttgaaagcttctactgcaacaggaaaagctggcatagaacatttggagaccttaatgggcaaatggcttggtaatgggcaatgttatgccgttccagccgaatattctggttttatgggcggctgtggtttaggtgcaggaacaatttatggcttttcacatgtaattggtgatacatcatctgctgcagatattggtgaagcatatgattggaatgcggtaggttggcgagtaatccaaaatccaacgtatcaagatttagtggtaggagcaatcgtcaatattagacgaggtggccaatggggaacaggttggacagtagacccaacatatggtcacacgggcgtgatttacggcttaaataacggacgtatccaaaccatagaacagaacgccgagcaagggcaaattgtcgcaaaatatgaccgattatattttgctaattctattcaatcgattgttattccaccaaaataa

SEQ ID NO: 413982 - DNA, 288 bp, Staphylococcus aureus
atgacagacattgttaaattaaaacaaggaggaacacaggtatttcctcaaacacattggaatgccgtggaagggaaaccagaagtattaaaaggtgaaaagggagacccaggtccacaaggtccaaaaggagataaaggagacgttggtccgcaaggtccagcagggcaaaatgcaacaacgacagacgttgcaacctcaataaaaaatggcttgatgtctaaagaagataaaacaaagctagatggattgccagcaattacgtttgaaaaggtaggggaagtgtaa

SEQ ID NO: 413983 - DNA, 255 bp, Staphylococcus aureus
atgcatatgtctaaagcaggaatttatgatcaattaacatcagaacatggagagaaattctctgccgaggcagcacaatatgcagttgataatttaaatgcagattataatgaaaatgcccttgcaaaagcaaaaagttatcaagaagatatgtctatgtctcctgatgcaataaaagatcaactgacatctgaatatggagaaaaattcacgcaagaagaagctgactatgcaatacaacatttaaatgagtaa

SEQ ID NO: 413984 - DNA, 309 bp, Staphylococcus aureus
atgttagccgagctaatggatgcacgtgtagacattcaaggagtgcgccataattcaatttctgaacgtttattggcagatatggaatatttgtatcagaaattagagaaacgcttatatacgttagaatatggcgaaataagtgacttgattattttacaagatgatgctttttcactgaatcatgaaacagaaattgttggaacagttgattatcctgcgatcgatggggcattggttatcgcaacagttgatgatacaaaacagaacgcttatgtgtttgaaaaagtgggtgaaataagtggttaa

SEQ ID NO: 413985 - DNA, 321 bp, Staphylococcus aureus
atgaaaggattattcgaagcagtattaaatctagaagttaccaatggtacagaaaaagcctataaaaaagcttttgaacaagaaaacgaacgatatttgaccaagcacactttgagagacggcaacggtaatatcgtcaaagatgagcttaaatcagtttggggtggtaattattgtcacgttgatattttgtattcgttaccaggtaaaaaaagtaaattaactatttcgattgtgtctaggactctgcaaaatgtaaaagatgctgtcactgattatcaaatgctaggcgctgaactggtccataagaattgggagtga

SEQ ID NO: 413986 - DNA, 600 bp, Staphylococcus aureus
atgagcattgttgcattacttatcgggttaggccccttaattggctggggcttcttcccaacagtcgcttcaaagtttggtggtaaacctgtacatcaaattatcggtgctactgtaggtacgttaatcttcgctattatattagccgtagtcacatcaagtggcttccctactggaaccaatttgctattcgccttattatcaggtgcaggatggggattcggacaaatcattacatttaaagcgttcgaattaatcggctcatctcgtgccatgccagtcacaacagcattccaattattaggcgcatctttatggggtgtctttgcattaggaaattggccaggcattggtcataaaatcattggatttacagctttagtcgttattctaattggtgcacgtatgacagtttggagtgaacgcaaagaagcaagtaacgccaaaaatttacgtcgtgcagtggtacttctgttaattggtgaatttggatactggttatattcagctgcaccgcaagcaacttctattgatggcctaactgcctttttacctcaagcaatgggtatggtaattgttcagtcatttatggctttatga

SEQ ID NO: 413987 - DNA, 984 bp, Staphylococcus aureus; identical to SEQ ID NO: 408165

SEQ ID NO: 413988 - DNA, 405 bp, Staphylococcus aureus; identical to SEQ ID NO: 412636

SEQ ID NO: 413989 - DNA, 744 bp, Staphylococcus aureus
gtggactatcaaactttcgaaaaggtcaataaattcataaatgtagaagcgtacatattttttctcactcaagagttaaagcaacaatataaattatcattaaaagaattgttgatattagcatatttttattacaaaaatgaacacagtatttcactaaaagaaatcattggtgacatactttacaaacaatctgatgttgttaagaacattaagtcactatctaaaaaaggatttataaataagtctagaaacgaagcagatgaacgccgtatttttgtttcagttactccaatacaacgtaaaaagattgcttgtgttattaatgagttagataaaataattaaaggatttaataaggaaagagactacataaaatatcaatgggctccaaaatatagcaaagaattttttatactttttatgaacattatgtactcaaaagattttttaaaatatcgatttaatttaacatttcttgatttatctatcttatatgtaatatcatctcgaaaaaatgagatactaaatttaaaagatttgtttgaaagtattagatttatgtatcctcaaattgttaggtcagttaatagattaaataataaaggtatgctaatcaaagaacgatcccttgcagatgaaaggattgtgttaatcaaaataaataaaatacaatataacactattaaaagcatattcacagatacttccaagattctcaaaccaagaaaatttttcttttaa

SEQ ID NO: 413990 - DNA, 936 bp, Staphylococcus aureus
atgagtacagaaaattattcaaattacttacaaaataaggatttagacaatttttctaaaaccggctactctaatagccggttaagtggtcaaactttgggaaaatctcaacccgaattaagttttgatgcaatgacaatcgttgggaatttgaacaaaactaatgctcacaagctatctaattttatgagtttagaaccgcaaataagactttgggatatactacaaaccaagttcaaagctaaggctcttcaagaaaaagtttatatcgagtatgacaaagtaaaagcagatacatgggatagacgtaatatgcgagttgaatttaatccgaataaactcacacatgaagaaatgctttggttaaaacaaaatattattgactacatggaagatgacggttttacaagattagacttagcttttgattttgaagatgatttgagcgattactatgcaatgactgataaagcagttaagaaaactgttttttatggtcgtaatggtaaaccagaaacaaaatactttggtgttcgtgatagtgatagatttattagaatttataacaagaaacaagaacgtaaagataatgcagatgttgaggttctgtctgaacatttatggcgtgtagagattgaactaaaacgagatatggtggattattggaacgattgttttaatgatttgcacatcttgaaacctgcgtgggctaatttagaaaagattaacgagcaagctatggtttatgctttgttgcatgaagaaagtatgtggggaaaactaagtaagaatactaagactaaatttaaaaaattgattaaagaaatatctccagttgatttaacggaattaatgaaattgactttgaaagagaacgaaaaacaattgcaaaaacagattgatttttggcaacgtgaatttaaattttggaaatga

SEQ ID NO: 413991 - DNA, 195 bp, Staphylococcus aureus
atgtttgggttagcaacagaaactttttcaatcggaacaacaataatcactattcttaatattcttttagttattttggttgtttacattatcaaattaatttcaaatcatttttctaaagttaagcaattagaaaaagatgttgatgaattaaaaaatgaacgttgtaataacgaaaatcaaaataagaaatga

SEQ ID NO: 413992 - DNA, 1269 bp, Staphylococcus aureus
atggcgtattctattatcagagttgctaaagtgaaatcaaaaacgaatacaaaaggcattcaaaaacatgtacaaagacaaaataaaaattatgaaaatatggatattgatttagaaaaatcatacttaaattacgatttagtcaatgatagtccgattgattataatcaaaaaatcgaagagaaaattgaacaaaattataatgggaaacgcaaaattagaaaagacgcagtaaaacatattgatggtttaattacatctggtaatgaattttttaaaaatcaaacacttgaagaaacaaagcagttttttgaacatgctaaaacgtttttagaacaagagtatggaaaagataatttattatatgcaacagtccatatggacgaaaaaacacctcatatgcattatggggtagttccgattacagaagatggtcgattgagtgcgaaagaggttttaggtaataaaaaggcactaactgaatttcaagatagatttaacgaacatatcaatagttgtggttatgacttgagtagaggtataacaaggggcgttacaccgagacgacatgagcagataagtcgttataaaaatttaacagattatcacaaagaagaatatgagcatgagagccgaaaattagaccgtataaagcaagaaagcgaagaagtaatggaacagtatcaaaatgctttagatgttctaaaaaagcctataaatgtcccatatgagcttgaaactgaaaaagttggtggactgttcaacaaagaaacacaggaaacaggtaacgtcgttattgataaaaatgaatttgatttattgcaggaacaagtaaaagcttctcaactcattactgatgattatgaatatattaaaagcggaaaagctttaaaagattttgaggaaaaaaacaaaagattagaagatagattattagacgaacagattaaaaatggaaaagtaatagatgaatacaatgatttagcggatagttataataatttattggaacaaaatcaagaaaaagaaaaagagttaaaccgttcgtataaactatttaacaatgtgtttaagttgattaaaggtgtgatgaaagaagaaacatatcattcgttgattaaccatattgataatcacttagaaagctcaaaaatgcgagaaacaatgattgtagatgataacgatgaacaattctttaagaaaaaatatcaaaggcatgaaccagaaattatttttgaagatgaacgagatgatggctacactttataa

SEQ ID NO: 413993 - DNA, 999 bp, Staphylococcus aureus
atgcaatttaatactacaagatatatagacgaaaatcaagataacgaaacattgaaagatatgactaaaagtgggaaacaacgcccatggagagagaaaaaaatcgacaatgtaagttatgcagatatactggaaattttaaaaatcaaaaaggcttttaacgtaaaacaatgtggtaacgtcttagaatttaagccgactgatgaagggtatttaaaactttataaaacatggttttgtaagtctaaattatgtccggtttgtaattggaggcgttcaatgaaaaatagttatcaagctcaaaaagtcattgaagcagtggttaaagaaaagccaaaagcacgttggttgttcttaacactttcaacaaaaaatgctatagacggtgatactttagaacaaagtttaaagcacttaactgaatcatttagaagattatttaaatataaaaaagttagtaaaaatttaattgggtttatgcgttcaacagaagtgaccgttaataaaaatgatggcagttataatcaacatatgcatgttttattgtgtgtggaaaatagttattttaagaataaagctaattatataacgcaagaagagtggatcaatttatggcaaaaagcacttcaagttgattacaaacctgttgcaaatatcaaagcaattaaaccgaataaaaaaggcgataaagatatacaagctgcaattaaggagacatcaaaatactcggttaagtcgtccgattatttaacaggaaaccatgaaaaagacgcagaaattgttcaagatttagaacaaggtttatacagaaaacgtatgctaagttacggtggtttacttaaacaaaaacataaacttttaaatttagatgatgccgaagatggtaacttaattcaaacaagtgatgaagaaaaaacgacagaagaagaacaaaaagctcattcaattacggcaatttggaattttgaaaagcaaaattacttcttaaaaaatttgtaa

SEQ ID NO: 413994 - DNA, 228 bp, Staphylococcus aureus
atgccagaacaaaagaaagataatacacaacttttcataattttaggatggatttgcacaggtctatcactagttttcataccaattttatttggtgctggtggagtaatctttggatatctactaagaagtaaaaaccaagtacaacacggaactataatgatgatagcagcagttgcatgtgcaattttagggttcctactaggtatggcaacagcaggctattaa

SEQ ID NO: 413995 - DNA, 582 bp, Staphylococcus aureus; identical to SEQ ID NO: 412815

SEQ ID NO: 413996 - DNA, 291 bp, Staphylococcus aureus
ttgaaaaactacagcaatggtgatgtctcaattaatgagaatgttccaagttatgacgtgaaatataaaatgagtaataaagatgaaaatgttaagcaattaagaagtcgttataatattcctactgataaatcaccggtattaaaaatgcatattgatggtaatttgaaaggaagttccgttggagataggaagttagaaattgatttttcgaaacgtgaaaatagccatttatcagtaatagattctttggattaccagccagcgaaaactaataaagatgatgaataa

SEQ ID NO: 413997 - DNA, 363 bp, Staphylococcus aureus
gtggtagcaagtgaacatgcgattgaaaaatggaacatcattagaccaccatttaatgtgacacgtatatctgaatacgcagcagttgcagcacttgaagatcaacaatatttaaaagaggtaacacataaaaatagtgttgaacgcgaaagattttatcaattacctcaaagtgagtatttcttgccaagtcaaacgaattttatatttgtaaaaacaaagcgggtaaatgaactttatgaagcacttttaaatgtagggtgtattacgcgaccatttccaactggtgttagaattacaattggttttaaagaacaaaatgataaaatgttagaagttttatcaaattttaaatacgaatag

SEQ ID NO: 413998 - DNA, 174 bp, Staphylococcus aureus
atgtctgaatgtggacgatatttagagatagtacgtgccgttgaaccactttcagtagcagctacaattgctttaacatttaagtttaaagctgtatgtgcaaccgaaataccgatagcattcactaatgaagtttcaactaatttagtacgatctgacaataactttttataa

SEQ ID NO: 413999 - DNA, 900 bp, Staphylococcus aureus; identical to SEQ ID NO: 406993

SEQ ID NO: 414000 - DNA, 429 bp, Staphylococcus aureus
atgatgggttatttaaaaagacttgtattgtacatagttattatggttatgagtgtttttataataggttgtgataaatcaagcgatactgcagaaaatccaaaagaaggttcaaaagaagcacaaattaaaaagagtttttcgaaaacgttagatatgtatccaattaagaatctcgagaatctatatgacaaagaaggatatcgtgatggcgaatttaaaaaaggtgataaagggacttggacaatatcaacagattttgctaaaagcaacaagcaaggtgaaatgaatagcgaaggtatggtactacattttaatagaaatacgaggacagcaacaggatattatactgtaagaacaacttatgatgaagtggataagttggcacgcgaaaaaaatatcgtgttgaatttaaaaacaataagatag

SEQ ID NO: 414001 - DNA, 771 bp, Staphylococcus aureus
atgaaaactattaaaatggttgctgatgaattgaatgtaactaaacaaactattgttaataatgctaaaaacttaaatatatcttttaaaaaagaaaatggaattaattatattaatgataatgattgtttaaaaattatagaaaagatcactaagaaagaaaggacaatgcaaaataaagaatcaataaaaaaagaaagatttaatgaaaatactgcagagtttgaaaagcatatatacaataattcaaatggttttgagtcattaaaaacaaaagtaaatgaattagaaaagcaaatagaaatctttgaaactagagctaaaaatgatgaaaaatatattgagaatttaactaaacaactagatcaacaaaatagcaatgttaatacattaaataaactgttggagaatcaacaaatattagctttagaaagtaataaaaagattcaaaaactagaaaaccaattagaagaagaaagacagcttaattactcttttgatacagcgactaatgatagacaaagcattaatccgcaagaagcaacttttactgaagaatatcaaaatagtaaccaacaacaaaagaaaatacaaccaatagaagcagaattaaatcataagggcataactaaagcgaaaaaggatgacagtgcaaacgaagacgtattaaagagagatgataaactatctgaagaaatagagagtggacctgaggacagggaagtagaaacacctaaaaaggggttttggagtcgtttgtttggtagctaa

SEQ ID NO: 414002 - DNA, 147 bp, Staphylococcus aureus
atgcaatacaatactactagatatatagacgaaaatcaagataacgaaacactcaaagatgttacaaaaagtgggaaacaacgtccgtggagagaaaagaaaatagataatttaaggttctgttgcaaagttagaaatatagtataa

SEQ ID NO: 414003 - DNA, 357 bp, Staphylococcus aureus
atgactgtgtttagagaaggtacgatcgatactaggttcaatcacttgtttaattgcttgttgtatcactctgtctcttacgacaggtataccaagcacacgctttttcccatttgctttgggaatttcaactttcttaactgcttgaggtttgtatgtaccttcaagcagtttttgttttatttttggaaagtattgcgcaaagtgaccttgtatttcactcactttcatgccatcaatgccaggggcacctttattctttttaactttcttaattgccttttgaatgttgtgttctcttacaacaagctccatcatcgatggagactcacgatacatttctttcatttcacctaa

SEQ ID NO: 414004 - DNA, 501 bp, Staphylococcus aureus; identical to SEQ ID NO: 410354

SEQ ID NO: 414005 - DNA, 390 bp, Staphylococcus aureus
atgggttatttatcttcacgttatttaactaaatacttgaactataagtttgtgtcagaaatttgtttaataatatttttaataatatatacatatcaaagtttcatagcagttactatttctatgatatttttaggtatttcttcagggttaactcgtccacaaactataaataaactttctagcagtagtaacttaagagtgatgcttaattatgcagaaacgttatattttatttttaatatcgcatttttacttattggtggttatctatattcaattggaactattcaatatttaatgttatttatgtcattattgacatttatatatttactaacattattttatttaaggagagatcaacatgaaaatcaacacagaatttaa

SEQ ID NO: 414006 - DNA, 369 bp, Staphylococcus aureus; identical to SEQ ID NO: 408582

SEQ ID NO: 414007 - DNA, 285 bp, Staphylococcus aureus; identical to SEQ ID NO: 408833

SEQ ID NO: 414008 - DNA, 339 bp, Staphylococcus aureus
atgcgtaatgctttagatgctaatgacagaccattatttgatgctaacgggaacgagattatgggattaccactatcttatactggagcggatgtatacgacaaaaagaaatcgttagcactaatgggtgattgggattacgcacgttacggtatcttacaaggtattgagtatgcaatttctgaagatgccacgttaacgacgttacaagcatcagatgcttctggccaaccagtatcattatttgaacgtgatatgttcgctttacgtgcgacgatgcatattgcatacatgaacgttaaaccagaagcgttcgcaacgcttaaaccaactgaatag

SEQ ID NO: 414009 - DNA, 195 bp, Staphylococcus aureus
atgttaaaagaggttgagtttataaatcaatcacaacagaaattaggacacgttgacttttgcttcttagagttattaaagaaaggttataacagggatgcaattatcaagaagatgcctaactctaaattgaacagaaataacttcttagcacgccgtgatgaattagcagaaaagatttatctattacagtga

SEQ ID NO: 414010 - DNA, 147 bp, Staphylococcus aureus
atgcaagacaatcatacaaaatatatagacggaaatcaagataacgaaacactcaaagatgttacaaaaagtgggaaacaacgtccgtggagagaaaagaaaatagataatttaaggttctgttgcaaagttagaaatatagtataa

SEQ ID NO: 414011 - DNA, 306 bp, Staphylococcus aureus
atgaagttaacaaaaaaacagctaaaagaatatatagaagattacaaaaaatctgacgacatattaattaatttgtatatagaaacatatgaattttattgtcggttaagagatgaacttaaaaatagtgatttaatgatagagcatacaaacaaggctggtgcgagcaatattgttaagaatccattaagcatagaactgacaaaaacagttcaaacactaaataacttactcaagtctatgggtttaacagcagcacaaagaaaaaagatagttcaagaagaaggtggattcggtgactattaa

SEQ ID NO: 414012 - DNA, 147 bp, Staphylococcus aureus; identical to SEQ ID NO: 414010

SEQ ID NO: 414013 - DNA, 183 bp, Staphylococcus aureus; identical to SEQ ID NO: 411580

SEQ ID NO: 414014 - DNA, 258 bp, Staphylococcus aureus
gtgtttaagtgcttagaaaatggatttgatacagatacacttgagggcattcaatcgagtaatactgatgtgatagcgaatattgaaatgttgtatcagttagctacgggaatcaatgaaccagtaccagagttagttgaggggttaaaattagtaactgagtttgtacaagatgagaatgcgacacaagaggattacaaggcgttagaacgtaaattgaatgatctaaaagcgtcttattatagtataagtaaataa

SEQ ID NO: 414015 - DNA, 147 bp, Staphylococcus aureus; identical to SEQ ID NO: 414010

SEQ ID NO: 414016 - DNA, 675 bp, Staphylococcus aureus; identical to SEQ ID NO: 406085

SEQ ID NO: 414017 - DNA, 762 bp, Staphylococcus aureus; identical to SEQ ID NO: 406083

SEQ ID NO: 414018 - DNA, 735 bp, Staphylococcus aureus; identical to SEQ ID NO: 407375

SEQ ID NO: 414019 - DNA, 387 bp, Staphylococcus aureus
atgggttttgtatcttcacgttatttaactaaatacttgaattataagtttgtgtcagaaatttgtttagtaatatttttaataatatatacatatcaaagtttcatagcagttactatttctatgatatttttaggtatttcttcagggttaactcgtccacaaactataaataaactttctagcagtagtaacttaagagtgatgcttaattatgcagaaacgttatattttatttttaatatcgcatttttacttatgggtggttacttatatacaataggaactattcaatacttaatattatttatttcgttattaatttttatatatttaataataatattttattttacaaggagagagcaacatgaaaataaaaactga

SEQ ID NO: 414020 - DNA, 501 bp, Staphylococcus aureus; identical to SEQ ID NO: 410978

SEQ ID NO: 414021 - DNA, 501 bp, Staphylococcus aureus
atgactttcgaagaaaaattaagtgaaatgtatagcgagattgcgaataagattagcagcatgataccggtagagtgggaaaaggtatatgcaatggcatatatagatgacggaggaggagaagtgttctactattacacagaacctggaagtaatgaattatactactatactagtgtattaaataaatatgatatatcggaatcggaatttatggattcagtgtatgagttgtataaacaatttcaaaatttaaggaatttatttaaagaagaaggacatgaaccatggacatcatgcgaatttgactttacaagagaaggtgaattaaaagtttcatttgattatattgattggataaattcagaatttggtcaagtaggtcgacaaaattactataagtatagaaaatttggaattttaccagaaacggaatatgaaattaataaagttaaagaaatcgagcaatatgttaaagagcaagaagaagctgaacaatag

SEQ ID NO: 414022 - DNA, 480 bp, Staphylococcus aureus
ttgcaaatttacttcttagctgaacgttttaaagaacaaaagcgtatgtttgaatatggtggtggctttgtccaagatcgatcaatttatgaagatgttgatatttttgcaaaaatgcatgaagaagaaggcacaatgagtaaagaagatttcaaaacatattcagacttatttaatgccatggtcatgacaccttattttcctaaacctgatgtaatgatttatttagaatgtaactatgatgaggtcattgatcgtattattgaacgtggtcgcgaaatggaaattaatacagaccctgaatactggaaaaagctatttaaacgctatgacgattggattaatagctttaatgcatgtccagttgtacgtatcaatattaatgaatatgatatccataaggaccccgaatctttaaatcctatgataaacaaaattgctcgaattattcaaacatatcgacaagtagatacacgataa

SEQ ID NO: 414023 - DNA, 189 bp, Staphylococcus aureus; identical to SEQ ID NO: 410786

SEQ ID NO: 414024 - DNA, 147 bp, Staphylococcus aureus; identical to SEQ ID NO: 407426

SEQ ID NO: 414025 - DNA, 546 bp, Staphylococcus aureus; identical to SEQ ID NO: 408642

SEQ ID NO: 414026 - DNA, 486 bp, Staphylococcus aureus; identical to SEQ ID NO: 408643

SEQ ID NO: 414027 - DNA, 675 bp, Staphylococcus aureus; identical to SEQ ID NO: 408718

SEQ ID NO: 414028 - DNA, 675 bp, Staphylococcus aureus; identical to SEQ ID NO: 408718

SEQ ID NO: 414029 - DNA, 735 bp, Staphylococcus aureus; identical to SEQ ID NO: 408719

SEQ ID NO: 414030 - DNA, 618 bp, Staphylococcus aureus; identical to SEQ ID NO: 411779

SEQ ID NO: 414031 - DNA, 348 bp, Staphylococcus aureus; identical to SEQ ID NO: 411780

SEQ ID NO: 414032 - DNA, 675 bp, Staphylococcus aureus; identical to SEQ ID NO: 408718

SEQ ID NO: 414033 - DNA, 768 bp, Staphylococcus aureus
atgaatacgaaccatcaaaaattactcaataactttgaaatattaaaactaaaaaaattcaaggattattatccaaactatattgaattactttctaaaaatgagaaatctttaactgaaatattgattgatttaacggaaaaagaaatagaataccaatcagaattaaaatttaaacgtgctgtgaattcagcacgtttccctaaaataaaatatttacatgattttgatttcatgtttcaacctagtataaatcaacaagaaatactcactttaaaatctatgcattttttagaagatagtataaatatttgtttcttaggtaatagtggtgttggtaaaacgcacctagcaatctcattaggaatagaggcatgtaagcaaaatataaagactagattctatactttcaaagaattaatagacttattaactgtctcagattccaaaggaatcattaataaaacattaaaacaattaagcagaatagagttacttatcattgatgaaattggttatactcccatcaccaaagaacaagctgatttattctaccagttaatgtcactaaggtatgaatggaaatcaacaataattacgactaatattccattttcaagttggggagagtcatttagtaataagattgtatcagcagctataattgatcggttagttcaccattcaaaagtatttaaaattactggagaatcatatcgattaaaagattataaaaccgaaaaatcattaaatatacgacaatcttaa

SEQ ID NO: 414034 - DNA, 576 bp, Staphylococcus aureus
atgatttcacacttgataacggatacttcgaagaagaaacatcagacagcgactcagattcagacagcgactcagattcagacagcgactcagactcagacagtgattcagattcggatagcgactcagattcagatagcgactcagattcagatagcgattcagactcagacagcgattcggattcagatagtgactcagattcagatagcgactcagattcagacagcgactcagattcagacagtgattcggactcagatagcgattcagactcagatagcgactcagattcagatagcgattcggattcagatagtgactcagattcagacagcgactcagattcaggcagcgactcagattcagacagcgactcagactcagatagtgattcagactcagatagcgactcagattcagacagcgactcagactcggatagtgattcagactcagatagcgactcagactcagatagtgattcagactcagatagcgactcagattcagacagtgactcagattcagacagtgactcagatgcaggaaaacatacacctgttaaaccaatga

SEQ ID NO: 414035 - DNA, 837 bp, Staphylococcus aureus
atggtagataacaaagcgcaatattcgtttttaaaattactcgaccatatgtttgaaaatgaagcatacaaatacttatctacaggacaactagaacaaatcccacatattactgctgaaacactatatcatacatatcaatcaatgattaataatgatcaatgttctgtttatgttgtcggcaatgtagaacctgaaagtgttgagaaacaaatacgtgaaaaatttgcacttaaaccattcgataaacatcaattccaacattctactcatcatttacacgatgaagaagttgattatattgttgaatatgatgacgtggatcaagctaaattaaatatgggataccgttttccaacacaatatggtcaaagtggatatgctgcctttgttgtatttaacatgatgtttggaggagatccttcatctgttttatttaatgaagtgcgagaaaagcaaagtttagcgtactctatacattcacaaattgatggcaaaaatggctatttatttgttttgagtggggtttcaagcgataagtacgaaactgcaaaaaacactattataagtgaatttgaaaaaataaaagcaggagatttcactgaagaaaaattagagttagctaaaaaagtaatcatttctcatcgatatgaatctgaagatcgtccgaaaagtgttatagagattatgcataaccaaatattattagagcaaccacaaagcaaagaaacatttataaaagatatacagaaggtaagtcgcgaagatattgtttctgttgctgaaaaagcatttttagatacaatctatgtgttgacaaaaggaggggataaataa

SEQ ID NO: 414036 - DNA, 564 bp, Staphylococcus aureus; identical to SEQ ID NO: 406429

SEQ ID NO: 414037 - DNA, 759 bp, Staphylococcus aureus
atgttggaatttaaagctggaaagattaataaacatgttttatatagtgatattttaaatagagatgtcacactaagtatttatttgccagaatcttataatcaacttgttaaatataatgtcattctttgctttgacggattagattttttacgtttcgggagaatacaacgtacatatgaatcgttaatcaaagaagcgcgtattgatgatgcgattattgtcggattccattatgaagacgttgataagcgtagagaggaatttcatccacaaggaagtcgttctcatttaactattcaatcagtcggtaaagaaatattgccatttattgactcgacgttttctacactgaaagtaggtaatgcaaggttattagtaggggatagtttagcgggtagtattgccttattaacggcgttgacctatccaacgatttttagtcgtgtagcaatgttaagtccacattcagatgaaaaagtattagataagctaaatcaatgtgctaataaagaacaattgacaatttggcatgtcattggtctgaatgaaaaagatttcactttaccaacaaatggtaagcgtgctgatttcttaacaccgaatagagaattagctgaacaaattaagaaatataatataacttattattacgatgaatttgaaggtggtcaccaatggaaagattggaaaccattgctgtcagatatattattgtattttttaagtaaaaacacagatgatcaactttatgaataa

SEQ ID NO: 414038 - DNA, 426 bp, Staphylococcus aureus
atggcagaaaaatttaagataataatgacagaagcattgtctttatatatttgggggtgcaacattttgaatactgagaaattagaaacattgcttggcttctataaacaatataaagcattatctgaatatattgataaaaaatataagttgtcgctaaatgatttagcagtcttagatttaacgatgaagtattgcaaagatgaaaaagtacttatgcaatcatttttaaaaactgcaatggatgagctagatttaagtaggacaaaattattagtttctataagaagactaattgaaaaagaaagacttagtaaagttagatcatctaaagatgagcgtaaaatttatatttatttaaatgatgatgatatatctaaatttaatgctttatttgaagatgtagaacaatttttaaatatttaa

SEQ ID NO: 414039 - DNA, 261 bp, Staphylococcus aureus
atgaagaaggttatggaagcatcgcaacatgttcataaaattttattacagcatttaacagaaaaagcgcttgtactaggtccatctccggcagcacttgcgagaatcaacaatgaatttagattccaaattttagtgaaatataaaagtgaacctggattattacaagccattcaatttttagatgactattaccatgaaaaatttataaaagaaaaattagcattgaagattgatattgatccacagatgatgatgtaa

SEQ ID NO: 414040 - DNA, 126 bp, Staphylococcus aureus
atgaaaaaagtaatggggatattattagcaagtacacttatcttaggtgcttgtggacatcatcaagatagtgcaaaaaagagagcactagtcacaaaaagaaagaaaatgacaatgaagaattaa

SEQ ID NO: 414041 - DNA, 351 bp, Staphylococcus aureus
atgtatcaactacaatttataaatttagtttacgacacaaccaaactcacacatctagaacaaaccaatatcaatttattcattggtaattggagtaatcatcaattacaaaaatcaatttgtatacgtcatggcgatgatacaagtcacaatcaatatcatattctttttatagatacggcacatcaacgcattaaattttcatctattgataatgaagaaatcatttatattcttgattatgatgatacacagcatatcctcatgcaaacgtcatccaaacaaggtattggcacttcgcgaccaatcgtttatgagcgtataactaatttaaatgatttcacttcataa

SEQ ID NO: 414042 - DNA, 2064 bp, Staphylococcus aureus
atgtcaataccaattaatttgcctacaaacagtactatgattaatgaattatgtacattacaaagtagaactataaacataaaaggagaagtgctaataactgaaatatatgatgattactttttaaaaaatgatgaatggcacatttcagcttttaacaagttcgagcaatttcaagatagtatcaagaactataaagacaaaagaaaaaatattttctttaggattaaaagtgaaaatttgaatttagaatttaaatacctttttttgaaacttatagttaaagaggattggtctttatctaatgtatttaatactggagcagtgaaacttaacaagattgctgagttctttaatgaagtttatccaaatttaaattctttactagattgtgatattaatatgttagaaaagtactggtttagttggttgactaaaaataatatacctataaaaagaaaatcatcaacaatagtttttggtgattatgaacataaaagtggactagcttcttttttaaagaatatgtatattaatctaaataaatttattgataagcgagaagaatgggaaaaagataaatgggatattagaaatttagaaaaatatggattgagttataataaaacactaactggtaattatttgaactttgaaaaaattgagtcaattaaaatgcgagaattagcaaaaaaatatttaaaaaatcgtttgataactggtgatatagcatttgctacagcaagattttatataagagttttgactaggttttttcaaaatatatctaaaaataaagaaacaaggaatagtttaaatgaactagatagatgtcatatcgaagcatatatagaatttttatttgaatatgctaatagtaaaaatgtgcaaagttctaggaacttcgttagagaagaattaaaagcaattagaaggttcttaaatgatattgctagtcaaaattatgatatagccccctctgaagatatacgttttttaatttatcctcaagactttcctaagcgcgaaaagaaaaatagtagccaaattgattatatcccagattttgtattggaacagctttttgagcatataaatgatttgcacaaagatttaatacctgtagtttggatagcttttaaaacaggactaagaatttctgatgtattaacattaaaaaataattgtcttgcaaaagttaatggaaagttttcaataattactgatattgctaaaacttttgttaaaggacataggataccaatcgataatgaattagctgatatagtagcagttttaatagccaattctaaaattaaaagtacaaaagataacaaccctaataattatatttttgctattcataaaggaaaaagaaaaggaatgccctttacacagcatatggtcagagcacacttaaatcatttagcaaaaacaaaaaatattcttgatgaacaaggtgaagtcttccatttcaaaactcatcagtttagacatacttatgcagtgaaattgttaaatggtggagcagatatattaaccatacaagaattattagcacattcctcaccagaaatgacactcagatatgctaagttacttgatgatacaaaaagaaaggcttttgaatcagttattgatcaaggggcttttagttttgatgttgacggtaaaattaaaaatatacagcatagtagtgaattatcagaaaaagcattgaattctttatggcaagaacataaattaaacgcaatggacaatccttatggtacttgtcatgctagattgagcggtgattgtccatatatggaagctccgccatgcttaacttgtaattctgggaaaccatgtaaggatctagctattggattttctgatttagatgttgaaaaatatgaattacatatcaaatcaacggtcaaatccatagaattagctaaaaataataatagacaagatatagttgaaaaacatactaatatattaaataaatatgaagaaatattaggtaatataaaagatggaaacattatattcgggagaagtaatagaataaaagtatag

SEQ ID NO: 414043 - DNA, 795 bp, Staphylococcus aureus; identical to SEQ ID NO: 409353

SEQ ID NO: 414044 - DNA, 483 bp, Staphylococcus aureus
atggcgggcataaatacgaaagtgagaatagacggtaagttgatgacgcttattgatgcatctgataaatacgacatcaaagtatcgacattgattactagacacactaaaggtttaagaggtcaagaattaatacaaaatctagcgaaagctaaaaaagtagaaattaacggcaagatgatgactgttaacgaaataactaaaaagtacaacataagcaaagggctacttaactacaggattggcaaggggttaactggtaacgcactcattgcaccaccgcaagaaaagaaaacgtttagagataacggaagaatcacgcaagaggaaagacgcatattgtcagaaattgacgctagacacgagcaagaactgcgagacaagaagaaagcagaaaagaatgagaaagagcgtcaacgtttagcaatgattgaaaagtataaacgacgtgatccgtactggtttgatgtcacttataactaa

SEQ ID NO: 414045 - DNA, 255 bp, Staphylococcus aureus
atgagcataatcagtaacagaaaagtagatatgaacaaaacgcaagacaacgttaagcaaccggcgcattacacatacggcgacattgaaattatagatttcatcgaacaagttacggcacagtacccaccacaattagcattcgcaataggtaatgcaattaaatatctgtctagagcaccgttaaagaatggtcatgaggatttagcaaaggcgaagttttacgttgatagagtgtttgacttgtgggagtga

SEQ ID NO: 414046 - DNA, 609 bp, Staphylococcus aureus
atgaaagggagtagtccaatgagaaaaaagagtggtccaattaacaagcgtgtagattttctctctaaccgattgaacaaatattcgattagaaaattcactatcggtacagcttcgattttagtaggttctacgttaatttttggtattggtagcggtgaagctaaagctgacgaaaaagtttacaccaataatgaaaatggtactaaaagtaagcatgaaaagagcgaagtagaaagcgcaccggaagcgaaagctactgaaagtgtgcaagaaacgaacaaagtagaaagcgcaccggaagcgaaagctacagaaaatgtgcaagaaacgaacaaagtagaaagcgcaccggaagcgaaagctacagaaagtgtgcaagaaacgaacaaagtagaaagcgcaccagaagcgaaagctacagaaagtgtgcaagaaacgaacaaagtagaaagtgcacaacaacaagataaaggaaaatcagtagaggcaaatgaaaagtctttttatgatttaagtaaaaaaattgatcaagcagttaataaaaaagaagttgtggaaaagcaagttaaaaagcaattttcgagtgtattatctgaaaaaaaataa

SEQ ID NO: 414047 - DNA, 588 bp, Staphylococcus aureus; identical to SEQ ID NO: 405804

SEQ ID NO: 414048 - DNA, 195 bp, Staphylococcus aureus
atgtcagttcgaggaataaataaagttaaacgagagctaggttttgtattaatggcacttaatataaggaaaatagcagctcaacgagctgtacattataaaatacatatcaaaaaagctgatttctatcaaataattaatagaaatcagctttttacattgcctaagaacttaatgtcccagcctccttcataa

SEQ ID NO: 414049 - DNA, 798 bp, Staphylococcus aureus
atgtatcataacagtaacgcaaactttgtaaatggtatcactttaaatgtgagagataagaatgaattaaagccattttatgaggacgtattaggattaaatattataaatgagacattaacatcgatacaatatgaagtaggtcaaaataatcatgtcattacacttgttgaattacaaaatggacgtgaacctttaatgtccgaagcgggactgtttcatatcgcaattaaactacctcaaattagtgatttagctaatttactaattcatttaagcgaatatgatattccagttaacggaggtatacagcctgcttcgttatcattattttttgaagacccagaaggaaacggttttaaattttatgttgataaagacgaagcgcaatggacgaggcaaaatgatttagtaaaaattgatattagaccattaaatgtaccgagattagtgagtcatgcaacaaaattgttatggttaggtattccagatgacgctattataggtgcattgcatattaagacaattcatttatcagaggtaaaagagtactacctcgattattttggattagagcaatcggcatatatggatgattattcaatatttttagcatcgaatggctattatcaacatttggccatgaatgattgggtatcagcaacgaaacgtgtagaaaattttgatacgtatggattagcaattgttgactttcattatcctgaaacaacacatttaaatttacaaggtccggatggtatctattatcgctttaatcatatcgaagttgaagattag

SEQ ID NO: 414050 - DNA, 2754 bp, Staphylococcus aureus
atggattacaaagaaacgttattaatgcctaaaacagatttcccaatgcgaggtggtttaccaaacaaggaaccgcaaattcaagaaaaatgggatgcagaagatcaataccataaagcgttagaaaaaaataaaggtaacgaaacattcattttacatgatggcccaccatacgcgaatggtaacttacatatgggacatgccttgaacaaaattttaaaagactttattgtacgttataaaactatgcaagggttctatgcaccatacgtaccaggttgggatacacatggtttaccaattgaacaagcattaacgaaaaaaggtgttgaccgaaagaaaatgtcaacagctgaattccgtgagaaatgtaaagaatttgctttagaacaaattgaattacagaaaaaagattttagacgtttaggtgttcgtggtgactttaatgatccatatattacattaaaacctgaatacgaagctgcacaaattcgtatttttggagaaatggcagataaaggtttaatttataaaggtaaaaagccagtttattggtctccttcaagtgagtcttcattagcagaagcagaaattgaatatcacgataaacgttcagcatcaatttacgttgcatttgacgttaaagatgacaaaggtgtcgttgatgcagatgctaaatttattatctggacaacaacgccatggacaattccatcaaatgttgcgattaccgttcatcctgaattaaaatatggtcaatacaatgtaaatggcgaaaaatatattattgcagaagccttgtctgacgctgtagcagaagcactggattgggataaagcatcaatcaaattagaaaaagaatacacaggtaaagaattagagtatgttgtagcacaacatccattcttagacagagaatcgttagtgattaatggtgatcatgttactacagatgctggtacaggttgtgtacatacagcaccaggtcacggggaagatgactatattgttggtcaaaaatatgaattgccagtaattagtccaatcgatgataaaggtgtatttactgaagaaggcggccaatttgaagggatgttctatgataaagctaataaagccgttactgatttattaacagaaaaaggtgcactattaaaattagactttattacacatagctatccacacgactggagaacaaaaaaacctgtaatcttccgtgctacaccacaatggtttgcctcaatcagtaaagtaagacaagatattttagatgcaatcgaaaatacaaacttcaaagtaaattggggtaaaacacgtatttacaatatggttcgtgaccgtggcgaatgggttatttctcgtcaacgtgtgtggggtgtaccgttaccagtattttatgctgaaaatggcgaaattatcatgacgaaagaaacagtgaatcatgttgctgatttatttgcagaacacggttcaaatatttggtttgaaagagaagcgaaagacttactaccagaaggatttacacatccaggcagccctaacggtacatttactaaagaaacagacattatggacgtttggtttgattctggttcatcacaccgtggcgtgttggaaacaagaccggaattaagtttcccagcggatatgtatttagaaggtagtgaccaatatcgtggttggttcaactcttctatcacaacttcagttgctacaagaggagtatcaccttataaattcttactttctcatggttttgttatggacggtgaaggtaagaaaatgagtaaatctttaggtaatgtgattgtacctgaccaagtggttaaacaaaaaggtgctgatattgcgagactttgggtaagtagtacggactatttagctgatgttagaatttctgatgaaattttaaaacaaacatctgatgtttatcgtaaaatcagaaatacattaagatttatgttaggtaacattaacgatttcaatcctgacacagatagcattcctgaatcagagttattagaagtggatcgttacttgctaaatcgtttacgtgaatttactgcaagtacgattaacaactatgaaaactttgactacttaaatatttatcaagaagttcaaaactttatcaatgttgagttaagtaatttctatttggattacggtaaagatattttatatattgaacaacgtgattctcatatccgtcgtagtatgcaaacagtgttatatcaaattttagttgatatgacgaagttgttagcaccaatcttagtgcatacagctgaagaagtttggtctcatacaccacatgttaaagaagaaagtgttcacttagcagacatgcctaaagttgtagaagtagatcaagctttattggataaatggcgtacatttatgaatttacgtgatgatgtgaaccgtgcattagaaactgctcgtaatgaaaaagttattggtaaatcattagaagctaaagttacgattgctagtaacgataaatttaatgcatctgaattcttaacttcatttgatgcattacatcaattatttatcgtgtcacaagttaaagttgtagataagttagatgatcaggcaacagcttatgaacatggtgatattgtcatcgaacatgcagatggtgaaaaatgtgaaagatgttggaactattcagaggatcttggtgctgttgatgaattgacgcatctatgtccacgatgccaacaagttgtaaaatcactggtataa

SEQ ID NO: 414051 - DNA, 618 bp, Staphylococcus aureus; identical to SEQ ID NO: 405765

SEQ ID NO: 414052 - DNA, 1647 bp, Staphylococcus aureus
atgaattcttcttcaccagagaatccaaatggaaagaagtattcaccagtcttcatctatagtgcaattgttgttgctatagtcgtattacttggtgcatttttacctgaacaattcaactatgttaccaataatattaaaatgtggattacagaaaagttaggttggtattatcttattcttactacgattatcgtgttcttctgtatattccttatttttagtcctattggaaaacttaaactaggtaaaccaaatgacaaacctgagtttaatacaatttcatggtttgctatgttgtttagtgctggtatggggataggtttggtgttttatggtgcagctgaaccgatggcgcactttgctacgccacctacagcagatcccaaaactactgaagcttatactgaagctctacgttcaacatttttccattggggattccatgcttgggctgtttatggtgttgttgcgttagcgttggcatattcgcaattccgtaaaggtgaaccaggtttattatctagaactttacgtcctcttttaggtgataaagtagaaggtcctattggaatttttattgacgttttatctgtatttgcgacaatcgttggggtagccgtttcgttaggtatgggtgctctacaaattaatggtggtttacattacttgttcaatgttccaaacaatacgtttgtacaagcgattatcatcattgttgttactatcttatttatagcaagtgcatggtctggattaagtaaaggtattcaatacttaagtaacttgaacattggtttaggtactattttaatggtagctgctttaattgttggaccaactgttcttattttaaatatgttaactagctctacgggtagtttactaaacacattcttgtttaatagttttgatacagcagctttaaatcctcaaaaacgtgaatggatgtcttcatggacactttattactggggttggtggttaagttggagtccattcgttggagtgtttattgcacgagtttcaaaaggacgttcaattagagagttcatttctggtgtcttgctagttccagcaattgttagttttgtttggtttagtgtctttggtgtattaggcatcgagacaggtaagaaacacaaagaaatttttgatatgactcctgaaacacagctatttggagtgtttaatcatgtgccatttggcattgttttatcgttgattgcattattattaattgcatcattctttattacatctgctgactcagcaacatttgtattaggaatgcaaacaacatttggttcattaaatccatctagtatggtaaaagttgtttggggaatttcacaggccttaatagcatttgtacttttattagctggtggcggtaacggcgctgaagctttaaatgcgattcaaagtgctgcaattataagtgcattcccattctcctttgtcgtcatactcatgatggtaagtttctacaaggatgcgaaccaggaacgtaaattcctaggtttaacattgactccgaataaacatcgcttacaagaatatatcaagagtcaacaagaagattatgaatctgacattcttgaaaagcgtcagtcacgtagaaatatagagaaaaaagataactaa

SEQ ID NO: 414053 - DNA, 915 bp, Staphylococcus aureus; identical to SEQ ID NO: 411026

SEQ ID NO: 414054 - DNA, 2886 bp, Staphylococcus aureus
gtgaaaagcaatcttagatacggcataagaaaacacaaattgggagcggcctcagtattcttaggaacaatgatcgttgttggaatgggacaagaaaaagaagctgcagcatcggaacaaaacaatactacagtagaggaaagtgggagttcagctactgaaagtaaagcaagcgaaacacaaacaactacaaataacgttaatacaatagatgaaacacaatcatacagcgcgacatcaactgagcaaccatcaaaatcaactcaagtaacaacagaagaagcaccaacaactgtgcaagcaccaaaagtagaaaccgaaatgaaatcacaagaagatttaccatcagaaaaagttgctgataaggaaactacaggaactcaagttgacatagctcaaccaagtaacgtctcagaaattaaaccaagaatgaaaagatcagctgacgttacagcagtttcagagaaagaagtagcggaagaagctaaagcgacaggtacagatgtaacaaataaagtggaagttactgaaagctctttagaaggacataataaagattcgaatattgttaatccgcataatgctcaaagagtaactttaaaatacaaatggaaatttggagaaggaattaaggcaggagattattttgatttcacattaagtgataatgttgaaacacatggtatatcaacactgcgtaaagttccggagataaaaagttcaacagaagataaagttatggcaaatggtcaagttataaatgaacgtacaattcgctatacatttactgattatataaataacaaaaaagatttaactgctgaattaaacttaaacctattcattgacccaacaacagtgacaaagcaagggagtcaaaaagttgaagtaacactaggtcaaaataaagtctcaaaagaatttgatatcaaatatttagacggcgttaaagatagaatgggtgttactgttaatggtcgtattgatactttgaataaagaagagggtaaatttagccattttgcatatgtgaagcctaacaaccagtcgttaacttctgtcacagtaactggtcaagtaacatctggatataaacaaagtgctaataatccaacagtcaaagtatataaacacattggttcagatgaattagctgaaagtgtttatgcaaagcttgatgataccagtaaatttgaagatgtgactgaaaaagtaaatctatcttacacaagtaatggtgggtacacattgaaccttggcgatttagataattcgaaagactatgtaattaaatatgaaggtgaatatgatcaaaatgctaaggatctaaatttccgaacacatctttcaggatatcataaatactacccatactatccttattacccgtattatccagttcaattaacttggaacaacggtgttgcattttactctaataatgctaaaggcgatggtaaagataaaccaaatgatcctatcattgagaagagtgaaccaattgatttagacattaaatcagagccaccagtggagaagcatgaattgactggtacaatcgaagaaagtaacgattctaagccaattgattttgaatatcatacagctgttgaaggtgcagaaggtcatgcagaaggtattattgaaactgaagaagattctattcatgtggattttgaagaatctacacatgaaaattcaaaacatcacgctgatgttgttgaatatgaagaggatacaaacccaggtggtggccaagtaacaactgagtctaacttagttgaatttgacgaagagtctacaaaaggtattgtaactggcgcagtgagcgaccatacaacagttgaagatacgaaagaatatacaactgaaagtaatctgattgaattagtggatgaattacctgaagaacatggtcaagcacaagggccaatcgaggaaattactgaaaacaatcatcatatttctcattctggtttaggaactgaaaatggtcacggtaattatggcgtgattgatgaaatcgaagaaaatagccacgttgatattaagagtgaattaggttatgaaggtggccaaaatagcggtaatcagtcattcgaggaagacacagaagaagataaacctaaatatgaacaaggtggtaatatcgtagatatcgatttcgacagtgtacctcaaattcatggtcaaaataatggtaaccagtcattcgaggaagacacagaagaagacaagcctaagtatgaacaaggtggtaacatcattgatatcgacttcgacagtgtgccacaaattcatggattcaataagcataatgaaattattgaagaagatacaaacaaagataaacctaattatcaatttggtggacacaacagtgttgattttgaagaagatacacttccaaaagtaagtggtcaaaatgaaggtcaacaaacgattgaagaagatacaacgccgccaacaccgccaacaccagaggtaccaagtgagccggaaacaccaacaccaccaacaccagaagtaccgagtgagccaggcgaaccaacgccaccaaaaccggaagtaccaagtgagccggaaacaccagtaccaccaacaccagaggtaccatctgaacctggtaaaccagtaccacctgctaaagaagaacctaaaaaaccttctaaaccagtggaacaaggtaaggtagtaacacctgttattgaaatcaatgaaaaggttaaagcagtggcaccaactaaacaaaaacaatctaagaaatctgaactacctgaaacaggtggagaagaatcaacaaacaaaggtatgttgttcggcggattattcagcattctaggtttagtattattacgcagaaataaaaagaataacaaagcataa

SEQ ID NO: 414055 - DNA, 504 bp, Staphylococcus aureus
gtgtctgatttagtagattgcattggttgtggcgtgtttgttgatggaggtgttgtcactttagttttcggcgttgtggattcggttgtcgtttgtgattgttcttgtttaggcgctggcattgctgatatattaagcgatttctgctcttcttgtttaggttgtgatattttttctattttggaagctgaggttttttcctcattagtatttggtgccttttcgagtttaggcgtgcgttcttgtcttgtgttagctgcttgtgttgtcgctgaatttgcacctgctgttatgtttatcattgctaatcgctctgctttaagcgttggtactttgtcaactttagttgattgtattttttctgctttgaccgattgcgtcgttactgtaattgcgcctgttgttaaaagccctagtgctaaactggttttagcaattgttttcatattcataattgtatactccaatctatattatattcgattgtctttttacgtaatttga

SEQ ID NO: 414056 - DNA, 699 bp, Staphylococcus aureus
atgaaattgactgcattagcaaaagcaacattagcattaggaatattaactacaggtgtgtttacagcagaaagtaaagctgttcacgcgaaagtagaacttgatgagacacaacgcaaatattatatcaatatgctacatcaatactattctgaagaaagttttgaatcaacaaacattagcgttaaaagtgaagattactatggttctaacgttttaaactttaaccaacgaaataaaactttcaaagtgtttctgcttggtgacgataaaaataaatataaagaaaaaacacatggccttgatgtctttgcagtacctgaattaatagatataaaaggtggcatatatagcgttggcggtataacaaagaaaaatgtgagatcagtgtttggatttgtaagtaatccaagtctacaagttaaaaaagttgatgctaaacatggcttttcgataaatgagttgttctttattcaaaaggaagaagtatcgttgaaggaactggattttaaaataagaaaaatgttagtcgaaaaatatagattgtataaaggcgcgtcagataaaggtagaatcgttattaatatgaaagacgaaaagaaatatgtaattgatttaagtgaaaaattaagttttgatcgtatgtttgatgtaatggatagtaagcaaattaaaaatattgaagtgaatttgaattag

SEQ ID NO: 414057 - DNA, 1557 bp, Staphylococcus aureus; identical to SEQ ID NO: 408538

SEQ ID NO: 414058 - DNA, 1152 bp, Staphylococcus aureus
atgaatgaattagaatttgttacgaaacatcgccgtcatttacatcaacatcctgaattaagcttacatgaatttgaaacaactgcttatattaaagcgtttttagatagtttaaatattaaatacgattgcccattggaaactggcgtcattgcatacttagaaggtaatggctcacatacgatagcgtatagagctgatattgatgcgttacctattttagaggaaaatgatgtgccttatcgcagtcaatctgatcatgtgatgcatgcttgtggacatgatggtcatacaactgcattaatgctttttgtacaacgttgcaaagacatgcaagacgcaggtcaattaccgcaaaatgtcgttttcattttccaacctgcagaagaaactggtggcggtgcaaatcgattaataaaagccggtgcctttgataagtatccaattgaagcggtatttggtattcatgttaacccatttgctgatgaaggcattgcagtgataagagatgaagaaattacggccagcgcaacagagtatcgctttttcttaacaggcctgtcaagtcatgttgctgataaagaacaagctcattcttgtggtgaagcattacaacatgtattaactcaaatatcacaaattcaacaatttcaccttaacggtttgaaacgaaatattgttcatattggtcattttaaagctggtgaagcgattaacactgtaccaagtaatggttatttagaaggtacaattcgtacatatgatattgatgatttaacaatcgttaaaaatcaaatgcacaagatagcagaaagtgtcaagcttctgtttaatgtagaatgtgaagttaaatttgcagaaggttatccccctacaatcaatagtccgaaattacgtactcaaatagaggacgccttaataaaagctgatttaaatgtctatgacaaaccaacgccattcttatttggggaagattttagtttttatggtcaacaactagctccagcttactttgtttttataggaacacgaaatgaagataaaggttttgtaactggtttgcacacatcacatttaaattttgatgaaaaagcgttaataaacgtggttaatttttacgaaaatttattaaataattacaaagaggtgtaa

SEQ ID NO: 414059 - DNA, 156 bp, Staphylococcus aureus
ttgtcgtctcaagcttttactaaacaacaagcggataatttatatcaactaaaaggcgcatctcaaccgacggttaaaatttggacaggaacagaaaatgaatataactatatatatcaaaaagacccgaatacgttatatttaattaaagggtga

SEQ ID NO: 414060 - DNA, 222 bp, Staphylococcus aureus
atgccgaaagaaaaatattacttataccgagaagatggcacggaagatatcaaagtcatcaagtataaagacaacgtaaatgaagtttattcgctcacaggagcccatttcagcgacgaaaagaaaatcatggctgatagtgacctaaaacgattcaaaggcgctcacgggcttttatatgagcaagagctagggttacaagcaacgatatttgatatttag

SEQ ID NO: 414061 - DNA, 1356 bp, Staphylococcus aureus
atgggaaaatattttggtacagacggagtaagaggtgtcgcaaaccaagaactaacacctgaattggcatttaaattaggaagatacggtggctatgttctagcacataataaaggtgaaaaacacccacgtgtacttgtaggtcgcgatactagagtttcaggtgaaatgttagaatcagcattaatagctggtttgatttcaattggtgcagaagtgatgcgattaggtattatttcaacaccaggtgttgcatatttaacacgcgatatgggtgcagagttaggtgtaatgatttcagcctctcataatccagttgcagataatggtattaaattctttggatcagatggttttaaactatcagatgaacaagaaaatgaaattgaagcattattggatcaagaaaatccagaattaccaagaccagttggcaatgatattgtacattattcagattactttgaaggggcacaaaaatatttgagctatttaaaatcaacagtagatgttaactttgaaggtttgaaaattgttttagatggtgcaaatggttcaacatcatcactagcgccattcttatttggtgatttagaagcagatactgaaacaattggatgtagtcctgatggatataatatcaatgagaaatgtggctctacacatcctgaaaaattagctgaaaaagtagttgaaactgaaagtgattttgggttagcatttgacggcgatggagacagaatcatagcagtagatgagaatggtcaaatcgttgacggtgaccaaattatgtttattattggtcaagaaatgcataaaaatcaagaattgaataatgacatgattgtttctactgttatgagtaatttaggtttttacaaagcgcttgaacaagaaggaattaaatctaataaaactaaagttggcgacagatatgtagtagaagaaatgcgtcgcggtaattataacttaggtggagaacaatctgggcatatcgttatgatggattacaatacaactggtgatggtttattaactggtattcaattagcttctgtaataaaaatgactggtaaatcactaagtgaattagctggacaaatgaaaaaatatccacaatcattaattaacgtacgcgtaacagataaatatcgtgttgaagaaaatgttgacgttaaagaagttatgactaaagtagaagtagaaatgaatggagaaggtcgaattttagtaagaccttctggaacagaaccattagttcgtgtcatggttgaagcagcaactgatgaagatgctgaaagatttgcacaacaaatagctgatgtggttcaagataaaatgggattagataaataa

SEQ ID NO: 414062 - DNA, 705 bp, Staphylococcus aureus
atgaaaatggcagcaattgcgaaagcaagtttagcattaggtattttagcaacaggaacaataacgtcattgcatcaaactgtaaatgcgagtgaacatgaagcaaaatatgaaaatgtgacaaaagatatctttgacttaagagattactatagtggcgcaagtaaggaacttaaaaatgttactggttatcgttatagcaaaggtggcaagcattaccttatctttgataaaaatagaaaattcacaagagtacagatatttggtaaagatattgaaagatttaaagcacgcaaaaatccgggattagacatatttgttgttaaagaagcagaaaatcgcaacggcacagtgttttcatatggtggtgtcactaagaaaaatcaagacgcttattatgattatataaacgcaccaagatttcaaatcaagagagatgaaggtgacggtattgctacgtacggtagagtacactacatttataaagaagagatttcacttaaagaactcgactttaaattgagacagtatttaattcaaaattttgatctgtataaaaagtttcctaaagatagtaagataaaagtgataatgaaagatggcggctattatacgtttgaacttaataaaaaattacaaacaaatcgcatgagtgatgtcattgacggtagaaatattgaaaaaatagaagccaacattagataa

SEQ ID NO: 414063 - DNA, 243 bp, Staphylococcus aureus; identical to SEQ ID NO: 412684

SEQ ID NO: 414064 - DNA, 219 bp, Staphylococcus aureus
atgcttgatgatacactttgtgaattcactaaacttgtgcttgttgagcttgatacactattactttcagatgtgcttaatgacttagatgcactcacagaatcagataggcttacacttgtcgatttcgaggtactagctgatgtagataccacaatcgatcctgatgtactcgttgatgcactttgtgagtcagctttacttgttgagacactttga

SEQ ID NO: 414065 - DNA, 336 bp, Staphylococcus aureus
ttgtggctttttaatttgaataaagtgggtggcataatgtttggatttaccaaacgacatgaacaagattggcgtttaacgcgattagaagaaaatgataagactatgtttgaaaaattcgacagaatagaagatagtcttagagcgcaagaaaagatttatgacaaattagatagaaattttgaagaattaaagcgcgacaaggtagaagatgaaaagaataaagaaaagaatgccaagaatattagagacataaaaatgtggattctaggtttgatagggactatcttcagtacgattgtcatagctttactaagaactgtttttggtatttaa

SEQ ID NO: 414066 - DNA, 174 bp, Staphylococcus aureus; identical to SEQ ID NO: 407440

SEQ ID NO: 414067 - DNA, 828 bp, Staphylococcus aureus
atggatgaatttaaaagcgttaaaaatgtaactggatcaatgagtttcatttttatagataatgatactcatgatgttatagatattttagaaaatagaactacaagattcttgcgtgcctatttcgagcgattcgatttaaaaaatcgacaacaagttaagacggttactattgacatgtatgaaccctatgtccgattatttcgcgacctatttcctaatgcagctattatttttgacagattccatatcgttcaacatttaaatagggaacttaataagtatcgtgtacaagttatgaatgaataccgtaataaaaaaggacctaattatacaatttttaagaataactggaaagttctattgatggatactagtaaaaccatatttagtaaatacagatggaataaatcttttaaggcttataaacgctcatctgacattgtagaattcatgctttcaaaagacgatatactacgacgctcctacgaacttgtccaaggattaagaaaagatctaaggttatgtaattggcctaaatttattaatcgtttaaattcagttagtaaaaagtctgtgagtaaaggtgtatggaaagtggttaaatattatagaaaacatcaaaggatgttaagaaatacaatttattacccagcatttaataatggtgctatagaaggaattaataataagataaaattaatcaagcgaatttcttttggttacagaaatttcaacaactttaaagcacgtataatgatgattttcagcttatacaaaggagaaaaaaagaagacaaccaagcccaataatggactggccgcctaa

SEQ ID NO: 414068 - DNA, 333 bp, Staphylococcus aureus
ttgttcgacggtggagcaaatggtgtaggtacaacaatcaatctaaccgaaccgtacacaaactattctattttgttggtaagtggaacttatccaggtggcgttattgagggattcggactaaccgcattacctaacgcgattcaattgagtaaagccaatgtagttgactcagacggcaacggtggcggtatttatgagtgcttactatccaaaacaagtagcactactttaagaatagataacgatgtctactttgatttaggtaaaacatcaggttctggagcgaatgccaacaaagttactataactaaaattatggggtggaaataa

SEQ ID NO: 414069 - DNA, 441 bp, Staphylococcus aureus
atggaagctttgaatggtcaaaaacttaaacatgttattcctgaacatgatggattaattacagaagtattgagagaaccaggcttcttcagacatcttaaagtgatgccacatgcacaagaagttgtgaaaaaattaactgaacattatgatgtatatattgctacagcagcaatggatgtaccaacatcatttagtgataaatatgaatggttactagagttctttccatttttagatcctcagcattttgttttttgtggtagaaaaaacatcgttaaagctgattatttaatagatgacaatcctagacagcttgaaatttttactggtacaccgattatgtttacagcagtgcataatattaatgatgatcgatttgaacgcgtaaatagctggaaagatgtagaacagtattttttagataatattgagaaataa

SEQ ID NO: 414070 - DNA, 507 bp, Staphylococcus aureus
atgcaacaggcactgataaatttctattatcaatttcatactaagcaacattatttcctatgtcatgacattttagaagatgcatggaaagctgaaaataactacagtaagcaagatgcagttgttagtttaatcttgtttgcaactgcttgttaccattatcgccgcaataatttaaaaggcgcctataagtcttttaataaatctaaagaaataatacaaaatgctaaagatagagatgcgttataccttaatttaaatgattatcaattgttaattgagcaacagattgcaaaattgaatgcagcaaagcctttttcatctgttatattaccaataactccagtctttgaacgcatcatcaaggccaactatccagactatgattataatcaggaaacagcaacagatccttttattgtagaccatcacatgcggcgtgatcgttcagaagtgattgcagcaaaagaagaagcgattcaattaagaaaacatagacgtaattaa

SEQ ID NO: 414071 - DNA, 267 bp, Staphylococcus aureus
atggatgtaccaacatcatttagtgataaatatgaatggttactagagttctttccatttttagatcctcagcattttgttttttgtggtagaaaaaacatcgttaaagctgattatttaatagatgacaatcctagacagcttgaaatttttactggtacaccgattatgtttacagcagtgcataatattaatgatgatcgatttgaacgcgtaaatagctggaaagatgtagaacagtattttttagataatattgagaaataa

SEQ ID NO: 414072 - DNA, 135 bp, Staphylococcus aureus
atgggggtttttcatattggagtcaattttaaattaatatgtatttcattgcctgtagaaattctctgtgttggggcccctataattgaaaagcgtattatcattcagtcaatgactgctaatataaaagtatag

SEQ ID NO: 414073 - DNA, 423 bp, Staphylococcus aureus
ttgaactttaatcaattcgataaccacaacttttttaatacaaatccaagcgacacttttaaagatttaggaaaacaagtattcaattacttttctacaccatcatttgtgacaaatatatatgaaactgaagaattatattacttagaagctgagttagcgggcgcaaacaaagaagatatccatatagatttcaataatcatgtgctaactattcaagcttcaagacacgcaaaatataaaaacgaacaacttattttagatgaacgtcatttcgaacaagtatcacgtcaatttgattttgactttgtagataaacaacgtattactgctagttttgaaaatggtcttttggcaatcactttacctaagattaaaccaaataataatactacttcatcaacatctattccaatttcttaa

SEQ ID NO: 414074 - DNA, 1008 bp, Staphylococcus aureus
atgaatttggctaaacgcatattacaaggggaacaattaacaaaagagactgtattgaaaatttatgaggatactaatattgataccttagatttattaaatgaggcgtacattttaagaaaacattatttcggtaaaaaagtaaaattaaacatgattttaaatgctaaaagtggtatatgtcctgagaattgtgggtactgtggacaatcacgagatattaaacaaaaacagcgatatgctttaattccagaggaacaaattatcgatggagcaaaggtggcacatgaaaatcatattggaacatattgtattgttatgagtggtagaggaccgagtgataaagaagttgaccatattagtaacactgtaagaacgattaaatctcaacacccgcaactaaaaatatgtgcatgtttaggattaacgaatgacgaacaagctaagaaacttaagtcagctggtgtagacagatataaccacaatattaatacaagtgaaaattaccatgataacgtcgtgacaacgcatagttataaagatagaacagatacgatagaactaatgaaagcgaataatatatcaccatgttctggcgtgatttgtggtatgggagaatctaatcaagatattgttgatatggcatttgctttgaaagaaatggatgccgacagtattccgattaattttttgcatccaatcaaaggcacaaagtttggaagcatggatgatttaacaccaatgaaatgtttaagaattgtagctttattccgattaatcaatcctacgaaagaaattcgtattgctggaggaagagaagtcaacttacgttcgttacagccattagcattaaaagcggcgaattcaatatttgtcggtgattatctaattactggtgggcaaccgaaccaattagactacgatatgattaatgatttgggctttgaaattgattatggcacttgtgaaaataaggaaaacaagaatgatgtttcaaaagcaaattga

SEQ ID NO: 414075 - DNA, 636 bp, Staphylococcus aureus
atgatcgagttcctacatgaacatggtggacagttgatgtcgaaaacactggaacatttctatatttctatagtggcattattacttgccatcattgttgcagtacctataggcattttattatcaaaaacaaatcgaactgtcaatattatattaactgtggcaggtgtcttacaaactattccaacactagctgtacttgctattatgataccgatttttggtgttggtaaaacgcctgcaattgtagcgctatttatttatgtattattacctattttaaataacacggtactcggcgttcaaaatattgatagcaacattaaagaagctggaaaaagtatgggaatgacgcaatttcaattgatgaaggatgttgaattgcctttagccttaccgcttatactaggcggtattcgcttgtcgtctgtgtatgtaattagttgggctacacttgcaagttatgtaggtgcgggtggattaggtgatttcattttcaatggtttaaatttatatgatcccctgatgattgtaactgcaacggtactcgttactgcactagcattaggtgttgatgccgtattagctttagttgaaaaatgggtagttcccaaaggcttaaaagtatctggataa

SEQ ID NO: 414076 - DNA, 291 bp, Staphylococcus aureus
ttgtttgcgataggtactgctacctctataggagtagattatttatataaaaataatatattaggtattaaagacggtacggactgggttggtcatcaattagataatgtttttgataaatatatagattttcagaagaagaagtttgagatagaagttaaaggaattacctatgctaaagagcaaattcaaaaaggttatggtaaagtttcggaaggtatagaaaaaaatattggtgaagcatttgatgatgttaaaaatgctgtgaaccctatgaaatggagttggtaa

SEQ ID NO: 414077 - DNA, 1185 bp, Staphylococcus aureus
atgagtattgatatgtatgtagacaaagcgaaaaatcaggcaacaaaattgagtgaagtttctaaagatatatctcaaggatatgacgatgttcaacaagctatttcagaatttgttggagatcacatgttgaagggaaaagcttatgattctgctaggcaatttttcagtacagttatatctcctcttgctttaagcatgaaaacattgagtgaattaacagaacaggcatgtaatgaatttgttagtaaatatcagacagaagtggatagtcaaagtttgaaagaatcagaattagaagaagatatacacaaattagctttacatatcactaaagcaaaggacttaaatgattctcttaaaaagaaagcatctgataatattggggcaattactggaaatattatgataatagctaacctagagcaacaaaaaaaggagttagaagaaaaattgcgaaagttaagagaatttgatgataattcgacaaatatttttaaagaggttgaaggatttcaaaagaatgtcgaacaagggcttaatcttgtaaacacgagttgggatccgattaaacaaacatttaatatcccgaaaagtaaggatatggaatgggctaaagttagtcaacaaaaagcgcttgaattagaaatgaaaaaggtagaactaaaattaaatgatgataaaaaactcggtagagaagatttatctgttgtaatgagttatgcagaaatgcatcctgaagaagaaatgtcgcaaagcttgaaagattatttaattgaaaataatgaaacaattttaagagacttcagtatggatttatctacacatttaattgaacaagcaggggttggtgtgcaaagatttggtgtaatgttgaacacttatgggggcgttagaggtcctgaaggtccaaatagctttgttcaaataacgaacacagcaggtaataaggcgataaaacagggagaaatggtatccaaaataggtaaagttggcgggaaaggtgcaatgggtttaggtttaggtttaggtatgtatgacgatttatataatgatgataagacggtcggtgaagcagtagcacataatacattgactatgggatcaggtgctgtattgagtgcaggattaggtttattactatctaatcctattggttgggggcgttgggattgtttgcgatag

SEQ ID NO: 414078 - DNA, 996 bp, Staphylococcus aureus
atgaaaataagaacaattgcgaaagcgagtttagcgttagggctaataacaacaggtgcaagtatagtaacaacgcaatcggcccaagcagaagtagtatcagcactgaaagcagaacagttatcaaagataagcgtatcaccaagcgcaatcacaacgacaacgcaagcagtgaatgcagaacaaaatcgtacggctaatcctgaacaggcaccaaagtctaacacagaaaatgtatcaacatcgctttcaactaaaacagaacaggcactaaaatctaacatacaaaaagcaacaacttcgccttcaacaaaagtagaagcaacacaaccaacaccaagcgtagctacaccaccttcaccaaatgcacaaccgcaatcgccaaccacaaaacaagcacaaaaggaaataaaccctaaatataaggatttaagaacatattatacgaaaccgagtttagaattcgaaaagcaatttggctttatgctgaaaccatggacgacagttaggtttatgaatgttataccagattggttcatttataaaatagctttagttggaaaagacgataagaaatataaagatggaccttacgataatattgatgtatttatcgttttagaggacaataaatatcaattaaaaaaatattctgtcgggggtatcacgaagacaaatagtaaaaaagttgatcacaaagcagaattaagcattactaaaaaagatgagaaaggcaaaatcttacgcgatgtttcagaatacaagattactaaagaagagatttccttgaaagaacttgattttaaattgagaaagcaactcattgaacaacataatttttacggtaatattggttcaggaacaatcgttattaaaatgaaaaatggtgagaaatacacgtttgaattacacaaaaaattacaagaacatcgcatggtagatgtcatagatggcactattatcgacagaattgaagtgaacctaacatcatcgtga

SEQ ID NO: 414079 - DNA, 507 bp, Staphylococcus aureus
atggcccatattatacgtagagttagtatcaaagatgtagaaaatttcatttcaatgttagcgaaaatatacgacgaatctccgtatatgttctacacaccaggagaatatgatcctagcgtcacatcggttagtaaacaattagaagaatatatcacttctccacataaagtcatctttgttgctgaaagtgatgaacaacttgtaggctttgcctttgttaatacgacaccatttcaacgcattaaacatgttgctaaaattgatttaggtgtaaagaaattatatcaacatcgtggaattggccaagcacttcttgatgccattatggcttggtgtttaaacaatcaaatacaccgaattgaagcaaatgtaccactcaataaccaacctgccctagagctttttaaaagtgccgattttcaaatcgaaggcgttttaaaagataagttattcatcaatggtaaatattacgatgactatatgatggctaaaattcttaattaa

SEQ ID NO: 414080 - DNA, 1011 bp, Staphylococcus aureus
atgttgtttttgcaaagtgaaataaaaaattctgagaactcacatgcatggttagaagctgaaattaacacttctcaagaagtaattcaatctcaaggttttccctgtgtttttggtgtacatggccacaaaaaagaggtgcatttttattctgcattaaattatccgtatgaccctaaagaactatctaccgatattgacttatatttaaatgaattgggaaaaatgaaaaagagtgatcgagggatctctggtttattagtgtattttgaaccaattggaaatatgaatattcatgctaaacaatttttagcttggcaagttctttccacaatgaaagatttgtatggcaataaaaatgacagtattgataataatccatttactgatgaatatgcctttaaattcaaagatgaactatggtttataaatttcagctctaatagttatacaaatagaaaatcaagaaacttaggttcatttattacattagctatgcaaacactgagcaaatctgatgaatacttcaaatcaaatatagaaataaaagctaaagctcaaaaattagttagagatcttgctgaaaaatatgatggttgccctgtacattctggattaggtccggttataggttcaggaaaattctctcccgcaaaattgtcatactttatcggtgatacaaatgatgaagaatcatatgaaccttggcgttactctccgttcacaccaaaaaaaataatcatagacgacaaaacatttaaagactatacgcttcaccttgataatttcaaaaaaatttggcgcaacaaaaatattttgactatttcagattgcaaaaatagtaatgacattaataaggacaatgtcttaatcactaataacccacgccttattgaaatatataaaaataaaattaaagtggctacatttaataaccgttataaaacagataagaatatttgtaaaattgaatatatcaatgatttaattgccttacgttatttaaaataa

SEQ ID NO: 414081 - DNA, 2046 bp, Staphylococcus aureus
atgatgaaaagtcaaaataagtatagtattcgtaaatttagtgtaggtgcatcttccattttaatagctacattactatttttaagtggtggacaagcacaagcagctgagaagcaagtgaatatgggaaattcacaggaggatacagttacagcacaatctattggggatcaacaaactagggaaaatgctaattatcaacgtgaaaacggtgttgacgaacagcaacatactgaaaatttaactaagaacttgcataatgataaaacaatatcagaagaaaatcatcgtaaaacagatgatttgaataaagatcaactagaggatgataaaaaatcatcgcttaataataaaaatattcaacgtgatacaacaaaaaataacaatgctaatcctagcgatgtaaatcaagggttagaacaggctattaatgatggcaaacaaagtaaagtggcgtcacagcaacagtcaaaagaggcagataatagtcaagattcaaacgctaataacaatctaccttcacaaagtcgaacaaaggaagcaccaccattaaataagtcagatcaaacaagccaacgagaaattgttaatgagacagaaatggagaaagtacaaccgcaacaaaagaatcaagcgaatgataaaattactaaccacaattttaacaatgaacaagaagtgaaacctcaaaaagacgaaaaaacactatcagtttcagatttaaaaaacaatcaaaaatcaccagttgaaccaacaaaggacaatgacaagaaaaaaggattaaatttattaaaaagtagtgcagtagcaacgttaccaaacaaagggacaaaggaacttactgcaaaagcgaaaggtgatcaaacgaataaagttgccaaacaagggcagtataaaaatcaagatcctatcgttttagtgcatggtttcaatgggtttacagatgatattaatccttcagtgctagctcattattggggcggtaataaaatgaacattcgccaagatttagaagaaaatggttacaaagcttatgaagcaagtataagtgcttttggaagtaactatgaccgcgcagttgaactttattattatatcaaaggcggtcgtgtagattatggtgcagcacatgcagcaaaatatggacatgaacgttatggaaaaacatacgaaggaatttacaaagactggaaaccaggacagaaggtacaccttgttggacatagtatgggcggtcaaacgatacgtcaactagaagaattactgcgtaatggtaatcgtgaagaaatagagtatcaaaagaaacatggtggcgaaatttctccgctattcaaaggtaataatgacaatatgatttcatcaattactactttaggaacaccacataatggtacacacgcatcagatttagctggtaatgaagctttagtgagacaaatcgtatttgatatcggtaaaatgtttggtaataaaaattcaagagtagacttcgggttggctcaatggggtctaaaacagaagccaaatgaatcatatattgattatgtcaaacgcgttaaacaatctaatttatggaaatcaaaagataatggattttacgatctgacgcgtgagggtgcaacagatttaaatcgtaaaacgtcgttgaaccctaacattgtgtataaaacatacactggtgaagcaacgcacaaagcattaaatagcgatagacaaaaagcagacttaaatatgtttttcccatttgtgattactggtaacttaatcggtaaagctactgaaaaagaatggcgagaaaacgatggtttagtatccgttatttcttctcaacatccatttaatcaagcttatacaaatgcgacggataaaattcaaaaaggcatttggcaagtaacgcctacaaaacatgattgggatcatgttgattttgtcggacaagatagttctgatacagtgcgcacaagagaagaattacaagatttttggcatcatttagcagacgatttagtgaaaactgagaaggtgactgatactaagcaagcataa

SEQ ID NO: 414082 - DNA, 207 bp, Staphylococcus aureus
atgttaaatcaagatgtttacttcgtacattcttaccaagcgccgatgtcagaaaatgtcattgcatatgcgcagtatgggactgatattccagcaattgttcaatttaacaattatattggtattcaattccatcctgaaaaaagcggtacatatgggttacaaattttgcgtcaggcaatacaagggggatttataaatgattga

SEQ ID NO: 414083 - DNA, 288 bp, Staphylococcus aureus
atgatttatattgataaaaatgaaagcccagttacgccgttggatgaaaaaacaatgacgtctattattagtgcaacgccatataatttatatcctgatgcagcatatgaacaattcaaggaagcttatgctaagttttacggattatcgcctgaacaaattattgcaggaaatggctctgatgaattgattcaaaagttaatgctgatcatgccagaaggtccggcattaacgctaaatccagattttttttatgtatcaagcatatgcggcacaagtaaatcgtga

SEQ ID NO: 414084 - DNA, 1821 bp, Staphylococcus aureus
atgaggaaattatacaatttaaaagaatttttaaatatttattcaactgaagatataggtttaattaatacatatatcgaatctgataatagaccacttaaagaaaatgaagtagaggatttaaaatcattaataaatctcttgaagctaaattataaaagttgtgaaggtttttttcttagttatgaagttcctcatatcggtcacgaaatagacttattgaaagttacggataatgctattttaaatatcgaattaaaaagtagatctgagcttgcaaagataaataaacaacaaaagtataattatttttatcttaatacacttaacaaaaatgtagacattataacctataatagacatgaagaaaagttttataaatattgtcaagaaagtgagaaatcacttgaaataaatatagataaagtaagggataaaatttttgaatatggaaataaagagtttatttcagatattgattatttatttaaaccttctaatttccttatttcaccttttaatgatactgacaaatttcttgaagacaaatattatttaacggcccagcaagaaaaaataaaaaaagacattataaatcataatgggactattgctattattgaaggaagaccaggcacaggtaaatcacttttattatatgatattgctaaaaaactaaaaaaagagtttaatatattaataatacattgtgcattgttaaatgaaggacacgaattaatgattaataaaaattggaatataaaaagtgctcataaaaattgggtatacgatgaagagaattatgaaggtaaaaattatatttttattgatgaatcacataggttttaccctaaacaatttgagtatgtaatagaaactgcacttaaaaaagatattaagataataacaactatagacccattacagtatctaagagataatgaaaatgattttgaaaacttacagagattaaaatctcattctaacatctattataaaaaaattgataataaaattagatctaatccagaaatatcatcatttgttaaaagtattattaatttaagaaatatacctgaatataaatttaagaatatttcaatagaatatttgtcaaaagaagatgattggaaatcatatttgctaaatttgcgtgatagaggatggacatatttaccttatacgaaaagtagagataatattagttatcataaatattgttcggctaatactcatttaaatactcatagaattattgggcaagaatttaataaagttattgttattttagatgaaggatttaaatatgttgatggatatttaggatattacggagattattattataatcctagacaaatgttgttccaaaatttaactagagctagagaaaaaataaaaattataatcattaataatacagatttatataaaaagattaatcaagtgttaactaagtcttctaataaaaatgagttatcacttaaattttttattcctgaacttaataatgataaattaaaatcattttatagtgatattttaggttttaagttaattagtaatcaaaaacaaccgcctggaaaaagaaagataagttttcaaataggtgaaacaaatttagggttttatgaaaaagaagatatttctaaaaacaataaatgcgaaataaatatagttataagtaatttgaaagatttaaagaaaagaatatcaaatgaaaatatggtattgattagtgaagaagaaggtaaaaaaagtaaatttgttactttaaatgatccattaaacaactatttaaagttaatagagtatatataa

SEQ ID NO: 414085 - DNA, 291 bp, Staphylococcus aureus
atgtacatttttatattgacatttacaagtaagcaagtgaacttatctgctccagctgtaagagaatgggtaaataaacttgaagagcaaggtattatacaaggttatacaattaacatagattataaacaattaggttacgatgtagaaatattaattgagttaactataaagaataatagatacagccatatgggcagacaaaatgtcagtttatcttttcatcagttgtctaaactacatggaaaaagtttaataagcataggaaagattattaacagagagaagtga

SEQ ID NO: 414086 - DNA, 576 bp, Staphylococcus aureus
atgaaatatgatgcaatacttcaagacgaatatttattaagttcgaatatgcttggtgccaaaacttctgatgaattagagcaacttgaaaagattgctttttatattgctgaagctttcgttgaaaaggtaggatataaatttttattccccttaaaaataaaatctattaaattattgcataaaaagttatttgaaaaaatatataattttgctggtgaatttagagatgtcagtcttatgaaagagaatacaaggttttgtgaaccacaatatattaatgatagtctaataaaattattgagtgaatttaattcagaggctgaatggtttgatattaattttgctgcaaggaaacttgcacattataaaacagaattgaatatgattcatccttttcgtgagggcaatggaagaacaataaggttaattgttcgagaaatggcaaagtcgaagggctatgaatggcgtactgatttattagataaagatatatacttgtgtgctatgagaaaatcaagttggaatgaagaagcattaattaatgtgtttaaagacactctttttcctctataa

SEQ ID NO: 414087 - DNA, 189 bp, Staphylococcus aureus
atgcacaaattcaaatatgcattaaaagtagggattttggtagttttactatattgcactatgaattatatcgttcctatacaaaatgagtttagttatcaacttatttactctattattttcgctattttattaatgattttagtttatatcatgctaggttcaataaaaaaagatactgataagtaa

SEQ ID NO: 414088 - DNA, 996 bp, Staphylococcus aureus
atgctatttaaaccaaaataccaaatcgttattgctggtttatgtcttgcaatagtagctatcttaagtttaatgattggaaatacgcttgtgtcaccaggtacggtgatacaggcgttattcaactttgatagtgaaaacgatttacatgatgttgtcactggtgcacgggcgtcgagaacaatcattgcgctattgacaggcgccgcactagccgtctcaggattattgatgcaagcacttactcgaaacccaatagcatcgccagggcttttcggtgtcaatgcaggcgcagtattttttgtcatctttagtattacatttatccaaattcaatcttttaaaatgattgttgtcatcgcgttttttggggctattgttgttacagtcttagtcgttgcactaggtatgtttagacaaaccctattctcacctcaccgtgtcattttagcgggtgccgcgattgcgatgttatttacagcttttactcaaggcattctcattatgaatgaaacagacttgcaaggcctattattctggttaagtggttctgtttcattacgtaatatttgggatatcccatggattattccgcttgtattgatacttattttaattgcgtttagcatggctgcacacatcaatattttgatgacaagtgacgacattgctactggactcggacaaaacataaaattaatcaaatggatgattataatgctcattagtatgctagcaggcatctcggttgctgtagctggatcaatcgtctttgtaggacttattgtaccgaatattagtaaacgattattaccaccaaactataagtatttaattccttttactgcattaaccggcgcaattttgatgattatctcagacattgttgctcgtattattattaagccactagagttgcctatcggtgtcgttaccgctgtcattggcgctattgtcttaatctatcttatgaagaaaggacgtcaacgcttatga

SEQ ID NO: 414089 - DNA, 1131 bp, Staphylococcus aureus
gtgattatattgactttaagaggagtagaaaaactaccaatagcagttaaagatagtgttgcattaaaaatatatataaaagtttcagaaataaatggtaaattggggaaaatgaatagtgagttatctcatgcaataataaatgataattttataaatataatgagtatgagagaatctttagaatcaactaaaattgaaggtactcaggtgacatttgatgagttattagatgagaaaatggatcgtaagcaaagaaatgaagtaaaagaagtgcttaattatttggatgcattgaattatggatatgaccaaattaaaaataagaatatgccaataagtacgaatttaataaaaaaattacatgctatattgttagaagggacaagaggtaaagagaaagatcccggaaattttaggaagatacagaattttataggacctgataataaaattgaacatgctacttacattcctattgaagcacataaaatagatgattatatgacgaatttggaattttttatgaatggtttgcaacataatagtttatctgttgataatgataaaacttatctgaattatgatgctgatccattgattaggactgcgataacacacgcacaatttgaatcaatacatccttttttagatggtaatggtagattaggtaggattttaataattttaatgcttgttaatgcaggtgtaattgataaaccagttttttttgttagtgaagagctcgaaaaagaaaaggcgagatattatgatttattaaatggtgtgagaactaaacaaagtgattgggaaggatggattatatttttccttaatgcaacagaacgaatgattaatagtattttaaaaaaaatagagaaatcagaagagttgtatagaaaaggtgtagcattattgaaaaatgaatcggaaattaaactttggtatttaactttccaagaaccaaagttaactgtaaaaagagctgctgcgataacttcttattctcaacctactgtaagaagggcgttaaaaaaattagcggaaaatgatttagtttatgaagaaaaaagtaagaaaagaaatagaagttataataattatgaattactccgaattataaatgactaa

SEQ ID NO: 414090 - DNA, 162 bp, Staphylococcus aureus
atggtgatcgatgataataaaaagcaattgacttcaacggattttgaatttaaaaaagataaaataaatcaagaatttttaaacgttaaaaataagaatttttggcaagatggctggtcacaattaagaaaaaataaattagctgttataggtatgatttga

SEQ ID NO: 414091 - DNA, 696 bp, Staphylococcus aureus
atgaaattaaaaaatattgctaaagcaagtttagcactagggattttaacaacagggatgattacaactactgctcagccagtaaaagcagaaagtatggatagctcaatagtaggattaacaaatacagataaagagttaaaagattattatagtaaagaatattttaactataaaaaatttgatggatacatcgataataatgaactaaatgttataacgggagtacaacttacaactgtaaagttattaggttcagataaacaaagaattaaggatgtagaaaatgggctatatgatgtatttgttgttagagaaggatccggtagacaagctacaaactattcaattggcggagttacaaaggcaaatattagcaactatattgataatgttaaaagtgtaaatctaaatataaaaacgcaaacagggaacaatttaatgactgagagttctaagttttttagtattgaaaaagaagagatttcattaaaagaattagactttaaattaagaaaaaaattaatgaatgagaatggtttatatacaactaaacgtggttcaggagctattgtagttaaaatggtagatggcggattttacacatttgaattaaataaaaagttacaagaacatcgcatgggtgatgtaatcgatggtactaaaataaaagaaattaatgttgaattaaactaa

SEQ ID NO: 414092 - DNA, 1245 bp, Staphylococcus aureus
atgactgatttgaatctaattttgaagaaaaagtttcaagagatttcagaagtagatgattttatttcaaaagcatcaactgaaacagattactttgaaccagtaacattatcacatggcattccaggtttaatattatttttagatgcctatcaaaaagcatacaacacaaatactgaacaaatcgtgcataagtatatcatgaaattagcaccatacttacaaaaacatcaatataatcattctctatttggtggactttcaggtattgcattttcaatggatatagcatcacaaaacggcaggaattatcaaaatatattaaataatattgatgaagtcattgtgaatgaaatagaaaataaaatggatcaaatattacaagaaccattaaatccattaaattatgacactatcagtggattagctgggatagggcgatatttattaaatcgggtagacgcaaacgccacaaatgttaaagcgttaaaaagaatattaacatactttaaagacattcaatattctcaaaatagctgggtagtcccacaagaaagtcaatttttagagtctgataaaaattattttactgaaggtaatatcaatcttggccttgcacacggagtgctaggaccgatgtctttatttgcgttatgcgtgattaaaggaattacgattgaaaatcatcagcacatattaaaagacatgtaccaatttattatggacgaaaaattttgttgcaatgatagatggttgcagcgttacgatttgatttctgaacgtaatcatttcaattatattcggaatgggtggtgttatggtaatacgggtgttatgacgacgctatttttaatcggccaggcattacaagatgatgaaattattcaaacgtctaaaaaagtgatgttacaagtcgtaaatgataaggagaaaaatctaataagtcctactatttgtcatggattatcttcacaaatattaatgttaacgaccatgaatttgcattttgaatcaaatgaagtttctgattatataaatgaattaataaataaactgagttctcattataagggagatcatctagttaattatatagacattaatgagaatcatgaaggcgtatttaaaagtcagaaagtaggtcttttagaaggagaactaggggtttatctaacattgataacattgcaaaatacaaatattctcaatgaaaaaaattggacaaatgcgtttttaattagctga

SEQ ID NO: 414093 - DNA, 144 bp, Staphylococcus aureus
atggaaaaagttcttgatttagacgtgcaagttaaaggaaataacaacactaatgattcagcgggtgacgaaagacttactagctattctttatgtagctttggttgtggaaagacgggtagttttaacagcttctgttgttaa

SEQ ID NO: 414094 - DNA, 144 bp, Staphylococcus aureus
atgaaaaagaaatatattttaataatagttagtgtaattttaataggtatgatagttattgtatatgcacataataaacaaaaaaaagaccattacattgaaacactgaactgcacccagtctagtagacaattaaataattaa

SEQ ID NO: 414095 - DNA, 447 bp, Staphylococcus aureus
atgaaaatgaaatatattttaataatagttgtagtaattataataggtttggtagtcgtggcatgtgtgatccataagcataaaaaagatcattatattgagacgcaagaaaagcggataaatttgtattttaagcataatcttaacagttatcatggtttgaaaataacaaaatttcaaaaaggtccgatgggttcatattctgctaaaggttatataaataataataaaaaatatgagttccaggcgtttataggtttaggtgatgataaaaatcaatttaatggagactttgaatataatcaagaaaaaataggggaattattgaaagagaaagacgctaaagaccgattaactgtcgatgaaataattgaaaaagaacacttggataaaaatgaatatgaagcggaaccacctttattcttcttttcggggagattagagtga

SEQ ID NO: 414096 - DNA, 1611 bp, Staphylococcus aureus
atgagtagatatcttaacctaacaaaagaacaaaatgaagttataaacgaagaaggcaatttagtggttacagctaatccgggaagtggcaagaccctaactattgtagaaaagattttgaacatatcacaaactttatacagctatcaaggtgtaattgcaatttcatttacaagacaatctagtaaagaattagaggtgcgctataataaaaagaaaacaaatgataataatcatttttttgggaccattgataaattttatatatctgaaattattattccgttttcaaaacaaatttgtgggattagaaagtcaatagaagtaataaactcattgaaaaaccacccccaatacgaaagtttattaaagttaaaagaaaatagtaataatcaagaaattaatgttttacttgaaaagtccttgaaagaaggtttaatatttttagagatttgcggagaaacagcattatatatactgagaaaagtgccgcaatgtgcatactatctaaaatcaagatacactcatatatttattgatgagtatcaagattgtggtgaaatccaacataaaatatttttagaattaataaatcatggtattaaaggtatagcagttggagatttaaaccaagcaatatttgcatttagttataggtttccaaaatatctgcactcattaatcgggaatcaggattttaggcatgtactactaactcggaatttcagatgtcataaatcaatttcagattattctttacaattgattgaaaagagaaaagtgactaatactgatgtgaaaagagtatttaaagttaatgttataggaaatgataaaacggttatagatgctatagagaaaaattttgtgaatttgaagaaaaaatacaaattaaataataatgattttgcaatactttgccgttctaggttatcagctgaaagagcttcaaaatttttgaacataaaaaacaaactatttgataatactgattttgaaaaagaaacaagcattttagcaaacttttataaggaccttctaaattcctactttttatataaaataaataaaactacagtattagattttgtaatcaaatatcttaatgaagaagtaaattattttaattttcgaaaaggtctagaaactgttaatgaaatctttaatttagagataacaaattttgtaagtaacattgagaaattttatgatttagcacaactagtttatcctgatgattttgatgaagttgtttttaataagttggtaggattattaaaagacagaaaagatttaaacagttttaaacctgctacagaagatgaaataaatattatgacagtacataagtctaaaggactcgaatttaaatgcgtttttctattagacttatataaatatgtatttccgcgtgaaaatatagatgaggagagtttaaatcaagacttacatttgcattatgtaggaattacaagagcaatagaagcatgttacataatagtagcaactgaaagatacagacctagcaaaaaagattattgtaatgcaatggaatctccttttttatacagaaataatgtgcaagattttagggaagatattaaatggtga

SEQ ID NO: 414097 - DNA, 1770 bp, Staphylococcus aureus
atggaaattgaatggataaaaataagtggattcagaaattttgataatgacaaaataaatttgtctaaaaacactttgattataggagcgaatgatgttggtaaaactaatttattgtatgcattaagattattatttgatcgtagtttaagtgatagagagcttgatttatctaatagtgattataatgtatacacaaaatcagaaacaatagaaattactgtaaagttaactaatgtttatgaagattgtttaaagtctacatttaaagaagatattaaggatggaagtttatttattcagtataaaaattcaaaacaaggagaatattctattctcaccggttcatccgaaaaattactagaacctaaaaattcaaggttttatctaaaacgtttgaatatggagtatgtacatacaaaccgtaatttaactgcgtttattaagaaagaaaaaaatcaaatattagaatatgcaaaatcacaattaaatgacgaaaaaaataatcaagataaaaatgtaatagatggaattgaaaataaattaaatgatataaatatagaagtagacaagttaaattatatacaagagtcattgataaaagtaaatgaagagttagagtctcttgctatacataatgaaggccaaaaactaacttttaaaaatgtaaattcaaatatagatagaatgttaaataacattgagttgacatacaatactgacgaaggtgcattaacaattggtggagatggtagaaataatcaaatctttttagctacatggatttctaaacaaaagaatataaaatcattagaaagagtaactttttatgctatagaggagccagaagcacatttacatccacatcaacagcgtaagctgtcaaactatttgttagaaaattttagtgaacaaatttttatcactacacattcaccgcacatagcaaacgattttaaacctaataagattgttaagttatatagacaaaataaaaaaaccaaaatagcaaaaggtggttgtagcgaagatttagaattgatttttgatgattttggctatagattaaatgcaattacatcagatttgttttttgtaaatgcagtatttttagtagagggaccatcagaaaaattattttattatgcattatctaaatcattaaacattgatttagatagattaaatgtatcgattataagcgttgatggagttggctttaaaccatttttaaaagtctgtttagcattagatatcccctttgtattaagaacagacaacgatatttttactaaaacaaagaaagttaatgataaaaatgttaaattttcttatcaagcaggaatttctcgagttattagaatctacgaagacatattaacaagtgaaaataaggataaattgttaaagttttgggatgaaattaaacatgaaactgaatgggaaaaatctaaaggagcaccccaagttgctcatgaaaatgtaaaatatatcattgaaattgtcgaatgtgataacatatactttgctgaaaaagatctcgaaaatgatattgttaacagtgctttgtttaactctcttaaagaattttatcaagcagaagataagaatgagattgtcaaaaaaatgcaaactgcaaaagcgaacaatatgtttaattatttaaaaaacaatatcgatcaattaagttatttgaaaagtgattctcttgctaaaccactatatcaaataaaagatttagctgaaaaggtcgcttcatgttatgagtag

SEQ ID NO: 414098 - DNA, 696 bp, Staphylococcus aureus
atgaagaaaacattactcgcatcatcattagcagtaggtttaggaatcgtagcaggaaatgcaggtcacgaagcccatgcaagtgaagcggacttaaataaagcatctttagcgcaaatggcgcaatcaaatgatcaaacattaaatcaaaaaccaattgaagctggcgcttataattatacatttgactatgaagggtttacttatcactttgaatcagatggtacacactttgcttggaattaccatgcaacaggtgctaatggagcagacatgagtgcacaagcacctgcaactaataatgttgcaccatcagctgatcaagctaatcaagtacaatcacaagaagttgaagcaccacaaaatgctcaaactcaacaaccacaagcatcaacatcaaacaattcacaagttactgcaacaccaactgaatcaaaagcatcagaaggttcatcagtaaatgtgaatgatcatctaaaacaaattgctcaacgtgaatcaggtggcaatattcatgctgtaaatccaacatcaggtgcagctggtaagtatcaattcttacaatcaacttgggattcagtagcacctgctaaatacaaaggtgtatcaccagcaaatgctcctgaaagtgttcaagatgccgcagcagtaaaattatataacactggtggcgctggacattgggttactgcataa

SEQ ID NO: 414099 - DNA, 534 bp, Staphylococcus aureus
atgactaacatattacaagtgaaactattatcaaaagacgctagaatgccagaacgaaatcataagacggatgcaggttatgacatattttcagctaaaactgtcgtacttgagccacaagaaaaggcagtgatcaaaacagatgtagctgtaagcattccagagggctatgtcggtttattaactagccgtagtggtgtaagtagtaaaacgcatttagtgattgaaacaggcaagatagacgcgggatatcatggtaatttagggattaatatcaagaatgataatgaaacgttagagagtgaggatatgagtaactttggtcggagtccttctggtatagatggaaaatacaccctactacctgtaacagataaatttttatgtatgaatggtagttatgtcataaataaaggcgacaaactagctcaattggttatcgtgcctatatggacacctgaactaaagcaagtggaggaattcgagagtgtttcagaacgtggagcaaaaggcttcggaagtagcggagtgtaa

SEQ ID NO: 414100 - DNA, 1077 bp, Staphylococcus aureus; identical to SEQ ID NO: 411651

SEQ ID NO: 414101 - DNA, 456 bp, Staphylococcus aureus
ttgaaaaaattatgttcattaattgtagtagcattagtttgtatcattgcattatcagcttgtggtaaagaacaaaccaaaacatatgaaggtgatgttagtggtaaacatgtactaacttctatcacatataaagatgataaagttttaaaacagtctacaatcaacacaattaaatatgacgatctaggtatggataaagacgaagccaaaaagttattcgccaaatctgaaagtattttcaaagaccttaaaggcgtaaaatacaaagtagactataaagataaaaaagcaattgaacacttagacatagattacacagaagttgacatgaaaaaattaaataaacgtcttggtgtttcaactaaagaaaataaagatattagttttgaaaaacttgaaaagcaattaaagcacagaggcttaaaagaaaaagataaaatggacgacaaatag

SEQ ID NO: 414102 - DNA, 750 bp, Staphylococcus aureus
atgtcaaatacaaataaacattacatagaagaagaatacgctactgaacaatcgcgttttttcaaacgtgatattggatttattttcctttatatatttttggttaacatcttgccaatcattatcgtctttttaacttttgggttagtagctgtattcactcaacaagccccatggggtttctcttttcctatttcaatgaacattagctatttactcgcagttattctttcattagctatttttcgtcggatgcatgaagatgcgtttattccaatgatacgttcgcaaatcattgccagcaccaaatataaatggcatattcttatatcatttacattaagtatcgtactctttttacttttaaattatttcgatattttcgcactaaatgtagatgcctttactgtctttgacatttacccgctcattagagattatggttccatcagtttaatagtaatgttgtggttaaccattatattaaatactttaatttgtcaacttattttccgtcatattttaattcaagaattaagcagaatcatgcctttaaagattacaatagtattgtccattatccttgaaactctgttctactatccatacattgatacatggtgggaattcattccagcattgatactagctagtagtgcgacttacttatatttaaagtcaaaccgtaattttatggtgagctatttctatcaattagcagttatactcgttttgcatattttcatgtaa

SEQ ID NO: 414103 - DNA, 936 bp, Staphylococcus aureus
atgttcaaatttatcttaaaacgtattgcgctcatgtttccattagtgattgtagtaagttttatgacatttctattgacgtatattacaaatgagaatccagctgtgacaattttacatgcacaagggacgccaaatgtaacaccagagttgattgcagaaacgaatgagaagtacggtttcaatgatccattattaattcaatataaaaattggttacttgaagcgatgcaatttaattttggtacaagctacattacaggtgatcctgttgctgaacgcattggtccagcatttatgaatacattgaaattaacaataatttcaagtgttatggtgatgattacatcaattattttaggtgtagttagtgcattaaaaagaggaaagttcactgatcgtgcgatacgttcagtggctttctttctaactgcattaccatcatattggatagcttcaatacttattatttacgtttcagtgaagttaaacatattgccgacttctggattaacaggtccagaaagttacatattgccagtgatcgttattacgattgcctatgctggtatttactttagaaatgttagacgctcgatggtggaacaattaaatgaagattatgtactttatttaagagcaagcggtgtgaaatctatcacattaatgttgcatgtgttgcgtaatgctttacaagttgcggtatcaatcttttgtatgtctataccaatgataatgggtggactagttgttatcgagtatatctttgcatggcctggactaggtcaattaagtttaaaagcaatacttgaacacgattttccagttattcaagcatatgtattaattgtagcggtattatttattgtatttaatacattagcagatatcattaatgcgctattaaatccaagattaagggagggcgcacgatga

SEQ ID NO: 414104 - DNA, 822 bp, Staphylococcus aureus
atgaatcggcaggttatagaattttctaagtataatccttcggggaatatgacgatacttgttcattcaaaacatgatgctagtgaatatgcatctatcgccaatcagttgatggccgcaacacatgtatgttgtgaacaggtaggctttatagaatcaacacaaaatgatgatggcaatgattttcacttagttatgagcggtaatgaattttgcggtaatgcgacgatgtcatatatacatcatttgcaagaaagtcatttgcttaaagatcaacagtttaaggtgaaggtgtctggctgttcggatttagtgcaatgcgcaattcatgattgccaatactatgaagttcaaatgccacaagcccatcgtgttgtgccaacaacaattaatatgggtaatcattcatggaaagcaatagaaattatttatgaaacatatgtacattatgtgattccagttaaacaagtaacaacagaaattcaacatttggttgaagcgtttgtgcgtgagcaacaatggaatcacaaatataaaacagtaggtatgatgctttttgatgaacaacgtcaatttttacagccattaatctatataccagaaatccaaagtttaatttgggaaaatagctgtggttctggtacagcatcaattggggtttttaataattatcaacgtaatgacgcatgcaaagattttacagtacatcagccagggggcagtattttagtgacatcaaagcgatgtcatcaattgggatatcaaacttcaattaaaggacaggttacaactgtagctacaggaaaagcatatatagaataa

SEQ ID NO: 414105 - DNA, 366 bp, Staphylococcus aureus; identical to SEQ ID NO: 412537

SEQ ID NO: 414106 - DNA, 174 bp, Staphylococcus aureus
atgaataagtttttttactttttgattattttattatctgtatttttaatttttaattttgttaattcgattttatttgataatccttttgactttttagaaagttttatttattcattggttttcacattaatttatttaggtttagagggtcataaaaagaagaagaaatag

SEQ ID NO: 414107 - DNA, 174 bp, Staphylococcus aureus; identical to SEQ ID NO: 414106

SEQ ID NO: 414108 - DNA, 582 bp, Staphylococcus aureus; identical to SEQ ID NO: 412815

SEQ ID NO: 414109 - DNA, 582 bp, Staphylococcus aureus; identical to SEQ ID NO: 412815

SEQ ID NO: 414110 - DNA, 174 bp, Staphylococcus aureus; identical to SEQ ID NO: 414106

SEQ ID NO: 414111 - DNA, 174 bp, Staphylococcus aureus; identical to SEQ ID NO: 414106

SEQ ID NO: 414112 - DNA, 582 bp, Staphylococcus aureus; identical to SEQ ID NO: 412815

SEQ ID NO: 414113 - DNA, 582 bp, Staphylococcus aureus
atgaatgcaattcaaaacagtatatcactaagaaagattttagtagtatctttaagtattttaaccatactttcaatggtcttggattttaatttcaaagaagctcaagcccaaaacaaaaataacattgcagataaaaacgttgaaactttaaacgaaaaagaaattgaaaaagaactaaaatacatatatggcaaaattattattttagataaagacggaacagctaaagatgttaatctagaaaatgccaaatctcgatatggatatgttcctgaaggattccaaaaactaaaaaacgacatagagaataaaaagaaaactagttcaatatcacctagagcagttggtgggaactacaaaaatagcggtgactgtttctattctgaagttttaaactcatatggacagcttttaactggaaacataatcacagcagtttttgaagatgttaaagccaaaaacttaaagggcgtagcaaaaaaattagctaaaattgggataaaaggaaacctagctggaatcgcagctactatggtttcgaaggatgtacaatgtaatcttaaatacgggttactttag

SEQ ID NO: 414114 - DNA, 174 bp, Staphylococcus aureus; identical to SEQ ID NO: 414106

SEQ ID NO: 414115 - DNA, 582 bp, Staphylococcus aureus
atgaatgcaattcaaaacagtatatcactaagaaagattttagtagtatctttaagtattttaaccatactttcaatggtcttggattttaatttcaaagaagctcaagcccaaaacaaaaataacattgcagataaaaacgttgaaactttaaacgaaaaagaaattgaaaaagaactaaaatacatatatggcaaaattattattttagataaagacggaacagctaaagatgttaatctagaaaatgccaaatctcgatatggatatgttcctgaaggattccaaaaactaaaaaacgacatagagaataaaaagaaaactagttcaatatcacctagagcagttggtgggaactacaaaaatagcggtgactgtttctattctgaagttttaaactcatatggagaacttttaactggaaacataatcacagcagtttttgaagatgttaaagccaaaaacttaaagggcgtagcaaaaaaactagctaaaattgggataaaaggaaacctagctggaatcgcagctactatggtttcgaaggatgtacaatgtaatcttaaatacgggttactttag

SEQ ID NO: 414116 - DNA, 582 bp, Staphylococcus aureus; identical to SEQ ID NO: 412815

SEQ ID NO: 414117 - DNA, 582 bp, Staphylococcus aureus
atgaatgcaattcaaaacagtatatcactaagaaagattttagtagtatctttaagtattttaaccatactttcaatggtcttggattttaatttcaaagaagctcaagcccaaaacaaaaataacattgcagataaaaacgttgaaactttaaacgaaaaagaaattgaaaaagaactaaaatacatatatggcaaaattattattttagataaagacggaacagctaaagatgttaatctagaaaatgccaaatctcgatatggatatgttcctgaaggattccaaaaactaaaaaacgacatagagaataaaaagaaaactagttcaatatcacctagagcagttggtgggaactacaaaaatagcggtgactgtttctattctgaagttttaaactcatatggagaacttttaactggaaacataatcacagcagtttttgaagatgttaaagccaaaaacttaaagcgcgtagcaaaaaaattagctaaaattgggataaaaggaaacctagctggaatcgcagctactatggtttcgaaggatgtacaatgtaatcttaaatacgggttactttag

SEQ ID NO: 414118 - DNA, 174 bp, Staphylococcus aureus; identical to SEQ ID NO: 414106

SEQ ID NO: 414119 - DNA, 174 bp, Staphylococcus aureus; identical to SEQ ID NO: 414106

SEQ ID NO: 414120 - DNA, 174 bp, Staphylococcus aureus; identical to SEQ ID NO: 414106

SEQ ID NO: 414121 - DNA, 582 bp, Staphylococcus aureus
atgaatgcaattcaaaacagtatatcactaagaaagattttagtagtatctttaagtattttaaccatactttcaatggtcttggattttaatttcaaagaagctcaagcccaaaacaaaaataacattgcagataaaaacgttgaaactttaaacgaaaaagaaattgaaaaagaactaaaatacatatatggcaaaattattattttagataaagacggaacagctaaagatgttaatctagaaaatgccaaatctcgatatggatatgttcctgaaggattccaaaaactaaaaaacgacatagagaataaaaagaaaactagttcaatatcacctagagcagttggtgggaactacaaaaatagcggtgactgtttctattctgaagttttaaactcatatggagaacttttaactggaaacataatcacagcagtttttgaagatgttaaagccaaaaacttaaagggcgtagcaaaaaaattagctaaaattgggataaaaggaaacctagctggaatcacagctactatggtttcgaaggatgtacaatgtaatcttaaatacgggttactttag

SEQ ID NO: 414122 - DNA, 174 bp, Staphylococcus aureus; identical to SEQ ID NO: 414106

SEQ ID NO: 414123 - DNA, 174 bp, Staphylococcus aureus; identical to SEQ ID NO: 414106

SEQ ID NO: 414124 - DNA, 582 bp, Staphylococcus aureus; identical to SEQ ID NO: 412815

SEQ ID NO: 414125 - DNA, 174 bp, Staphylococcus aureus; identical to SEQ ID NO: 414106

SEQ ID NO: 414126 - DNA, 174 bp, Staphylococcus aureus; identical to SEQ ID NO: 414106

SEQ ID NO: 414127 - DNA, 174 bp, Staphylococcus aureus; identical to SEQ ID NO: 414106

SEQ ID NO: 414128 - DNA, 174 bp, Staphylococcus aureus; identical to SEQ ID NO: 414106

SEQ ID NO: 414129 - DNA, 174 bp, Staphylococcus aureus; identical to SEQ ID NO: 414106

SEQ ID NO: 414130 - DNA, 174 bp, Staphylococcus aureus; identical to SEQ ID NO: 414106

SEQ ID NO: 414131 - DNA, 174 bp, Staphylococcus aureus; identical to SEQ ID NO: 414106

SEQ ID NO: 414132 - DNA, 174 bp, Staphylococcus aureus; identical to SEQ ID NO: 414106

SEQ ID NO: 414133 - DNA, 174 bp, Staphylococcus aureus; identical to SEQ ID NO: 414106

SEQ ID NO: 414134 - DNA, 189 bp, Staphylococcus aureus; identical to SEQ ID NO: 413053

SEQ ID NO: 414135 - DNA, 771 bp, Staphylococcus aureus
atgataaaacgtataaacaaattagtgttaggtattagtcttctgtttttaatcatcagtatcactgctggttgtggcatgggtaaagaagcggaaataaagaaaagttttgagaagacattgagtatgtatccgattaaaaatctagaggatttatacgataaagaaggttatcgtgatgacgaatttgataaaaatgataaaggtacatggattattggttctgaaatggcaactcaaaataagggggaagctctgaaagttaaaggtatggtcttatatatgaatagaaataccaaaacaacaaaaggattttactatgttaatgcagtaaagaaagatggagatggtagacctcaggataataaaatagaatatccggtgaaaatggtagacaataaaatcattccaactaaaggtatcaaagacgaaaacataaaaaaagaaatcgaaaattttaagttcttcgcgcaatatggcagctttaaagatttgtcgaagtacaaagatggagatatttcatacaacccagaggtgccgagttattcagcaaaatatcaattaaccaatgatgattataatgtaaaacaattacgtaaaagatatgatataccaacaaataaagcgccaaagctattgttgaaaggttcgggagacttaaaaggttcatcagttggatataaaaaaattgaatttacttttgtagagaatgaaaatgaaaatatttactttactgatagtctatattttgagtcgagtgaggataaatag

SEQ ID NO: 414136 - DNA, 924 bp, Staphylococcus aureus
ttggataagattgcagtaggcaaaaaaatcagaagtattagaaaagagttaggtcaatcaatggcaaaattcggagaaactatcgataaacaaaaacctgtaaaatctggagtagtatcaaattgggaaaacggaaaacaactaccgaataacgaaagaagcaaaaaaatcgcagaactaggtaatatgacaataaatgaacttttttacgactctccagaagaatatctcattgacgaattaggaggttcttttttcaataagttagataataatgttgatattgatggaatatattttatattatccgttttagtagaaaaatatgccaaatctctaaacaaggaatattatcaaaattacaatttaataaacgaattagatttagaagacttattaaaatttgtaaagttaaatattaataattatatcccctttacgttagaagtgttgaataatattgttaactatataaaaatgcaaaactcagaaatcattaaaaagaggttgccaagtgaacttgcagaaataataatagagagcaaagaaaataatttgaacattaacgcctctacactattgaactatggttttatattaagtagcatagatccctacgattatcatgaacattctgattcttcaaaccttatagagaatttaaaagaatttaattatcgatacttaactcttttagaacacataaataataatgattatgatcctaatattttactagccgactctttcgtaatagaaagaattataaatgagatattaagtttatcagaagatgtaaaaaccaaagacaagataaatttatttataccttataatgactttttaagaactgtaaatgatgagcaactccctgcgctacgtttaaatatgaacaaagaattattcaaaaaatctaaggaataa

SEQ ID NO: 414137 - DNA, 201 bp, Staphylococcus aureus
atgaataaaatagctggatatagaaaaatgcttgggaaatctcaaaaattaatggcacaagaatttgggatatctactcaagcatataggatgaaagagaatggttatgtgaattttaacaaagaggagatgttgaagtttagagatttgttgcaaaaagaattatttccatcaattactattgatgagatatttttttaa

SEQ ID NO: 414138 - DNA, 213 bp, Staphylococcus aureus
atgcataataatttaagtctgtttatgggaagggattgcatttctgcgtcgagattaagtatggttactggtatatctagagcatctatacacagtttttatcacgaacgtactgagaaaccggatacaaaagctgtgatgaagttatgtgagcattttaacataacactaaatgaattttttggaattaatgaaaaaaaggaggttaaataa

SEQ ID NO: 414139 - DNA, 642 bp, Staphylococcus aureus
atgaatatagaaattatcgtaaaccaatttgaaacacgagcaggcacgttactaaggtactacacaggattattagaacatagtaaagtgcaaccgtgttgctttaagttatacaatgatccatttgatatggtatacgtgatgatgaacagcaagctattcggtcatgtatatattaaagattgtaaagtaagtcaatcatttgaattagcgtcacctaagcacactgaggggcttataagaagcatagaggggcattatgtaggttatgaattacatgacggtaaacatctttctattagtgatatgatggctagtcatttgtttgaagatgagtattttatgtatggattacaaacatatgcagaatcaaataatagtgatgtgtttgagtacctagaaaatggatttgatacagatacacttgagggcattcaatcaagtaatactgatgtgatagcgaatattgaaatgttgtatcagttagctacgggaatcaatgaaccagaaccagagttagttgagggattgaagttggtaactgagtttatacaagatgagaatgcgacgcaagaggattacaaggctttagagcataagttaactgagttgaagtcatcttattacagtttgaataagtaa

SEQ ID NO: 414140 - DNA, 342 bp, Staphylococcus aureus
atgcaaagtatcgcagaaaaagagacgtatcatttacccaccgaacacctgcaagttttcaatgtgataaaaaatacgtccaataagtatattactaaaactaaaatcttaaatcaattgggatatgaatataattcaagcaatgaacgatggttacgaagagtaatcaattcattagtatatgattatggctatcctatcggatgcagttataaacctagtgaacgtggttattacatcattacgacagaacaagaaaagcaacaagcgatgagaagtattaagaaattagctgatggcagtatgaaacgctacgaagctttgaaacgaatcgaagtgtaa

SEQ ID NO: 414141 - DNA, 240 bp, Staphylococcus aureus
atggtgaatttaaaaattcgtaatttatataacacgattttagatagttcttttctaattaggtatggatactatgatgttagaatgaaaaagattgaatcaaaaaatattaataatgaagaattagaagattattatggcaaaccagatactttctatttaaaaatttttggtttgcaagacttatattttctgatgaaatcagaggatttaagagaggcttctttttggagggaatag

SEQ ID NO: 414142 - DNA, 258 bp, Staphylococcus aureus
atgaaataccagattcatgttaggtcgaattcagtagcgaataaatattttttgcataagagtgatataattattcaagaaagtggtcttgatattgaacaggaagaaaatttgaaaaatgaagtgagaaattttatagaaaagcatgattgcataactttaataaacggagaaaaaattcaaagcaatttaatcgatagctttgaaattagaaccgacaatatatcgaaagtacatattgaaggcgaagtaaattaa

SEQ ID NO: 414143 - DNA, 282 bp, Staphylococcus aureus
atgattttcatacctcataaaggacaaaagaatgttgaaccacaaattgaagtaaacagtgtgcacgtaaaaaatgggaacacaaataatactaaagtaaatttaaatacggcatctgtatcagaattgatgtctgttcctggagtagggcaagctaaagctaatgcaattgttgaatatcgcaaccaacaaggtgcatttcaagaaattgacgatttgaaaaaagtaaaaggttttggaagtaaaacttttgataaactgaaatcttatttcacgacataa

SEQ ID NO: 414144 - DNA, 423 bp, Staphylococcus aureus
atgaaaagcgttaacattctattaaatttattaccaactgaattaaaaaatatgttagagaataaagatatggagaatattctaacatactttatgtcgaacgaaatttcagatgaaaaattagtatcatatttatcaaatcttgcgaatcaaataaatacaattgaatatcatgaaatggtcgcaagcatctatcactttcatttcaattacatagataatgcctatgatttagcatactatcattattggcaatcgttagagatttcgcaatttaataatgctaatttattatacgaatttttagaaatccttggagaaccagactttgatatgatttcacatgagaatattcaattggtcgcaaataaaattcttgaaagagaccctaataataagttagcaattaaatatattaactaa

SEQ ID NO: 414145 - DNA, 810 bp, Staphylococcus aureus
atgaaaaattatacacttaaaaactttattcgaatactagtcttagtattaaccattacttctgtgacaggagtgattgaaactagaaatgttaatgcaagcgagacttcttataaagaaataacacaagaagatttacataaaaataatttacaaaatcccaatgaagtaaaaattattgataaaacaagtaccaattcgaaaccaacaattgaattaactaaagaagatattgatttaaaagcaaatattcaatatgatttaaatactaactccatggatgttaagggcagatacgtcgatgaaaatggaaaactaataaataaagattatgacgttttcgtaaagcaatttgaaaatacagaatatgaagctacatttatcgacaaagaaactggcgaaataataaaattcaactcaattgaagctaaatcttctgcattgccattagtaatattagctgctgtagctagatacggaataaactatgcaattaaaacatatggaaaaaaagcaactcaaaccgctatcaaaacaaagagttttggtaaagttttaccttctgtagccaatctaggagctaataaaagaaaacatattcttgctagtaaacataattggaataaagttactaaaaacaattggaaagatgtttctaaagtaatgtcgcatgttatgaggtatggaaagcaaagccgatacaaaaagtccgcataccaaaaaacacttgttatgagtggtagaactgtagtcataacttatacacgaaaaaatggcaatatatatatatcgaatggatgggttaaataa

SEQ ID NO: 414146 - DNA, 753 bp, Staphylococcus aureus; identical to SEQ ID NO: 410483

SEQ ID NO: 414147 - DNA, 846 bp, Staphylococcus aureus; identical to SEQ ID NO: 410482

SEQ ID NO: 414148 - DNA, 558 bp, Staphylococcus aureus
atgtacatgattaaaaattcaagaataataaaaggttcgcttgcttttgctcttgtttctggcgtgattgtatgttcagggttaactagtgagcattcttatgcaaaagaaaataatgtcatgcatgcatctgcaaatagttcaggtgaaatcgttaaattgaatgataataccgctagaattgatttgaaaaaaggtattgattatagtgttgacaaaaatggagtggcaacactaaaagatgtaaagactggtaaaaaggaaattttgccatcaactgcaaaagataaaaatggtaaaaatgttacgttaatttattttgaaaaagacggtaaattaggtttttatgtgcagaaaacacaaaaagaacgtggagtagggaaatgcgtttctggtatagcgggtggcgcagtgacaggaggcactactttaggtcttgcaggtgcaggagtaggaacagttactattccagtaattgggacagttagtggaggcgtagttggagctgttggtggtgctgtcggcggtggtctaaccggtggagccacattctgctaa

SEQ ID NO: 414149 - DNA, 558 bp, Staphylococcus aureus
atgaataaaaaactattaacaaaaacattgatagcaagtgctttagttttaacaacagtaggttcaggttttcattcttcttcaaattataatggtattaataacgttgcaaaagctgagcaaacgacagataacgaattgtggaaaaatgtaagagacgctttaaaagacgcgaatattatcgataaaacagatcaagaaacagttgaagtgaagtacaaactcaaaaatggtggtgagcgtagcattactggcactgccaatttggacgagcttagtacttctaataatagtactgttaacactgatagtgttaacactgtcgatattacaagagttaatccaaacggaaataaattagatgctaatgaagcttggaaaaaattaacagataaattaaaagaaaagaatatcgttaaagacggcgatacagtaactattcatagtaaagacaaaaaagaccctaaaatctcagctaaagtcggtgaagactataatggcaacaaggggtttatgctaaatcagagagatataacaaaaataactataactaaataa

SEQ ID NO: 414150 - DNA, 945 bp, Staphylococcus aureus
atgagtaaaaaagcagaagaaattcagtcaaaacaaagttcagaacacgaaaatttaaatttttctaaaaccggctactctaatagccggttaaaccgacatactatgtacaccccggaaccaaaattaagttttgacgctatgactattgttggaaatcttaataaaaataatgctcacaaactatctgaatttatgagtgtcgagccacaaattcgactttgggatatactacaaactaaatttaaagctaaagctctacaagaaaaagtttatatcgaatatgacaaagtaaaagcagatacgtgggatagacgtaatatgcgtgttgaatttaatccaaataaacttacgcatgaagaaatgctttggttaaaacaaaacattatcgactacatggaagacgatggttttacaagattagatttagcttttgattttgaatatgatttaagtgattattatgcaatgactgataaatcagttaagaaaactattttttatggtcgtaacggtaaaccagaaacgaaatattttggtgttcgtgacagtgatagatttattagaatttataataaaaaacaggaacgcaaagataatgcagatattaaaattatgtctgaacacttatggcgtgtagaaattgaattaaaaagagatatggttgattattggaacgattgttttaatgatttacatatattacaaccagattggaaaactatcgaacgtacttctgatagagcaatggtttttatgttgttgaatgatgaagaagaatggggaaaattagaaagacgtactaagaataaatataaaaaattaattaaagaaatatctctaattgatttaactgatttaatgaaatcgactttaaaagcgaacgaaaaacaattgcaaaagcagattgatttttggcaacgtgaatttagattttggaagtaa

SEQ ID NO: 414151 - DNA, 639 bp, Staphylococcus aureus
gtgctttgtgaatctagacaaatttataaaaatcctaaatatcgagttattaaatataataatgaatatttcatggtcgatttagtaagtacttggattacttattttttccctatgattaattggtttattcccaaaaagtacgcgaaaattagtagagaagaatttgaaagtttaaatattgtcaaacccgctaaaaataatactttctggcctgttgcaggatttgcagtgttattaacaaccttaacaagaaaatatatctatttgcttaacatccatttagaaaaagaaatagttatattaacatgctgtatgatacttctaggtgttttcgcattgtttatatatataaatacaaaattgaagttacatatttttgataaaaataaaagtaataacgataaaatcatattaatccctacatttaaaaatatttgtttatccctaattgcctatgtgtttttcggtggcttttcaataatgcttttaagtatgttgatgaccttaaatcctcaaaatataataggattcttagctttgtttggtatgattgcagctttctttatagcaaacaggtcttcaattatcgataaaaatgtttacgcaatactaaggtcaaaagaggttgagaagtga

SEQ ID NO: 414152 - DNA, 303 bp, Staphylococcus aureus
atggcaactttaaagatttatcgaagtacgaagtacaaagatggaaatatttcatataatccagaagctccgatttattcagccaaatatcaactaaccaatgatgattataatgtaaaacaattacgcaaaagatatgatataccgacgagtaaagctccaaagttattgttaaaaggttcagggaatttaaaaggttcatcagttggatacaaaaaaaatgaatttactttcgtagagaaaaaaggagaaaacacttactttacagctaatctacattttaaaccgagtaatgatgaataa

SEQ ID NO: 414153 - DNA, 867 bp, Staphylococcus aureus
atggaaagtgaatcaaaaaaagacacaaaaacagaaacaaaatctgtatcagaagaaatggaagcttcaaaatatgtaggacaaggcttccaaccacctgcagaaaaagatgcgattgaatttgcgaagaagcataaagataaaattgccaaacgaggcgaacaattttttatggataacttcggtttaaaagttaaagctacaaatgttgtaggtagtggcgacggtgtagaagtattcgtgcattgtgatgaccacgatatcgtatttaatgcaagtattccatttgacaaatcaattattgacagtgatagctcaataaaaagtgaggataaaggcgatgatatgagtactttagttggtacagtgttgagtggctttgaatatcgagcacaaaaagaaaagtatgacaatttatataaatttttcaaagataatgaagagaaatatcaatatacaggatttacaaaagaggcaattaacaagacacaaaatagtggctatgaaaatgaatatttttatattacgactataccgtataatttaactgagtatagagactattttgaaccattattaaacagaagtaacagtgaattttcaaaagaaatgtcaaatgttaagaagcaattaaaagataagtcaaaagtttcgttaactactactctatttagtaaaaagaagaactatactaaaaaaaataatagtgaaaatgtaatagaaatggcagaagaaataaaaaaagaaaaagatattccaaatgagatagatcttagtatacaattttcagataatagaataaatactattaaaccaaattatagcagtaaagataattcggaatatggagtatttgataatgaataa

SEQ ID NO: 414154 - DNA, 378 bp, Staphylococcus aureus
atgaacactatttacgaaccgtcaagtatttgtatgattagaacacctttattatcagttgaatttttcaatttatttttaaatactgaacaaattaaatatagcgacttacaattaaatgctcagatgaaagaatcaatcctaacaacaacatttaacttatatcgtactttacaagaaataaattttgatggcgataacaagaaggttagagatgctaaagaaagtttattaaaatatttaattagaatgtcaacacgtccaactccatttggattattaagtggtattaatttggggcattttgtaaatgaaccaacacgtcttaaagctgtctcttatacacatctgacgctgccgacgatctactctgtgtag

SEQ ID NO: 414155 - DNA, 462 bp, Staphylococcus aureus
  misc_feature (72)..(81): n is a, c, g, or t
atggctaaacttgatttaaatagtcttgacgacgagcacgtaaaattcttaataaatgaattaaaatatccnnnnnnnnnncacagagtagatcgtcggcagcgtcagatgtgtataagagacagaataaaaacaatagttgctagtcgaataaatgaaaggcaagaaataataagtttaaagttaggaataaagtacttcttaacaataaaaagggataacatagaaaaagatagattttcaatttcaatcattttcaaagatacctatcacaccctagttagaatagatattaacggtggtactcacgataatccagatggaacaatcgctccgaaaagtcatattcacatatataatgataagtatgataaaaaggataggtttgcttatgaaattaacttgaaagatttccccgacatctataacttgtataatgtgtatatgtcgtttttagagtaa

SEQ ID NO: 414156 - DNA, 237 bp, Staphylococcus aureus; identical to SEQ ID NO: 408128

SEQ ID NO: 414157 - DNA, 471 bp, Staphylococcus aureus; identical to SEQ ID NO: 409815

SEQ ID NO: 414158 - DNA, 444 bp, Staphylococcus aureus; identical to SEQ ID NO: 409437

SEQ ID NO: 414159 - DNA, 609 bp, Staphylococcus aureus; identical to SEQ ID NO: 410148

SEQ ID NO: 414160 - DNA, 294 bp, Staphylococcus aureus; identical to SEQ ID NO: 408498

SEQ ID NO: 414161 - DNA, 1935 bp, Staphylococcus aureus; identical to SEQ ID NO: 409387

SEQ ID NO: 414162 - DNA, 312 bp, Staphylococcus aureus; identical to SEQ ID NO: 408496

SEQ ID NO: 414163 - DNA, 627 bp, Staphylococcus aureus; identical to SEQ ID NO: 409389

SEQ ID NO: 414164 - DNA, 306 bp, Staphylococcus aureus; identical to SEQ ID NO: 413146

SEQ ID NO: 414165 - DNA, 300 bp, Staphylococcus aureus; identical to SEQ ID NO: 413147

SEQ ID NO: 414166 - DNA, 546 bp, Staphylococcus aureus; identical to SEQ ID NO: 412734

SEQ ID NO: 414167 - DNA, 861 bp, Staphylococcus aureus
atgacaggagagacagttgtatataaaaatgaaatgaatttagttccattaaggcgatttacagctactgaaattaatttattttttgcgatgtgtaataaattaaaagagcaagatactaatacattacgtttgtcttttgatgaattaaaaaaattaagtaattatagtccagaaacacgtaatattaatagatttgctaatgatttagataatgtgtataaaaagatgttgaatttaaccattagatatgaagatgatgatgtaatagaaagattcgttttattcaatcattatagaatccataagcgagaacaatatctagaaatatcaacttcttcaaatttaaaacacatattgaattcaattactaataattttacaaaatttgaattaaaagaaatgactaggcttaaatctacatattctaaaaatatgtttagattacttaaacaatacaaacatacaggctatttaaaaattcacatcgatgattttaaaaatcgtttagatatacctaaatcttatcgtatgactgatattaacaaaaatgtttttaaacctattattattgaattaggttctacatttaataatcttactatcaataaaatcaaagcgaaaaaagggcgtaaaattgaatggatagagttcacatttgacgctgagaaacgcattcataacaaacgacaacctcaaatgtccaagatagataaatcaagacaatatgtgaggcgtgaaaagacgcctaaatggttagaagaacggtcatatgaaaagcaacctcaaaaagattacgacccacaattagagaaagaacgagaggattttttaaaacaacttgaactgaattgggaataa

SEQ ID NO: 414168 - DNA, 342 bp, Staphylococcus aureus; identical to SEQ ID NO: 409374

SEQ ID NO: 414169 - DNA, 444 bp, Staphylococcus aureus; identical to SEQ ID NO: 409437

SEQ ID NO: 414170 - DNA, 435 bp, Staphylococcus aureus
ttgtggaaagaagtatcaacttctttagatctcaaaaatcaaaattatccataccttgctcaagaatatattataaaagaaaactatgatattagagcattagtcattaataataaaatagtgggtttatttaaaagagttagtaataacaattggaaaaccaatactcatttaggagcggaaataaagcctatagaaattacagaagaaattagtgatattattaacaaaatttcgattatattgccaaatgcaattttaggtgtagatttgcttttcgatgtttcaagacagaaatatattatttgtgaagttaataacaatcctgaatttgcaaaaagcagtaaaatatacaaaaaaaatattggtgaaataatatcagaattcgtaacaaaggagcccaaaaatgacaaatctgaagaacgattactataa

SEQ ID NO: 414171 - DNA, 501 bp, Staphylococcus aureus; identical to SEQ ID NO: 407664

SEQ ID NO: 414172 - DNA, 501 bp, Staphylococcus aureus
atgactttcgaagaaaaactaagtcaaatgtataacgagattgcgaatgagattagtgggatgataccaatagagtgggaaaaggtatatacaattgcttatgtagatgatgaaggtggagaggtcgtttttaattatactaaaccaggtagcgatgaattgaattattacacatatatccctagagagtataatgtctctgaaaaagtattttatgatttgtggacggatttatatagattgtttaagaagttaagaaatgcatttaaagaagaaggacttgacccatggacatcatgtgaatttgattttacaagcgaaggtaaattatacgtatctttcgactatatagattggattaaattaggttttggcccatcaggaaaggaaaactattatatgtacaaaaaatttggggttataccagaaatgaaatatgaaatggaagaaattaaagaaatcgagcaatatattaaagagcaagatgaagctgaaatatag

SEQ ID NO: 414173 - DNA, 537 bp, Staphylococcus aureus
atgactgaaaaacctaatattgagaacttagtaaaatttattaaattaaaggaaagcataggtaactacatttttgttagtttagggaatccgttagttaaagctcaagtaaagattttgaaaaatattaattatttagaaaatgatttgaataaactgtgtcaaaagtttaaaaataaatcaggaaagtacccaacttgggtcaaattagatattgtaactagtcaaaaaacaattccttttcatattttgcaagatgaaatgattaacactaggaggaattatatagattttggcatttcgttagataaatactggaatgtaacatttctacctgaggaaattaatgccaatgcttttattagaccaaagaaaaatacaaacgaattatatttatctgaaaaaaatgtgaataattatattagtaaatacaaaaattataaatacaaattttctaaagaattctatgattctaaggacgtaattaaattttttacgaaatcgttttttttgacggagaagagatttatgaactaa

SEQ ID NO: 414174 - DNA, 771 bp, Staphylococcus aureus
atgatgaaacgattaaacaaattggtattgtacattagttttttgatattaatcatcagtatcgttgctggttgtggtacagggaaagaagcggaaataaagaaaagttttgaaaaaacattgagtatgtatccgattaaaaatctagaggatttatacgataaagaaggctatcgtgatgacgaatttgataaaaatgataaaggaacatggactattagttctgaaatggcaattcagaaaaagggagaagccttaaatataaaaggtatggttttgaagttaaatagaaatacaagaagtgcaaaaggattttactatgttaatgcgataaagaaggatgaaaatggcagacctctggataatcaaatagaatatcccgttaaaatgattgacaataaaatcattccaactaaagatatcaaagatgaaaaaataaaaaaagaaatcgaaaactttaagtttttcgcgcagtatggcaattttatagatttgacgaagtataaaggtggagatatttcatataatccagaagccccgatttattcagcaaaatatcaactaaccaatgatgattataatgtaaagcaattacgtaaaagatatgatataccgacgaataaagctccaaagttattgttaaaaggttcaggaaatttagatggttcatcagttggatacaaaaaaattgaatttactttcgtagagaaaaaaggagaaaacacttactttacagctaacctacattttaaaccgagtaatgatgaataa

SEQ ID NO: 414175 - DNA, 804 bp, Staphylococcus aureus
atgaaatcaatcccggtaaaagagcgtgatgaaatgataaaacgtgtaaataaattagtgctaggtattagttttctgcttttaatcatcagtatcgttgctggttgtggtacagggaaagaagcggaaataaagaaaagttttgaaaaaacattgagtatgtatccgattaaaaatctagaggatttatacgataaagaaggctatcgtgatgacgaatttgataaaaatgataaaggaacatggattgttcgttcgtcaatgtcgattcaatctaatggaaaagatatgaatataaaaggcatggttttatatatgaatagaaatacaagaacaacaaatggctattactatgttgatgttatagaaagagaagataaaggtatacatcgtgataacgaaaaaagatatccggttaaaatggtcgataataaaatcattccaactaaagaaattaaagatgaaaaaataaaaaaagaaatcgaaaactttaagttcttcgcgcaatacggcaactttaaaaatttgaaaaattataaagacggagatatttcatacaatccagaggtgccgagttattcagcaaaatatcaattaactaatgatgactataatgtaaaacaattacgaaaaagatataatataccaacgaataaagcaccaaagctattgttgaaaggtacagggaatttaaaaggttcatcaattggctacaaaaaaattgaatttactttcgtagagaaaaagggagaaaatatatactttagtgatgggctacattttaatccaagtgaggataaataa

SEQ ID NO: 414176 - DNA, 771 bp, Staphylococcus aureus
atgataaaacgtataaacaaattagtgttaggtattagtcttctgtttttaatcatcagtatcaatgctggttgtggcatgggtaaagaagcggaaataaagaaaagttttgagaagacattgagtatgtatccgattgaaaatctagaggatttatacgataaagaaggttatcgtgatgacgaatttgataaaaatgataaaggtacatggattattggttctgaaatggcaactcaaaataagggggaagctctgaaagttaaaggtatggtcttatatatgaatagaaatacaagaagtgcaaaaggattttactatgttaatgcagtaaagaaagatgaagatggtagacctcaggataataaaatagaatatccggtgaaaatggtagacaataaaatcattccaactaaaggtatcaaagacgaacacataaaaaaagaaatcgaaaattttaagttcttcgcgcaatatggcagctttaaagatttgtcgaagtacaaagatggagatatttcatacaatccagaggtaccgagttattcagctaaatatcaattaacgaatgatgattataatgtaaaacaattacgtaaaagatatgatataccaacaaataaatcgccaaagctattgttgaaaggttcgggagacttaaaaggttcatcagttggatataaagatattgaatttactttcgtggagaaaaaaggtgaaaatactttttttactgatagtctacatcttgaaccaagtgaggctaaataa

SEQ ID NO: 414177 - DNA, 768 bp, Staphylococcus aureus
atgaagtgtttaagtaaatgggcattttacattagttttttgatattagtcattagtatcactgctggttgtggcataggtaaagaagcggaaataaagaaaagctttgaaaaaacgttgagtatgtatccgattaaaaatctagaggatttatacgataaggaaggctatcgtgatgatcagtttgataaaaatgataaaggcacatggattgttaattcggaaatggcgactcaaaataagggagaagctttaaaaattaaaggtatggtcttgtatatgaatagaaataccaaaacaacaaaaggatattattatgtaaatgcaataaagaatgataaagacggaagaccccaagagaatgaaaaaaggtacccagttaaaatggtcgataataaaatcattccaacaaaagaaattaaagataaaaacataaaaaaagaaatcgaaaactttaagttctttgttcaatatggaaactttaaagatttgtcgaagtacaaagatggagatatttcatacaatccagaggtgccaagttattcagcaaaatatcaagtaactaatgatgattataatgtaaaacaattacgcaaaagatatgatataccgacgagtaaagctccaaagttattgttaaaaggttcagggaatttaaaaggttcatcagttggatataagaatatagaatttacttttgtagaggaaaaaggtaaaaatatatattttagtgatagcttagattataaaaaaagtggagaagtataa

SEQ ID NO: 414178 - DNA, 384 bp, Staphylococcus aureus
atggtcgacaataaaattataccaactaaagatatcaaagacgaaaaaataaaaaaagaaatcgaaaactttaagttttttgttcaatacggcgattttaaagatttgtcgaagtacaaagatggagatatttcatacaatccagaggtaccgagttattcagctcaatatcaattaactaatgatgattataatgtaaaacaattacgtaaaagatatgacataccaacaaataacgcgctgaagctgttgttgaaaggtacagggaatttaaaaggttcatcagttggatataaaaaaattgaatttacttttttagagaataaaaatgaaaatatttactttactgatagtctacatcttgaaccgagcgaggataaataa

SEQ ID NO: 414179 - DNA, 588 bp, Staphylococcus aureus
atgttaggtagtgaacaaatgatggaaagtaaatccatagatccaagaatcgttagaaccaaacaattgcttgtcgatgcttttcttaaaatttctagagaaaagaaattatctcaaattacagttaaagatatcactgatattgctacgctaaatcgtgcaacattttacgctcatttcactgataaagaagacctcctagactacacattatctgtaaccattttaaaagacttgaatgataatttgagcatttctaatgtcattaatgaaaaggttctgcgtaatattttcatttcaattgcgagttatatcaaagatgctgcaaagtcttgcgaattaaatagtgaagcattttgcaacaaagcacatcaacgtattaataatgaattagaagatatttttgcgattatgttagaaaacagctacccagagcatcaacgagatattattgtaaatagtgcgagttttttagcagctggtatctcaggcttagcattacattggtttaacacgagtcaagagacagccgatgtgtttatcgatcgcaaccttccatttttaattcatcatatagcacatttttaa

SEQ ID NO: 414180 - DNA, 147 bp, Staphylococcus aureus; identical to SEQ ID NO: 411161

SEQ ID NO: 414181 - DNA, 507 bp, Staphylococcus aureus
atgaataatttaacagtagatcaattacaagagttattacaaatacaaaaggagttcgacgatagaataccgacgctgaacttaggagatagcaagattgcatatgtagttgaattctttgaatggtttaatacattggaaacgtttaagaactggaagaagaaaccaggtaagccgttagacgtacagttagatgaattagctgacatgttggcgtttggattgagtattgcaaatcaacaagaggtaacgaacgaaaaattagaatatggattaagcactcttagaaaagatgggtatctttacaatgaatctcaatccgtttgggactttatgtcagatgtatcaaacgttggtttagaacctttaagtgcagttattataccactagatattgcttacaacttatattctatcgaccaactcattgacgcgtacaaaaagaaaatgaaaaggaatcatgaaagacaagatggaacagcagacgcaggaaaaggatacgtgtaa

SEQ ID NO: 414182 - DNA, 432 bp, Staphylococcus aureus
atgataccggtagagtgggaaaaagtatatacaatggcttatatagatgatggaggaggggaggtattctttaattatactaagccaggtagtgatgacttgaattattacaccgatatacctaaggagtataacatttctgtgcaagtatttgatgatttatggatggatttatatgatttgtttgaggagttaagagatttatttaaagaagaagatttagaaccatggacatcatgtgaatttgattttacaagtgaaggtaaattaaaagtttcacttgattatattgattggataaatacagagtttgatcaattaggccgtgaaaattattatatgtacaaaaaatttggggttataccagaaatggaatatgaaatggaggaggttaaacaaatcgagcaatatattaaagagcaagaagaatag

SEQ ID NO: 414183 - DNA, 186 bp, Staphylococcus aureus; identical to SEQ ID NO: 409375

SEQ ID NO: 414184 - DNA, 201 bp, Staphylococcus aureus
atgtttgttacaaaagaagaatttaaaaatttgaatgtaaaagaagtatttgaatcaggaaaaaactttataaaaatcacagatggaagacatgcaatatattgggtaaacgatagatacgtagtacttgaccataaaaaaggcgatttgtacccgcaaaaagcatacccaaaatatatcaaaagaaaattagtaagttaa

SEQ ID NO: 414185 - DNA, 207 bp, Staphylococcus aureus
atgacagcaataaaagaaataattgaatcaatagaaaagttattcgaaaaagaaacaggatataaaattgctaaaaattccggattaccatatcaaactgtgcaagatttaaggaatggaaaaacatctttatcagatgccagattcagaacgataataaagttatacgagtatcaaagatcacttgaaaacaaagaagataaatag

SEQ ID NO: 414186 - DNA, 1392 bp, Staphylococcus aureus
atgaaagtagcaatttacactagagtttcaagcgctgaacaggcaaatgaagggtattctatccacgaacaaaaaagaaagttaatttcattttgtgaagttaacgactgggatcgatacgaagtattttcagacccaggcgtttctggcggttcaatgaaaagaccatcattacaaaagttgtttgatagattagaagaattcgatttagtactagtatacaaattggacagattaacacgtaatgttagagacttactggaaatgttagaggttttcgaaaaaaacaatatagcttttaaaagcgcaacagagttatttgacacaacttctgctataggcaagttatttataacaatggttggtgcaatggcagaatgggagcgtgagacaatacgagagcgctctttaataggagctcgtgcagcagttagaagtggtaagtatattaaagttcaacctttttgttatgacttagtagatcaaaaattaaaacctaatcaatacgccgaatatattcgtttcatagtggataagttactgagcggtaagagcgctaatgaagttgttaggctgttagaaagcaagaagaaaccacctggtataacaaaatggaacaggaagacagtacttgggtggatgagaaacccgattttgcgaggacataccaaacatggagatttactaataaagaacacgcatgagccaatcataagcgaagatgaacattcaaagatgcttgatattattgataaaaggacacataaatctaaaacaaaacataattctatatttagaggtgttatagagtgtccgcaatgtcaaaacaaactctacctagttagctcgatacaaaaacgtgctaatggaggatcttatgaagttagacgttatacttgtgcaacatgtcataaaaacaaagaagttaaagatgtttcattcaacgaaagcgagattgaaagagagttcatcaatactttactaaaaaaaggaacagataacttcatggtaaatatacctaaaccaaaagattatgatattgaaaataataaagaaaaaatattagagcaacgcgcaaattatacccgcgcttggtcattaggatatatcaaagatgaagaatattttgtattaatggacgaaacagataagttattgaaagatattgaagaaaaagaaagccctcgaattaatatagaattaaatgaacaacaaattaggtcagttaaaaatttattaatcaaaggctttaaaatggcgactgcagaaaacaaagaggaattaattacaagcaccgtcgatttaattaaaatagattttatccctcgaaggttaaataaagaaggtaatattaatacagttaaaatcaatgaaatacatttcaaatattaa

SEQ ID NO: 414187 - DNA, 285 bp, Staphylococcus aureus; identical to SEQ ID NO: 411796

SEQ ID NO: 414188 - DNA, 519 bp, Staphylococcus aureus
atgaacttcaatttaaatttacaaggcgcacaagaattaggaaattatatgcaaccaggatcatacagtgtaaaaatcaaaaacttcgaaagtaaaaattcgaaaaacggacatccacaatttgcaatcacgtttattcataaagaagaaggcgaattcactcactatgcaaacggtgatacttcaaacgacttcgccaaaaactggttatacacattcttgaaggcaattggcattaatgacaataatggtcaatttaactttactgaacgagatgtaataggtaaaccaatcaatattgagttagaacgaaaacataacgattatacagataaatggaatacggttttaaaaaggttttggaaatttgaaggtacagcagtttatgaaaaagttggaattaaagaaaacgaaaaaaacgataacaatgagagttctaacaactctaatgtgaataataatccgtttgaaaatactaataattctattgatatatctgatgacgatttgcctttctag

SEQ ID NO: 414189 - DNA, 651 bp, Staphylococcus aureus
atgtatccaaactgggggcaatataaacgcgctgatttaatcggacaatcttcttatattaaaaataatgatgtcgtaatattcaatgaagcatttgataatggcgcatcagataaattattaagtaatgtaaaaaaagaatatccttatcaaacacctgtactcggtcgttctcaatcagggtgggacaaaactgaaggtagctactcatcaactgttgcagaagatggtggcgtagcgattgtaagtaaatatcctattaaagaaaaaatccagcatgttttcaaaagcggttgtggattcgataatgatagcaacaaaggctttgtttatacaaaaatagagaaaaacggtaagaacgttcacgttatcggtacacatacacaatctgaagattcacgttgtggtgctggacatgatagaaaaattagagctgaacaaatgaaagaaatcagtgactttgttaaaaagaaaaatatccctaaagatgaaacggtatatatcggtggcgaccttaatgttaataaaggcactccagagttcaaagatatgcttaaaaacttgaatgtaaatgatgttctatatgcaggtcataatagcacatgggaccctcaatcaaattcaattgcgaaattggaaatgataatttaa

SEQ ID NO: 414190 - DNA, 144 bp, Staphylococcus aureus
gtgaagaaaacagaacgtaatttattctcaatttttttatctttaggaagtatttttgcgatgtttagtggtttgtttattttaggtattggaatgttaattggtggagcagctctactaaccaaaagtatttctgaagaataa

SEQ ID NO: 414191 - DNA, 249 bp, Staphylococcus aureus; identical to SEQ ID NO: 412832

SEQ ID NO: 414192 - DNA, 243 bp, Staphylococcus aureus; identical to SEQ ID NO: 409872

SEQ ID NO: 414193 - DNA, 189 bp, Staphylococcus aureus; identical to SEQ ID NO: 407963

SEQ ID NO: 414194 - DNA, 162 bp, Staphylococcus aureus
atgagcaacatttataaaagctacctagtagcagtactgtgctttacagtcttagcaattgtacttatgccgtttctatacttcactactgcatggtcaattgcagggttcgcaagcatagcgactttcatattttataaggaatacttttatgaagaataa

SEQ ID NO: 414195 - DNA, 366 bp, Staphylococcus aureus
atgattcaaatatacttaaagaaaaggaaatttccgaaccagtaccgaaaaaaaagtgagttaagacctgtaaattgtattaatatactaccggaacaccataaatatatagactggataaagtatcatttattttataacaaattcgtaccattggattatttaagtataaagccatatatttattttgataatatagaacattataaaagtgagttatcgctattgaatgaacgatgtaataacatttctgttatgccatattatgtgagtgaagataattttaatttatctttttcagaatgcaaaatacctaaatatattaagaaagattgggctataacaacaatggagaataaaaattaa

SEQ ID NO: 414196 - DNA, 357 bp, Staphylococcus aureus
atggtcgtgttattacttatatgtggttgtatacctaagcttggcgcattagcaaatatcataccgctacctgtgttaggtggtgcgatgatagctatgtttggcatggtaatggcatatggtgttagtatattaggacatatcgattttaaaaatcaaaacaatttattaattatcgctgtatcagtaggattaggtactggtataagcgctgtaccacaagcatttaaaggtttaggtgaacaatttgcatggttgacccaaaacggaattgttttaggcgcaatctctgcaattattcttaatttcttttttaatggaataaagtataaacaaacggaagaaaatgtgaaataa

SEQ ID NO: 414197 - DNA, 171 bp, Staphylococcus aureus
atgactaacacattagacacgctcatcgcattatctaaagagtacacaagattattagaagagcgaaagcaaaataagtataacgttaaagaaacacgattaaaacgcacaggtttagttttaagacaaacaatgattgatttggaaaaaggtggaatggaaaatgactaa

SEQ ID NO: 414198 - DNA, 663 bp, Staphylococcus aureus
atggattacttaggtttaataagtaatatgctagggattggcggtgcagtatatggtataggctcctttctttactatagaaaaataaaattttatatgtttatttccaagatttttaaatttaataaaacaactgaaatcacattaaattaccggtgtattagtgaaagtaatataaccctaaaaaatataaaagaaattttaaaaaaagaaagttacactgttatgaatgctaacactaataacattatcattaatatgaatgattttataattcaattcaaaaaagatgattttcctacagatgaatatggagaaaatgcatttataagtatgactttaactagaacttattataagcaagcaaaaaaagcgatagataaatttatgaatatatgcgaagacttcaacactgtcaacttagaagataaggggacttatactttgaaggtattttacaataatattaaaaatccatatttgtccacctcgacccatagaattaaagaggaaaatataaaaaatatgattctttatgttgacgcatcgtttttagtagatggcttaaacgaagaagtggttataaataaaaaaagtttatcttattcaagcaaaagttcaaaaaacatatataaaattgcaaatgattttatgattatatag

SEQ ID NO: 414199 - DNA, 642 bp, Staphylococcus aureus
gtgcagtcaatatgggtatttgagtctgaaaataataaagtagaaattagcaatataacagctacacgtcagaagaatttgaatggtgttaatgaagacttaactacagaattgtttgttaatgaggatgtcggagaatacattagatgtaacttagttgttgatgaacccaaatctatacaagcgagggctttgggtaaaaatttgactagtgttatcttaagaaatagatatgaggctttttatagaccgtctgatggaaatttagtagtatatgctaataaagatgcggctcatattataaaagatgtttttgacgaacaatttaaattgggatacagggaaagaacaattaatttagatgagattattaatacgtctaacaacgttaggaaagcacaatttaaaaatgttactatagaaactgtaactggtggaatgttaaatggtgatcaggttcacaatactgaactctatggattaatggatagagctggagacctttctacagttgcagttgtatatccgtttttagataaagaaattagttttagtgtttctatatatggaagtatagttctttacacaaatatcacatacgaagaatgcctagaattaataaatgatttgtttaatttgtga

SEQ ID NO: 414200 - DNA, 243 bp, Staphylococcus aureus; identical to SEQ ID NO: 407422

SEQ ID NO: 414201 - DNA, 369 bp, Staphylococcus aureus; identical to SEQ ID NO: 409868

SEQ ID NO: 414202 - DNA, 234 bp, Staphylococcus aureus; identical to SEQ ID NO: 413698

SEQ ID NO: 414203 - DNA, 264 bp, Staphylococcus aureus
ttgacgggcgtagatggtaggttacaaacgcggaattatgaaaataaggaaggtcaacgtgtatatgttacggaagttattgctgatagtattcaatttttagaaccgaaaaactcaaatgacactcaacaagatttataccaacaacaagtacaacaaacacgtggacaatcgcaatattcaaataacaaaccagtaaaagataatccgtttgcgaatgcaaatggtccgattgaaatagatgacgatgatttaccattctaa

SEQ ID NO: 414204 - DNA, 390 bp, Staphylococcus aureus; identical to SEQ ID NO: 408590

SEQ ID NO: 414205 - DNA, 330 bp, Staphylococcus aureus
atgaaattatttattattttaggtgcattaaacgcgatgatggctgtcggaacaggtgcatttggtgcgcatggtttacaaggaaaaataagtgatcactatttatcagtatgggaaaaagcaacgacgtatcaaatgtaccatggcttagcattattaattataggtgtaattagtggtacaacttcaatcaatgttaactgggctggctggttaatatttgctggtattattttctttagtggatcattatatattttagtattaactcaaattaaagttttaggtgcgattacaccaattggtggcgtattgttcatcattggatag

SEQ ID NO: 414206 - DNA, 1050 bp, Staphylococcus aureus
atggcatcatttactattacaaaaagaaagaataaaacgtcgacatcttggcaatacgatgtaaaacatccgtctttcaaatcaggaaagaaaagaaagtcgggattcaaaactaaagcagaggcaaccaacgctgctcaacaactgcttagagatttggatgatggaaataatttagatgaaaataaaaagtttgaagaatattacaatgattggttagattcaaaaaataagaaacatgtcgcttcacaacaattctattggtatcaacgttcattaaaattgtttaacgaatatttcgggagtgattttttaataaaaaacatcaaacgttccgagtatcaaaagtttttgaacgaattcggtcgtggtcgtactaatgaaacggttcgtaaattaaacagttgtttatcacaatgcttcagagatgcagtatatgaggggtatttaaagaaagatcctagctatcaaatagatattcgtggtacaaaaaaatcaaaagacgaacactctaaattcatcaccatagaacaatacttgcaattgatagaatactttaaatctagagacgaaccgagttatatttttttattcatcctagctatcactggtgcaagatacagcgatgtaattaatatgttgcctatcgatctaaacgaaaaagagggcacaatacatcttcgtggaacaaaaacagttaacgcggacagacttgtggaggtaccaaaaaaggatatacaacatattaaagctaaattatcaaaattaccaaaacgtacagataataagttgtttaaattaagtcataatgccgttaaaaagtcatttaaccatgctaagagtcaaataggactaaatgatactaaaataacgccttattcattaagacacacgcatacatctttcctactttctagaggtatacctattgaatatattagcaaaagattagggcattataatatatctataactttagacacctactctcacttacttgatgaacataaaaaagagcaaggtcaacgtgtcagaaaattattttcttga

SEQ ID NO: 414207 - DNA, 462 bp, Staphylococcus aureus
atgggattatatgaagaaactttaatacaacatgattatattgaaataagagaggctgatgtacttccagataatttagacggggtatggttaggagatttaattttaataaagcgtggtttatcagatagagaaaaagcaggaattctcttcgaagaattagcgcataataaacttacatacggtgatatagccgattactcgaatttcaacaatcgcaagttcgaaaattacgcacgtagacacggctttatctcagctgtaccgctacgcgaaattgtagaagcttataattatggcgtacgcaacttgtatgagttgtctgagtatctacaattaagcgaagaatacatattagaagcaatagaacaatataaaaagatatatggtattggaactcactatggcgagtattctattacatttgagccgttgagagtttttaaatataaggaaatataa

SEQ ID NO: 414208 - DNA, 2064 bp, Staphylococcus aureus; identical to SEQ ID NO: 408671

SEQ ID NO: 414209 - DNA, 1695 bp, Staphylococcus aureus
atgtataaaaattataacatgactcaacttactctaccaatggaaacttcagttcttatccccacaaatgatatttcacgacatgtaaatgatattgttgaaacaattcatgacaatgaattcgacgaattcagacatcaccgtggtgcaacttcgtaccatcctaaaatgatgttaaaagtgattctatatgcctacacacaatctgtattctcaggtcgtaaaatagaaaaaatgcttaatgatagcatccgaatgatgtggctatcacaaaatcaaaaaccttcttataaaacaattaatcgatttagagtaaatccaaaagtagatgctttattagaatctttatttattcaattttacagtcagtgtgtaaaacaaaatcttatagatgataaagctatttttattgatggtacaaaaattgaagcaaatgccaatcgatatacatttgtatggaaaaagagtattcaaaaccatgaatcaaagatgaatgaggattctaaagccctctaccatgaattggtaaccaataaaatcataccggaaattaaaaaagatcatgataatgaattaacaaaagaagaaatagatttgattggtagtcacttagataaagaaatcgaagatttaaaccaacatatcaacaatgaaaaatgtactaaaacaagaaaacaaatacgtctcaaaagaactaaaatcaaaaaatacaaaaagcaaatcaatgattattttgagcgaaagtatcgatacgaatttcaaaaatctattttaaaggatagaaatagttattctaagacagatcatgatgcgacatttatgagaatgaaagaagatcacatgaaaaatggacaacttaagccagggtataatttacaaatagcgacaaattcccaatttgttttatcttataatgtgtatcaaaatccaacggatactagaacgatgattccatttttaaattcaattcaagagacctacggtcatttacctgaatatattgtagctgatgcaggttatggtagtgaatcaaattataaggcaattatagatgactttaatcgaacgccactcataacatatggaatgtttataaaagataaaactaaaaaatataaaagtgacatctttaatactcaaaattggaactatgacgaaattaatgacgaattcatttgtccgaataataaacggctaggttttaaaagatatgcctatcgtcatgataagtatggttataagcgagacttcaaattatatgaatgtgatgattgttcagaatgtcctctgaaaaatcaatgtatgaacttcaattcaaaaacaaacaaaaaaataatgaagaattataactgggaatattttaaatcccaaattaacaaaaagctttcagaaccagaaacaaaaaatatctacagtcaaagaaaaattgatgtggaacctgtttttggatttatgaaggctattttgggtttcactcggatgtctgtccgaggactcaataaagtcaaaagagaacttggttttgtattaatggcacttaatataagaaaagtagtagctcaacgagctgaaaataatcaaaaaatttataaaaaagacaatttctatattatttcaatagaaattgtctttttttcacttatccaagaactttatgtcccggactctttaattatgttcaaagcattaaggtaa

SEQ ID NO: 414210 - DNA, 504 bp, Staphylococcus aureus
gtgctgagtggctttgaatatcgagcgcaaaaagaaaagtatgataacttatataaattcttcaaagaaaatgaaaagaaatatcaatatacaggctttacaaaagaggcaattaacaagacacaaaatgtcggatataaaaatgaatatttttatattacatactcttctagaagtttaaaagaatatcgaaagtattatgaaccactgattcgaaaaaatgataaagaatttaaagaaggaatggaacgagcaagaaaagaagtgaattacgctgcaaatacagatgctgttgctacacttttttctactaagaaaaactttactaaagacaatacagtagatgatgtaatcgaactaagtgacaaattatataatttaaaaaataaaccagataaatctacaatcacaatacaaatagggaaacccactattaatactaagaaagccttttatgatgataatcgtccaatagaatatggggtgcacagtaaagatgaataa

SEQ ID NO: 414211 - DNA, 2163 bp, Staphylococcus aureus
atgaataaaattaatgatagggatttaacagaattaagtagttactgggtttatcaaaatattgatataaaaaaagaatttaaagttaatggaaaaaggtttaaacaagtagacagttataatgatgataagaatagtaatttgaatggtgctgctgatattaaaatatatgagttattagatgataaaagtaaaccaactggtcaacagacaataatttatcaaggaacatctaatgaggcaattaatccaaataatccattaaaatcatcggggtttggagatgattggctccaaaatgctaaattaatgaataatgataatgaaagcacagattatttaaagcaaacagatcaattatcaaatcaatataaaaaaaagttagaagatgcagatagattatcaaatagtgattttttaaaaaaatatagaatggaatcaagtaacttcaaaaacaaaaccattgtggcggatggcggtaattcggaaggcggtgcaggagcaaaatatcaaggagcgaaacatccaaatgaaaaagttgttgctactgacccagcaatggtaccttatgctgcttggcagaaatttgctagaccacgctttgataatatgattagttttaatagtaccaacgatctattaacatggttacaagatccattcatcaaagatatgccgggaaaacgcgttaacattagtgatggtgtgcccaggttagatgctttaatagacagccatgtaggttataaaaggaagttaaatagaaaagataacacatacgatactgtaccactaatcaaaattaagtcggtaaaagatacagaaattaaaaatggaaaaaaagtaaaaaagactattaacataacattagatatggatgggcgaattccaataaatgtttggacaggagattcgattgcacgttctggaagaggaactttaattaaacttaatttagaaaatcttgatgcgttgagtaaactgattactggtgaaactagtggtatgttagcagaatgcgtaatctttttaaatgaaagttttaacatctcagaaaatgaaaataaaaattttgcagatagaaagaaacaattatcagaaggatttaaggataagattaacttatttcaattagaagaaatggaaagaactttaattagtaaaataaactcacttgaagaagttgcagatgaaacaatagaaagtattagtgctgttaaacacttattacctgattttgcattggatgcattaaaagaaagaattaatgagttgtttaaaggtataaaatcttttatagaaaaagtgtatgatagtatagataatgaaattttagaaattttcaaaaatattgatcatgacttcaaggatggagtatctgaagaaatgatgaaacatttgaaagtagtaaaacagaatattcagcaaataaaaaatcaaaatgatatttatggtaggcaaattgcagatattagaagtattatgaagcaacaagatgcaacaattttagatggaaattatcaaattaattatagcggtgaaaatatggtgcagggtctagctttaccttctaattatttaggaagaaaaatgaaaatattaaaagaccatatcgatgatggtattaaaaaaatagcagactatgttcaaggtatatatgatgaatatgcatcgaaaattgtcgatgtaataaaatatttgattaatacaattcccaaaatacgtaagaatttaagacatgcaattgaaatgttaaatgtaaaaaagaaagaatttttgtccctgattcctaatgtaacttgtaattatattaaaactaaattagaagaattagataatactttaggcaaatgggagccttttcttaatgatttaaaagcagtgtcaccaattttagataaccatttagatgatattgttaagaacatgaagcctttgattgtacaaatgatatttgaaccatcacattatgacgatatgtttattttaaacacacaagctcatgcgcgtcttgatcaaatggcacaacagtttgaagttgtttgtaatggcttgaacgaaaatgaaggacaagcaattcaaacgatggatcaatccgcctctctaatacggtcaaacttaattcaagttaaagaacaattagaaaaactagctgtatactaa

SEQ ID NO: 414212 - DNA, 870 bp, Staphylococcus aureus; identical to SEQ ID NO: 408584

SEQ ID NO: 414213 - DNA, 558 bp, Staphylococcus aureus
atgaataatttaacagtagatcaattaaaagaacttttacaaatacaaaaggaattcgacgatagaattgaaactaaaaatccgaaagatacgcacaaagcgtatgtagaagaatttttcgaatggtataacacaatagaaccattcaagaactggaaaaagataaaaggtaaacctattgaagaacaacttgatgaactatcagacatgttggcatttgcactatcctatgtattgatgaatgaaagttacgaagagcctgagatttatttttgtaaaatgccagaattaacaaatcaatatagttttttagccaaattacacaaagttatttcagtgacagaatatcataaacaaaataaacactatgaacgtactggcgatttagaaatcaatcatattttagatttactgatagatgtggaattagtattaccttttcaaatagctgtggagtattactctatcgaccaactcattgacgcatacaaaaagaaaatgaaaaggaaccacgaaagacaagatggaacagcagacgcaggaaaaggatacgtgtaa

SEQ ID NO: 414214 - DNA, 237 bp, Staphylococcus aureus
atgaataaccgcgaacaaatcgaacaatccgttatcagtgctagtgcgtataacggcaatgacacagagggattactaaaagagattgaagacgtgtataagaaagcacaagcgtttgatgaaattcgcgaagctattaatgcgcaatgggttgagtatccagaagactgggcgtcagaggttttgagagaagtaagagagcttgaatatgaggaggaacaggaaaatgagtattag

SEQ ID NO: 414215 - DNA, 258 bp, Staphylococcus aureus
atgagcataatcagtaacagaaaagtagatatgaacgaaatacaagacaatgttaagcaaccagcgcactacacatacggcgacattgaaattatagattttattgaacaagttacggcacagtacccaccacaattagcattcgcaataggtaatgcaatcaaatacttgtcaagagcgccgttaaaaaacggacacgaggatttagcaaaggcgaagttttacgtccaaagagcttttgatttgtgggagggttaa

SEQ ID NO: 414216 - DNA, 243 bp, Staphylococcus aureus
atgacagataacgcacgcaaagaatacctaaatcaattctttggatctaagagatatctgtatcaggataacgaaggagtggcacatatccatgtagtaaacagcacttattactttcacgggcatatcgtaccaggttggcaaggcgttaaaaagatatttgatacagcggaagagcttgaaacatatataaagcaacatggtttggaatacgaggagcagaagcaactaactttattttag

SEQ ID NO: 414217 - DNA, 237 bp, Staphylococcus aureus
atgtttaatattcctaaaatgaagttaccagaaaaatataccgaagtattcaagacgtataaaaatggaacaccagaagaaaaagctgagattgaagattattttatcaaagctgttaatgatgaagacaacggattttatagtcctatgatggctagtctaaatgaacatcaattaaagaatatgttaagacaagtgtctaccttaattgatacaggagatgacaataatggttaa

SEQ ID NO: 414218 - DNA, 171 bp, Staphylococcus aureus
gtgagcattaaagaaatatggagatatttagttaacaagaaatggaaagctgacgatgtatgttatttagtattttacatattcttagcaagcatatttacaactcctttattaggtgttcctataggcgtattagcctatttgtactttaatgaagagctatttaagtag

SEQ ID NO: 414219 - DNA, 327 bp, Staphylococcus aureus; identical to SEQ ID NO: 408680

SEQ ID NO: 414220 - DNA, 1710 bp, Staphylococcus aureus; identical to SEQ ID NO: 410092

SEQ ID NO: 414221 - DNA, 381 bp, Staphylococcus aureus; identical to SEQ ID NO: 408523

SEQ ID NO: 414222 - DNA, 234 bp, Staphylococcus aureus; identical to SEQ ID NO: 413698

SEQ ID NO: 414223 - DNA, 264 bp, Staphylococcus aureus
ttggcgggcgtagatggtaggttacaaacgcggaactatgaaaataaggaaggtcaacgtgtatacgttacggaagttgttgccgatagtattcaatttttagaaccgaagaactcaaatgacactcaacaagatttatatcaacaacaagtacaacaaacacgtggacagtctcaatattcaaataacaaaccagtaaaagataatccgtttgcgaatgcaaatggtccgattgaactaaatgatgatgatttaccattctga

SEQ ID NO: 414224 - DNA, 318 bp, Staphylococcus aureus
atgttcttaaaagattatttccctgagtatagaatgaaaccttatgacgcaaatattgaattattaagaaataatgctaaattagtcgaattagatgacattgtaggtgaaatagctcttgaaggagctttaccttatccgccaggtatattctgtgtagttccaggagaaaaatggagcgaaacagcaaaaacatatttcaaaatactagaagatggcataaatgaatttccaggatttgctccagaaattcaaggtgtttactttgaaaatgttgataatcgaatcaaagcatttggttatgttttagataaataa

SEQ ID NO: 414225 - DNA, 141 bp, Staphylococcus aureus
atgtattatcatcaaccgttgttattaacacctggcccaacccctgtacctgatgccattatgagagaaattcaagcacctatggttggtcatcgttctaaagttttgaagacatcgcacaacaagcatttcaaggtctaa

SEQ ID NO: 414226 - DNA, 753 bp, Staphylococcus aureus; identical to SEQ ID NO: 409547

SEQ ID NO: 414227 - DNA, 861 bp, Staphylococcus aureus
atgaaattcttagaaaaaaataattacttcttcaaactagcttatttccgaaaaaatttcgaaaaaaagaatggcggctatttcatagaatttgcttatttatcagatttagcaactatagatatgaaattaagatacacaatgttgcatttaactttagatattgaacatagtttaaagtgtctagtcttaaaactaataacagaaaataaccaagaagatggttataaaataatagatgagttcttatgtattgataaatcatatagcaattcaaattttgacacaaattcaagaacaccagaagaagttatggaaaccaaaatcaaaaataaaaacgaaatattcaagcatatgaataaacgaggacaactacccgagaagttgaataaatactatcaaaatccacccgcatgggtttgcattgaattcatgcaactaggtcaattcgtttcgtttctcaacttctattacaagaagtacaatgacgaagaattgagagttgctaatattttaatgcctttagttaaaaatataagaaacaaatcagctcataaccaacccatcatagcaaatctaaattatgacagtagatctcctcaatatttatttgaaaaagggaataatataggcatatctagaaacatgttcggaataaaaaatttcatagatactttcgctacgctagaattgcataatcaagtttgtagtaatgcaattatccaagcaagatatcacgatttggaccaacttcaaaagcgatataaaagaaacgaaagctattataaaaatgcattagctatcaaaagattttttatagctttagataaaattattgacttcaacagaccaaaagtataa

SEQ ID NO: 414228 - DNA, 363 bp, Staphylococcus aureus
ttggataatgtagaagacgaaaaacttaaacaaaaaattgaaaattttaaatttcttagtcagtatgcggattttaaagatttaaaaaattatcaagatggaagtataacaactaatgaaaatgtaccgagctatgaagcagaatttaaattgaataatagtgatgaaaatgtaaaaaaacttagaaaagtttatccaattacaacaaaaaaatctccagtattgaaattacatatagatggtgacataaaaggaagttcaattggatacaaaaatatagaatttaatttttcaaaagtaaaagacgaagaaacagctgtaagagattttgtgaattttggaccatctgatggagttagctaa

SEQ ID NO: 414229 - DNA, 411 bp, Staphylococcus aureus
atgaggaattcaaaaagagtagtattgtacataagcattatggtgttgagcatttttataattggttgtaatagttcaagcgagaatgcaaaaaaatcaaaagaagactcaaaggaagaacaaatcaaaaagagctttgcgaaaacgttagatatgtatccaatcaaaaatcttgaagatttatatgacaaagaaggatatcgagatggcgaatttaaaaagggagacaaagggacgtgggttgttagatctgaaatgataattcaaccaaaaggtaaaagtttaacttcaagaggcatgatattatacatgaatagaaatactaggaccacaactggttatttttcaatagaagagatagattcaagaaaaagtcttgatgaaagagaaacagaaaaaagtatcctgtga

SEQ ID NO: 414230 - DNA, 384 bp, Staphylococcus aureus
gtgaaaatgaaaaacaataagattattccaaatgaggagataaaagatgaaaagttgaaaaaggaaattgaaaactttaagttttttgtgcaatatggcagttttaaaggaatagagaattatgaaaatggtgacatttcctacaattctgaagctcctatttattcagcgaaatatcaactgaaaaatgatgattataatgttaaagaattacgaaaaagatatgatattccaacagaaaaggcgcccaaattgttgttgaaaggttcgggggatttgaaagggtcttcagttggatataaggaaattgaatttatattcctagaaaataaaaaagaaaatatatatttttcagatggattaaacttaattccaagtgactaa

SEQ ID NO: 414231 - DNA, 201 bp, Staphylococcus aureus
atgggaagtgcagtgattaaaggatacatcaatgaaaataaagaagatgattttgttgcctattctaccccggaaaatgactttcaatttagtggtgatttaattaaaagtgaaagattaagtgaattactaaaaccagcacatgaaagaaaatcaccagatgatataaaaaaagaactaaataaaaagaagagtcactaa

SEQ ID NO: 414232 - DNA, 360 bp, Staphylococcus aureus
ttgtatcctggtttatcaaaaagtgattttaaaccgaagaataataatgtaagtattcttaaacaagatgaagattttcatgtgataaaagataatgatggcgtatttgctggggttaattatagtgatagtactaaaatttttgatatagacggaactactgttgaattaaaagaaaaaggcatgtttgtaattaaaaagaaagatgataacacatatgaatgtagtttttataatccgacatccacaaattccacttcaaatatagaatcaaaaatttcaatgactggatactctattacaaacaaaaatacatcgacttctaatgaatccggcgcgcgctatgaattaactaaataa

SEQ ID NO: 414233 - DNA, 501 bp, Staphylococcus aureus; identical to SEQ ID NO: 412868

SEQ ID NO: 414234 - DNA, 1062 bp, Staphylococcus aureus
gtgaccgtaaccctattgacactagtatttttaaatagaaagatatcaatgaaaaatagattcttgattatggttacatggaatattgacgaacctggtggtgttattaagctaattaaacacttggctatttatagtttagtcactgaattaattggtatgatttgtttgtgtttatcttttataccaaaatttggtataggcaaaggtttatttttaagcttattcacatcagtatcagcttttaataatgctggatttgccctttttaagaataacttaatagattattctagtgatccaattgtcattattacaatctcaatactcataatatttggaggtattggacattttgtcgtaatagactttattaattgtaaaaaattgagtaaattatctttacattctaaattagtcttaactacaactagtatcctaataattataggagctattacattctttttattagaacagtttaatactatgcaacatatgggactagttgaaaaaatcggaaattcttttttccaatcagtaacaacacgaacagcgggttttaacagtattgatatagcaagcattaacaaatctaccgccttaatgttaatgttacttatgtttattggtggtgcccctctcagtgcagctggaggaattaaaataactacttttgcagtggcgtttatatttgttttaaattatatacgtaaagaaaataatgtttcagtattcaataaagaaatatctgacaaacatataaaactatctattgttaccattaatatctcatttctatttatcagtatcattacttttatattatcgataattaatccgaacatatcattaatcaagttattattcgaagtggtttctgcattcggaacagtcgggttaagtatgaaccttaccacagaatatcatggtattactaaaataattattatattcgttatgctttgcggtaaagtaggactattaactttattaagaacatttataccaccaaaaagtcctaaaaattaccgctacactaaaggacaaatttatctataa

SEQ ID NO: 414235 - DNA, 237 bp, Staphylococcus aureus
atgattaacatacctaaaatgaaattcccgaaaaagtacactgaaataatcaaaaaatataaaaataaagcacctgaagaaaaggctaagattgaagatgattttattaaagaaattaaagataaagacagtgaattttacagtcctacgatggctaatatgaatgaatatgaattaagggctatgttaagaatgatgcctagtttaattgatactggagatgacaatgatgattaa

SEQ ID NO: 414236 - DNA, 771 bp, Staphylococcus aureus
atgataaaacgtgtaaataaattagtgctaggtattagttttctgtttttaatcatcagtatctttgctggttgtggcatgggtaaagaagcggaaattaagaaaagttttgaaaagacaatgagtatgtatccgattaaaaacctagaggatttatatgacaaagagggctatcgagatgatcaatttgataaaaatgataagggaacatggattgtaaattctcaaatggcaattcaaaataaaggagaacctatgaaatcaaaaggcatggttctgtatatgaatagaaatacaagaacaacaaatggctattattatgttaatgtgattaagggcgaggataaaggtaaacatcaagacaatgaaaaaagataccctgttaaaatggtcgacaataaaataatccttactaaagaaattaaagatgaaaacataaaaatagaaatcgaaaactttaagttttttgttcaatatggaaactttaaagatttggaaaattataaagatggagatatatcatataatccagaggtgccaagttattcagctaaatatcaattaactaatgatgattacaatgtaaagcaattacgtaaaagatatgacataccaacaaataaagcaccgaagttgttgttgaagggtacagggaatttaaaaggttcatcagttggatataaagacattgaatttacgtttgtagagaaaaaagaagagaacatttactttagtgatgggttaatttttaaaccaagtgaggataaataa

SEQ ID NO: 414237 - DNA, 216 bp, Staphylococcus aureus; identical to SEQ ID NO: 409932

SEQ ID NO: 414238 - DNA, 582 bp, Staphylococcus aureus
ttggatagtggttttagaaaactaataattacagaattttctgtttctaaaaaaagactatttatttttaacaaattaaatgatgacagaatttacaacgttgaatgttctttcaaagaaaatgatagcagtattgaaaattctatattattaactattttatttaccgaaaaacaagtagagacagctgtttctggtatattcccttttaaatttttgaaaagcggaaaattctattacaaacaaacagctaatggtaaaagtaaagaatatataattttagattttcaatttgtactttatatcttacaaaaagcttataaagagaatgaagagttccaaaaaatgtttgatttccactcgcaaactttttcgataaatttaatcccttataataattcttttattgaattcaaaaaaacaaatgaagaagaatttctaaatgcaaatattattccagcttccgactatttaaaacgattggtttcgtttaacgataatgaattaaaatttttatttaacttttatacagaagaagaaattagtgaagagcttttttataactacaaggcaggtgattaa

SEQ ID NO: 414239 - DNA, 1092 bp, Staphylococcus aureus
atgaaatttttaaaagatacttcaattgctgaaatatcgtctatactttatctgatttttcctattgccggtatattttttaatgaagtatatggtcccaaatggttgtatattatatcagtcattgtcttttcgttgtcgtatcttatattagttatagtaaataatagacttaatacattaatgttttacattttgttgattattcattattttattatttgttattttgttttcagtgtacatccaatgctaagtttgtttttcttttatagtgcttttgccgttccatttacttttaaaaataatgttaaaaaaacggcaactaatcttttcatactaacaatgattatatgtacaataataacgtacttattgtataacaactattttgttgcaatgatggtttattatgtcgttatatcgttaataatgctagataattttaaaaaaatgaaaaaccgtgaatatcaaaaagaaatagcagaaaaaaatagacatattaatacattaattgctgaacaagagcgacatagaattggtcaagacttacatgatacgttagggcatgtgtttgcaagtttatcattaaaatcagaattagcttataaactaatagatactgatgtagaaaaagtaaaagctgaattattagcaattaataaattatctcgtgaatcattgaacaaagttcgagaaattattgatgatgtaaaattaccatcatttattgaagagattgatagtatacgtaaagttttaaaagatgctgatattgattttacatttgaaaataaagaattagcgcaagtattaagtcctactaaacaatctatgttagttatgattacgcgtgaagcgataaataatgttattaaacatgcaaatgcttcaaaagttcatggtaaattaaaaactgtaaacaatcataaattactgcttatgattgaagatgatggcaaaggtatcgatagtgattgtgaggtgaaaagtatttcacagcgtgtacaacatttaaatggaactttagcagtcgactcaacaaatggaactaaaataatcattgaaatctcaacaggaggaatagcatga

SEQ ID NO: 414240 - DNA, 330 bp, Staphylococcus aureus
gtgatctcttctttcgattcacctttactaataatttctccagttaatggattttttagtgttggtgtcgttattgtcttctcacctttttgtccttctcttgttactttttctgtccctggtgctaaatcaggattaaatttacgttctttctcgaatggaatctcttctttttctacaatcgagtctccttttacaggtccatattttgttacactatcgaccggcggtctaactacgtctcctgtttctggattcttaattcctggtttacctggaacttcttctttctctcctgttggtaacttcggatcaaattcgtctcgatga

SEQ ID NO: 414241 - DNA, 390 bp, Staphylococcus aureus
ttgaaagaagcgaatattatcgataaatcagataatgaaaatgtcaaggttacgtataaaatagaaaatggtggagaaaacacagttagtggtactgctagtttagattccttaagtactaatcagaacataaatgctgaaataacaaaaatagaaatagaaaggaaaaacccaaattattcaaatataaataccgatgaagcatggaaaaaattaactaaatctctaaaagaaaaaaatttagttaaaaacggagcaaaagtatctatttatagtaaagatccttctgacataactataactggtaaagttggagattcaaattcaaatgcaataaatagaataattaatcctaaagacataactcatattacagttgaaaacaattaa

SEQ ID NO: 414242 - DNA, 492 bp, Staphylococcus aureus
atgtatgatgagttaaaaaataaatcggaacttagaaaatcaattactcatatcacattaagtattacagtactaactacaattgcagttataattagattgtttacaaaaaatcctccagaatcttgggtaagcgcccttaatattgctggaacaatttcaattgtatattatatgggagtattcaattcaaaatttacatacttaaagtggcttgcgatttctaaaaaatttagttataaaatgtttctattatttatagctatcattttttttgttttcccttttgtgctattgtttgtgcacaatttatctgagtatatatttcacactgaaaatgttttagtaaattatattagtaggattttcataataataattatgaactttatattcattttaatgcacgctatgtcatttaccatgatcatactattgctaatggcagttttatcaagaagaattataaaaaaagataaatcaaatatatag

SEQ ID NO: 414243 - DNA, 219 bp, Staphylococcus aureus
atgatggttttaattaacttaaattcttttaaaaaagctatgtttttgaaaggttataatttatccgatttatctatcgaaacaggtgttggaatttcttatctaagtcaaattatgaatggtaggaaagcgcctagtcctaaattggcaaaaaatattgctaatgtcttagaagttgaaattaaagatttattttactttgaaggaaaggagacataa

SEQ ID NO: 414244 - DNA, 414 bp, Staphylococcus aureus; identical to SEQ ID NO: 410173

SEQ ID NO: 414245 - DNA, 474 bp, Staphylococcus aureus
atgtacaacgagattgcgaataaaattagtagcatgataccagtagaatgggaaaaggtatatacaatggcttatatagatgatggaggaggtgaagtattctttaattatactaaaccaggtagcgatgaattgaattattacacgaatatatctaaagattataatgtttcagaggaaatatttgatgatttatggatgaatctgtattacttgtttaagaatttaaggaatttatttaaagaagaaggtcttgagccatggacatcatgtgaatttgattttacaagagagggtaaattgaaagtatcatttgattatatagattggataaatacagagtttgatcaattgggccgtgaaaattattatatgtacaaaaaatttggggttataccagaaatggaatatgaaatggaagaaattaaagaaatcgaacaatatattaaagagcaagaagaagctgaacaatag

SEQ ID NO: 414246 - DNA, 378 bp, Staphylococcus aureus
ttgtatcgtccaactgaaaatacaacgtttgagcaacgtgctgcaacgagtgcattgaaaaagcgcatgattgacggaggatttacgagaagcacacatgtgccagtattgtttgaagcagctgaagaaggtgatgatattgcaaaacaaatattgaatgagtgggcagaagatgtagcagaagggattgcccaaatacaagtcatgtatgatccagggcttatattaattggtggcggtatatctgaacaaggagacaatctcattaaatatatcgagccgaaagttgcacactatttaccaaaagactatgtttatgcaccaatacaaacgactaagagtaaaaatgatgcagcattatatggctgtttgcaatga

SEQ ID NO: 414247 - DNA, 660 bp, Staphylococcus aureus; identical to SEQ ID NO: 412708

SEQ ID NO: 414248 - DNA, 780 bp, Staphylococcus aureus; identical to SEQ ID NO: 407206

SEQ ID NO: 414249 - DNA, 516 bp, Staphylococcus aureus; identical to SEQ ID NO: 413287

SEQ ID NO: 414250 - DNA, 687 bp, Staphylococcus aureus
atgatgtccaaatcaactaaaaaaagtaatgacacaatcgtagaaacatttaaggatatcatccctttatcatttggagaagaaattggtaatgcggcatctcatggtgttgcagctttgttaacattattagtgttaccctatgcggctgtgcacagttatattgcacatggtacgcttgcgtctgtgagtatgtctatttatgttatttctatctttatgatgtttatttcatctactatttatcattctatgcaaaatgaaacacctcataaatatattttaaggattatcgatcacagtatgatttacgtagcaatttctggtacatatacgcctattttgttaacagttgtaggtggttggataggttggacagtatttattttattatggggaacgacactttgggggattttatataaatccatagctgtcaaagttaaccaaaagttaagcttaattgtctatttagtgatgggctgggtaggtattatcttgttaccaattatttttattcgcacatcatggatattcatattattcattttcttaggtggtgtgtcttatacaattggtgcatggttttatgcacaaaagaatagaccatattttcatatgatttggcatatttttattgtaatagcatcactattgcatttaattgcgatcttatattttatgtag

SEQ ID NO: 414251 - DNA, 2658 bp, Staphylococcus aureus
atgtcaaacactgaatcgctaaacataggaaaaaagcgtggatctttaacaatttacatcggttacagtccaggtgttggtaaaacatttgagatgctttcaaatgccattgaactatttcaaagtaacgttgatattaaaataggatatattgaaccgcatcagcgtgatgaaacaaatgcattagctgaacaattacctaaaatcacaaccaattttactaaacatggtagtcatcattttcaatatttagatgtcgaccgcataatcgaagaatcgccgacaatagtacttatcgatgagttagcacatacgaatatttctagagatcgtcatgagaaacgatatatggatattgaagaaattttaaatcatggtatcgatgttcataccactttgaacattcaacatattgaaagtttaagtagtcaaattgaactgatgaccggtgtacatgttaaagaacgtgtacccgactatttcataatgagcgccgatgtattagaagtcgtagatatctcacctgaacaattaattaaacgcttaaaagctggcaaggtatataaaaaggataggctagatgtagcatttagtaatttctttacgtatgcccacctaagcgaactgcgtacattgacgttaagaacagttgccgacttgatgagtgataaagaaaaagtccgacacaaccataaaacgtcactcaaacctcatattgctgtggcaattagtgggagcatttataatgaagcagtaattaaagaggcattccatattgctcaaaaagaacatgcgaagttcactgctatttatatagatgtattcgaaaaaaacaggcaatataaagatagtcaaaagcaagtgcatcaacatctcatgcttgcaaaatcattaggagcaaaagtaaaagtagtttatagccaaaccgttgcattaggattagacgaatggtgtaaaaatcaagatgtaaccaaattaattatcggacaacatattagaaataagtggcgagactttttcaatacacctttaattgaccatttaatgtcctttgaacatagctataaaatcgaaatcgttccaatcaaacaaatacctgttgaattgaaaatgaacaaatcaccctatcgtcctaaaggcaaacgtttcgccatagatatgttaaaaatgattttgattcaaataatttgtgtaatgatgggactgtggatttatcaacttgataagcatgagtctagtacgattattttaatgatttttctcatcggcatcattttattatccatttggacgcggtccttcatcattggctttttagcagcaattattaacgtatttgtttttaattatttttttacggaacctagatatacatttgaagtatatcgctttgactatcctattacatttatcgttagcattttaacaagtattttaacgagtgctttattaaaacaaattaaattccaatactccattactaaaaagcaactttatcgtacagatttattatttcaatttaatgattcgattaaacaaacttatacagttgaaaacttactaataaatgctggataccaaattaatcaattattgcaacaatcaattactatatacgttatcaatcaatcgaaagtaattaaaacaataccattgcaaaaccatatcgataatacgactcaacagcatgaacaagcattaagctgggtaattaaaaatgaaagacaagctggtgcaacaacagatacatttccaggcattaataaatggttgataccaattggcacatctccgattaaaggcattctagccattgattaccaaagttctcaagtgattaatccatatgatgcatcaatattagaatcaatgttaaatgaactttctctcgccgttgaaaatgtgacgttacttaaacaaacgagagaatccatgttacaggctgaacgtcaactgacacattcaaattttttaagatcaatttcgcatgacatacgtacaccgttaacaacaattatgggaaatttagatattttagtatcacatagtaaagatatgtctatcatagaaaaggaacaattacttgtacatagttttcaagaaagtcagtatttatatctattagtgacaaatattttatcattaacaaaattacagtcatcaaatgttcagataaaattgcaaccttatctcgttagtgaattagtagaagaaatcgatatgattttagaacgtcgccatttaaaaaagcgtataactgtatcatcctccgtaaatttacagtttatacacattgacagtaagttgattttacaagctttattcaatttgattgaaaatgcagttaaacacacttctactgacaccaaaatcaatttatctattcgttatgctagctatgaacaaatcgaatttgccgttatagacgaaggacctggaattagtttagaagaacaacaaaagatattcgagcctttttacacaggatcaaataaatattttaaagataaccaaaaagaaagcatgggactaggcttatatttagtacagactatcctacacaaacatcaatcaaacttacaatataaaccgaaccaaccacacggcagtatattctatttcaatatatatacagactttaacgaaggagacgtataa

SEQ ID NO: 414252 - DNA, 216 bp, Staphylococcus aureus
atgaacgcactatacaaaacaaccctcctcatcacaatggcagttgtgacgtggaaggtttggaagattgaacgaaatacgagaaagcctgtaatcaatcgaaatgcttttagcaaagagtctacagcagaaacgattgagcgacacagtgatcctgattcaggaataaaactacttaaggcgttttccgactttactaaagagaacctttcctaa

SEQ ID NO: 414253 - DNA, 1056 bp, Staphylococcus aureus
atgacgtcacttgtgcaaggtgctaagttaaaaacgttaaatcatgcagatcagctaattgaacattatattgataacgaaaagatacaaaagcttttagcgtttcaaacgttatacataggaattgatccaaaacgaggcccgtcactatattcaattattcctatgattgaaatgatgtttggtgtgcattttattaaaggcggtatgtatggtatggctcaagggctagcgcaattaaataaagacttaggcgttaatattgaactaaatgctgaaattgagcaaattattattgatcctaaattcaaacgggccgatgcgataaaagtgaatggtgacataagaaaatttgataaaattttatgtacggctgatttccctagtgttgcggaatcattaatgccagattttgcacctattaaaaagtatccaccacataaaattgcagacttagattactcttgttcagcatttttaatgtatatcggtatagatattgatgtgacagatcaagtgagacttcataatgttattttttcagatgactttagaggcaatattgaagaaatatttgagggacgtttatcatatgatccttctatttatgtgtatgtaccagcggtcgctgataaatcacttgcgccagaaggcaaaactggtatttatgtgctaatgccgacgccggaacttaaaacaggtagcggaatcgattggtcagatgaagctttgacgcaacaaataaaggaaattatttatcgtaaattagcaacaattgaagtatttgaagatataaaatcgcatattgtttcagaaacaatctttacgccaaatgattttgagcaaacgtatcatgcgaaatttggttcggcattcggtttaatgccaactttagcgcaaagtaattattatcgtccacaaaatgtatcgcgagattataaagatttatattttgcaggtgcaagtacgcacccaggtgcaggcgttcctattgtcttaacaagtgcgaaaataactgtagacgaaatgattaaagatattgagcggggcgtataa

SEQ ID NO: 414254 - DNA, 174 bp, Staphylococcus aureus; identical to SEQ ID NO: 412645

SEQ ID NO: 414255 - DNA, 441 bp, Staphylococcus aureus
atgaagcaagaaatagaagaaataattgccaatgtagttattagaggtcgacatcctaacgaatacgttaaagatatgcgtaagcacctaaataaattcgaaggcacagcacgacaaaagaccgcagcaatcaaatcattgctttatacagaatcagcacgtgttcacgcacaatcaagtattgacagtatgaaagaaatctctccagaaggatattatatgtatattgcaaaaatcgataatagaacaactaaagtatgtaaagggcttaatggagaagtattcaaagttaaagacgctaaaattggtgttaatttctaccctatgcatatcaattgtcgttcagattgcgctttattacctaaatccatgtggccgaaaaaacagaacaagaaacgaaaaacaaaatactttggagggaaagtgaaaagcggtgattga

SEQ ID NO: 414256 - DNA, 489 bp, Staphylococcus aureus; identical to SEQ ID NO: 407196

SEQ ID NO: 414257 - DNA, 921 bp, Staphylococcus aureus; identical to SEQ ID NO: 408168

SEQ ID NO: 414258 - DNA, 396 bp, Staphylococcus aureus
atggaaggtaattttaaaaatgtaaagaagcttatttacgaaggcgaagcatatacaaaagtatatgctggaaatatccaaatatggaaaaagccttcatcttttgtaataaaacccttacctaaaaataaatatccggatagcatagaagaatcaacagcaaaatggacaataaatggagttgaacctaataaaagttatcaggtgacaatagaaaatgtacgtagcggtataatgagggtttcgcaaactaatttagggtcaagtgaattaggaatatcaggagtcaatagcggagttgcaagtaaaaatatcaactttagtaatccttcagggacgttgtatgtcactataagtgatgtttattcaggatctccgacattgaccattgaataa

SEQ ID NO: 414259 - DNA, 834 bp, Staphylococcus aureus
ttggtagatgatgctattacgagaatcttaaaagataacgcgacagatttattgagcaaagactttaaagagaaaatagataaagatgtcatttcttacatcgaaaagaatgaaagtagatttaaaggtgcgaaaggtgataaaggcgaaccgggacaacctggtgcaaaaggtgaagcaggtaaaaaaggagaacaaggcgcacccggtaaaaacggtactgtagtatcaatcaatcctgacactaaaatgtggcaaattgatggtaaagatacagatatcaaagcagaacctgagttattggacaaaatcaatatcgcaaatgttgaagggttagaaaataaattgcaagaagttgaaaaaatcaaagatacaactctcaacgactctaaaacgtatacggattcaaaaattgctgaactagttgatagcgcgcctgaatctatgaatacattaagagaattagcagaagcaatacaaaacaactctatttcagaaagtgtattgcaacagattggctcaaaagttagtacagaagattttgagggattcaagcaatcattaaacagtttgtatgcagataaaaatcatagtcatacaatcaaacagattgaaggattagaaaatgctttatcaaaaaaatcagacataaatcacagtcatgatgaacgttatcttttatcatcaaatgcttttacaaaagaggaagcagataaactttatcaacctatcggttcttcgcagccgtcactgaatatttggacgggcagtgaaacagaatataattatttgtatcaaaaagaccctaatacactttacttaattaaggggtga

SEQ ID NO: 414260 - DNA, 993 bp, Staphylococcus aureus
atgattgattataaatcattaggccttagcgaagaagacctaaaagtaatatataaatggatggatttaggtagaaaaatagatgaaagactgtggttattgaaccgtgcaggtaaaattccatttgttgtaagtggtcaaggacaagaagcaactcagattgggatggcatacgcattagaagaaggtgatattacagcgccttattatagagatctagctttcgttacttatatgggtatctcagcgtatgatacgtttttatcagcgtttggaaagaaagacgatgttaactctggtggaaaacaaatgccatcacactttagtagtagagctaagaatattttgtctcaaagttcaccggtagcaactcaaataccccatgctgttggtgctgctttagctttaaaaatggatggtaagaagaaaattgcaacagcaactgttggtgaaggtagctcaaaccaaggtgacttccatgaaggtttaaacttcgcgggtgtacacaaacttccttttgtatgtgtcattataaataataaatatgcaatttcagtacctgattcattacaatacgcagctgaaaaattatcggatagagcacttggttacggtatacatggtgaacaagtagatggtaatgatccattagcaatgtataaagcgatgaaagaagcaagagatcgagctatttctggtcaaggttcaactttgattgaagcagtaacaagtcgtatgacagctcattcatcagatgatgacgaccaatatcgtacgaaagaagagcgtgaagcgcttaaaaaagctgactgcaatgaaaagttcaaaaaagagttgctttcagctggcattatcgatgatgcttggttggcagaaatagaagcggagcataaagacatcatcaataaagcgacaaaggctgctgaagacgcgccatatccaagtgtcgaagaagcctatgcatttgtgtacgaagaagggagtcttaactaa

SEQ ID NO: 414261 - DNA, 420 bp, Staphylococcus aureus
gtgatagcatttctaattaatccaatcttaccgaataacaattggaatatagctgtaactaattttattggaccttttaatgatgccattgccttacttaatactaaagttcctgttttagcccaaccaaacttagttactaatgtgactaatcttgctgctaatggccccagaaaatccattaccgctaatattggagcaattaaaaatctaaatgcaccaactaaagttataatgacaccaactaattgtgctgtagctggatgcgcctcaaacaagttagctatccaaccagttattgctactgcaacgcgtaatactgcactagctataggagccatcgctgttgcgaatgcaactaatcctcttgcaatgttcccaattaattgcattattagtggtccatttgtttgtatataa

SEQ ID NO: 414262 - DNA, 171 bp, Staphylococcus aureus; identical to SEQ ID NO: 412646

SEQ ID NO: 414263 - DNA, 441 bp, Staphylococcus aureus
atgaaacaagaagtagaagaaataattgctaatgtggttattagaggtcgacatccaaatgaatatgttaaagatatgcgcaagcacctaaacaaattcgaaggcacagcaagacaaaagactgcagcaattaaatcattgctttatacggaatcggcacgtgttcacgcacaatcaagtattgacagcatgaaagaaatttcaccggaaggatattatatgtatattgcaaaaattgatagtagaacaactaaagtatgcaaggggcttaatggagaaatattcaaagttaaagacgctaaaattggtgttaatttctaccctatgcatatcaattgtcgttcagattgtgcattactacctaaatctatgtggccgaaaaaaccaaacaaaaaacgacaaacaaaatactttggaggaaaagtgaaaagcgatgattga

SEQ ID NO: 414264 - DNA, 135 bp, Staphylococcus aureus
atggttgcgagtatgcaaatgcaggtgacgcaagtgaacatgttgacaatgcaattgacgcaacaaaacgctatgttaacacaacagttgaccgaactgaaaactaacaaaacaaatactgagggggacgtttaa

SEQ ID NO: 414265 - DNA, 336 bp, Staphylococcus aureus; identical to SEQ ID NO: 414065

SEQ ID NO: 414266 - DNA, 174 bp, Staphylococcus aureus; identical to SEQ ID NO: 407440

SEQ ID NO: 414267 - DNA, 189 bp, Staphylococcus aureus; identical to SEQ ID NO: 407433

SEQ ID NO: 414268 - DNA, 324 bp, Staphylococcus aureus
atgtatgcaattaataatgtaacttctactcctgtattacgtcctttattaacttacgataaagaagaaattattattaaatcgaaagaaattggtacatttgaaacatctattcaaccatttgaagattgttgtacaattttcacccctaaaaatccagtaaccgaaccaaactttgaaaaggtagtccaatatgaaagtgtctttgattttgaagagatgattaatcgtgctgttgaaaatattgaaacacttgaaataactagtgattataaaactattaaagaacagcaaacaaaccaattaataaatgactttttataa

SEQ ID NO: 414269 - DNA, 147 bp, Staphylococcus aureus; identical to SEQ ID NO: 407426

SEQ ID NO: 414270 - DNA, 171 bp, Staphylococcus aureus
atgtctctattctctttcttccaagaccctgaattagaagttaagaaaatcgaagaagacgagaaagaatctattaaaaaagctcaaaaaaatatgtatcaagaccctagaaacatcaatgacgatgaacaagacgatagcacaaaagattctatcgataaaaaggaatga

SEQ ID NO: 414271 - DNA, 171 bp, Staphylococcus aureus
atgtctctattctcgttcttccaagaccctgaattggaagtcaagaaaatagaagaagatgagaaagaatctattaaaaaagctcaaaaaggtatttataaagaccctagagacatcaatgatgacgaacaagatgatgatacaaaagatactgttgataaaaaggaatga

SEQ ID NO: 414272 - DNA, 147 bp, Staphylococcus aureus; identical to SEQ ID NO: 407426

SEQ ID NO: 414273 - DNA, 885 bp, Staphylococcus aureus
atgacggcatacaaaccttatagacatcaattgagacgatcgttatttgcgtctactatttttccagtatttttagtcattattattggactagtaagcttctatgccatctatatttggattgagcatcgtacgattcatcaacatgttgatgaaagtcagtcatctttacatcacactgaaaagcagattcagacatttattacacagcataataattcgtttcaagagctcgatttaacaaatcatcatgatgttaccgctacaaaacgtgaattattaaaattaatacaccaacagcccgcaacactttattatgaattatctggaccaaatcagtttataaccaataattatgaacatttaaacactaaaaatatgtatttattttcaacgcatcagcttaaattcaataatagtacatatatgcttaaaatttatatggctaacaccccacgtttaagtgaaattaagaaagatagccgacaattcgcacttatcgttgatcaatatgacaatattttatacgccaacgatgaccgttttactataggtgaaaagtatagaccgcaacaattcggatttatgaatgaatctgtaaaattaaaccatgctgaccatcgtctcattatttataaagatatacatgaaaacattgaagatggtatcacgttgttaattgttatggccgtagttcttgttttactagtaatatttggtttcattagcgcagataatatggctaaacgacaaacaaaagatatcgaaacgattattcaaaaaatttactatgccaaaaatcgtcatctaggtacatatacgcctttaaaaaacaacagtgaactagaagaaatcaataattatatttacgatttatttgaataa

SEQ ID NO: 414274 - DNA, 13836 bp, Staphylococcus aureus
gtggtattaatgacgaaagcagctcagaaatatactgaagcagatagagataaacaaactgcatacaatgatgctgtaacagcagctaaaacgttattagataaaacagctggttcaaatgacaataaagtagccgttgaacaagcattacaacgtgtgaatactgctaaaacagcattaaatggtgacgcgcgattaaatgaagcgaagaacacagctaaacaacaattagcgacaatgtcacatttaactaatgctcaaaaagcaaacttaacagaacaaattgaacgtggtacaactgttgctggtgttcaaggcatccaagcaaatgctggtactttaaatcaagcaatgaatcaattaagacaaagtattgcttctaaagatgcgactaaatcaagcgaagattatcaagacgcgaatgcagatttacaaaatgcatacaatgatgcggtaactaatgctgaaggtattattagtgcaacgaataaccctgaaatgaatcctgatacaattaaccaaaaagcgagccaagtgaacagtgcgaagtctgcattgaacggtgatgaaaaattagcagcagcaaaacaaactgcgaaatcagatatcggtcgtttgacagacttgaacaatgcacaacgaactgcggcaaatgctgaagtggatcaagcaccaaatcttgcagctgtcacagcggctaaaaataaagcaacatcgttaaacacagcgatgggtaatttgaaacatgcacttgctgaaaaggataatacgaaacgtagtgtcaattacacagatgcggatcaaccaaaacaacaagcgtatgatactgcagttacacaagcagaagcaattactaatgcaaatggcagtaacgcgaatgaaacacaagttcaagcagcgcttaaccaattgaatcaagctaaaaacgacttgaatggtgataataaagttgctcaagcgaaagaaacagcaaaacgtgcattagcttcatatagtaacttgaataacgcgcaatcaactgcagcaactagtcaaattgacaatgcaacgacagtagcagacgtaactgctgcacaaaatactgctaatgaattaaatacagcaatgggtcaacttcaaaatggtattaatgaccaaaacactgttaaacaacaagtgaactttacagatgctgaccaaggtaagaaagatgcttacacaaatgctgttacgaatgctcaaggtattttagataaagcaaacggtcaaaatatgacaaaagcacaagttgaagctgcattaaatcaagtaacgactgctaagaatgctttaaacggtgatgcaaatgtaagacaagcaaaatcagatgcgaaagcaaacttaggtacattaacacacttaaataatgcacaaaaacaagatttaacatcacaaatcgaaggtgcaacaacagtcaacggtgtaaatagtgttaaaacgaaagcacaagacttagatggtgcaatgcaacgattagagtcagcaatcgcaaataaagatcaaactaaagcgagcgaaaactacattgacgcagatccaactaagaaaacagcatttgataatgccatcacacaagctgaatcttacttaaataaagatcatggtacgaataaagataagcaagctgttgaacaagcaattcaaagtgtaacgtctactgaaaatgctttgaacggtgacgcgaacttacaatgcgctaaaactgaagctacacaagctatcgataacttgacacaattgaatacaccgcaaaaaacagcattgaaacaacaagtgaatgctgcacaacgcgtatcaggtgtaactgatctgaaaaatagtgctacatcacttaataatgcgatggatcaattaaaacaagcaattggtgatcatgacacaattgtagctggtggtaattacactaacgcaagtcctgataaacaaggtgcttacactgatgcatataatgctgcgaagaatatcgtaaatggttcacctaatgtgattacaaatgcagcagatgttactgcggcaacacaacgtgtcaataatgctgaaacaagtttaaatggtgatacaaacttagcaactgcgaagcaacaagctaaagatgcattacgtcaaatgacacatttatctgatgcacaaaaacaaagtattactggtcaaattgatagcgcgacacaagtaactggtgtacaaagtgtgaaagacaatgcaacaaatcttgacaatgcaatgaatcaacttcgaaatagtattgcgaataaagatgaagtaaaagcgagtcaaccatatgttgatgcagatacagataaacaaaatgcatacaatacagcagttacaagtgctgaaaatatcattaatgcaacgagtcagccaacacttgatccatctgcagtaacacaagcagctaatcaagtgaacactaacaaaactgcgcttaatggtgcgcaaaacttagcaaataaaaagcaagaaacaactgctaacatcaaccgattaagtcatttaaacaatgctcaaaagcaagatttaaatacacaagtgacaaatgcaccaaatattagcacagtaaatcaagtgaaaactaaagctgaacaattagatcaagcaatggaacgtttaatcaacggaatccaagacaaagatcaagtgaaacaaagtgttaactttacagatgcagatccagaaaaacaaacagcatacaacaatgcggtaactgctgctgaaaatattattaatcaagcaaatggtacaaatgcgaaccaatcacaagttgaagcagcactttcaactgtaacaactactaaacaagcgttgaatggtgatagaaaagtaacagatgctaaaaacaatgcaaaccaaacattatctacgttagataacttaaacaatgcacaaaaaggtgctgttactggaaacatcaatcaagcgcacactgtagctgaagtaacgcaagccattcaaaccgctcaggaactgaatacagcgatgggtaacttgaaaaatagcttgaatgataaagacactacacttggcagtcaaaactttgcagatgcagatccagagaagaaaaatgcatacaatgaagcggttcgtaatgctgaaaatattttaaataaatctacaggtacgaacgtgcctaaagatcaagttgaagcagctatgaatcaagtgaatactacaaaagcagcgcttaatggtactcaaaaccttgaaaaagcgaaacaacacgcaaatacagcaattgacggtttaagccatttaacaaatgcacaaaaagaggcattaaaacaattggtacaacaatcgactactgttgcagaagcacaaggtaatgaacaaaaagcaaacaatgttgatgcagcaatggacaaattacgtcaaagtattgcagataatgcgacaacaaaacaaaaccaaaattatactgatgcaagtccgaataaaaaggatgcgtacaataatgctgtcacaactgcacaaggtattattgatcaaactacaaacccttcattagatccgactgttatcaatcaagctgctggacaagtaagcacgtctaaaaatgctttaaatggtaatgaaaacttagaggcagcgaagcaacaagcaacgcaatctttaggttcattagacaacttaaataatgcgcaaaaacaagctgttactaatcaaattaatggcgcgcatactgttgatgaagcaaatcaaattaagcaaaatgcgcaaaacttaaatactgcgatgggtaacttgaaacaagcgatagctgataaagatgctacgaaagcaacagttaacttcactgatgcagatcaagcaaaacaacaagcatataacactgcagttacaaatgctgaaaatatcatttcaaaagctaatggtggtaatgcaacacaaactgaagttgaacaagcaatccaacaagtaaatgcagcaaaacaagcattaaatggtaatgccaacgttcaacatgcaaaagacgaagcaacagcattaattaataactctaatgatcttaaccaagcacagaaagatgcattaaaacaacaagtacaaaatgcaactactgtagctggtgtaaacaatgttaaacaaacggcgcaagagttaaacaatgcgatgacacaattaaaacaaggcattgcagataaagaacaaacaaaagctgatggtaactttgtcaatgcagattctgacaagcaaaatgcatataatcaagcagtagcgaaagctgaagcattaattagtggtacgcctgatgttgtcgttacacctagcgaaattactgcagcgttaaataaagttacgcaagctaaaaatgatttaaatggtaatacaaacttagcaacggcgaaacaaaatgttcaacatgctattgatcaattgccaaacttaaaccaagcgcaacgtgatgaatacagcaaacaaatcacgcaagcaacacttgtaccaaacgtcaatgctattcaacaagcggcaacaacgcttaatgacgcgatgacacaattgaaacaaggtattgcgaataaagcacaaattaaaggtagcgagaactatcacgatgctgatactgacaagcaaacagcatatgataatgcagtaacaaaagcagaagaattgttaaaacaaacaacaaatccaacaatggatccaaatacaattcaacaagcattaactaaagtgaatgacacaaatcaagcacttaacggtaatcaaaaattagctgatgccaaacaagatgctaagacaacacttggtacactagatcatttaaatgatgctcaaaaacaagcgctaacaactcaagttgaacaagcaccagatattgcaacagttaataatgttaagcaaaatgctcaaaatctgaataatgctatgactaacttaaacaatgcattacaagataaaactgagacattaaatagcattaactttactgatgcagatcaagctaagaaagatgattatactaatgcggtttcacatgcagaaggtattttatctaaagcaaatggcagcaatgcaagtcaaactgaagtggaacaagcgatgcaacgtgtgaacgaagcgaaacaagcattgaatggtaatgacaatgtacaacgtgcaaaagatgcagcgaaacaagtaattacaaatgcaaatgatttaaatcaagcgcaaaaagatgcattaaaacaacaagtcgatgctgcgcaaactgttgcaaatgtaaacacgattaagcaaacagcacaagatttaaatcaagcaatgacacaattgaaacaaggtattgcagataaagaccaaactaaagcaaatggtaactttgtcaatgctgatactgataagcaaaatgcatataacaatgcggtagcgcatgctgaacaaatcattagtggtacaccaaatgcaaacgtggatccacaacaagtggctcaagcgttacaacaagtgaatcaagctaagggtgatttaaacggtaaccataacttacaagttgctaaagacaatgcaaatacagccattgatcagttaccaaacttaaatcaaccacaaaaaacagcattaaaagaccaagtgtcgcatgcagaacttgttacaggtgttaatgctattaagcaaaatgctgatgcgttaaataatgcaatgggtacgttgaaacaacaaattcaagcgaatagtcaagtaccacaatcagttgactttacacaagcggatcaagacaaacaacaagcttataacaatgcagctaaccaagcgcaacaaatcgcaaatggcacaccaacacctgtattggcgcctgatacagtaacaaaagcagttacaactatgaatcaagcgaaagatgcattaaacggtgatgaaaaattagcgcaagcgaaacaagatgctttagcaaatcttgatacgttacgtgacttaaatcaaccacaacgtgatgcattacgaaaccaaatcaatcaagcacaagctttagctacagttgaacaaactaaacaaaatgcacaaaatgtgaatacagcaatgggtaacttgaaacaaggtattgcaaataaagatactgtgaaagcaagtgagaactaccacgatgctgatgtcgataagcaaacagcatatacaaatgcagtgtctcaagcggaaggtattatcaatcaaacgacaaatccaacgcttaacccagatgacattactcgtgcattaactcaagtgactgatgctaaaaatagcttaaacggtgaagctaaattagccactgaaaagcaaaatgctaaagatgccgtaagtggaatgacgcatttaaacgatgctcaaaaacaagcattaaaaggtcaaatcgatcaatcgcctgaaattgctacagtgaaccaagttaaacaaacagcaacgagcctagatcaagcaatggatcaattatcacaagctattaatgataaagatcaaatattagcggacggtaattacttaaatgcagatcctgacaaacaaaatgcgtataaacaggcagtagcaaaagctgaagcattattgaataaacaaagtggtactaatgaagtacaagcacaagttgaaagcatcactaatgaagtgaacgcagcgaaacaagcattaaatggtaatgacaatttggcaaatgcaaaacaacaagcaaaacaacaattggcgaacttaacacacttaaatgatgcacaaaaacaatcatttgaaagtcaaattacacaagcgccacttgttacagatgtcactacgattaatcaaaaagcacaaacgttagatcatgcgatggaattattaagaaatagtgttgcggataatcaaacgacattagcgtctgaagattatcatgatgcaactgcgcaaagacaaaatgactataacaaagctgtaacagctgctaataatatcattaatcaaactacatcgcctacgatgaatccagatgatgttaatggtgcaacgacacaagtgaataatacgaaagttgcattagatggtgatgaaaaccttgcagcagctaaacaacaagcaaacaacagacttgatcaattagatcatttgaataatgcgcaaaagcaacagttacaatcacaaattacgcaatcatctgatattgctgcagttaatggtcacaaacaaacagcagaatctttaaatactgcgatgggtaacttaattaatgcgattgcagatcatcaagccgttgaacaacgtggtaacttcatcaatgctgatactgataaacaaactgcttataatacagcggtaaatgaagcagcagcaatgattaacaaacaaactggtcaaaatgcgaaccaaacagaagtagaacaagctattactaaagttcaaacaacacttcaagcgttaaatggagatcataatttacaagttgctaaaacaaatgcgacgcaagcaattgatgctttaacaagcttaaatgatcctcaaaaaacagcattaaaagaccaagttacagctgcaactttagtaactgcagttcatcaaattgaacaaaatgcgaatacgcttaaccaagcaatgcatggtttaagacagagcattcaagataacgcagcaactaaagcaaatagcaaatatatcaacgaagatcaaccagagcaacaaaactatgatcaagctgttcaagccgcaaataatattatcaatgaacaaactgcaacattagataataatgcgattaatcaagtagcggcaactgtgaatacaacgaaagcagcattacatggtgatgtgaaattacaaaatgataaagatcatgctaaacaaacggttagccaattagcacatctaaacaatgcacaaaaacatatggaagatacgttaattgatagtgaaacaactagaacagcagttaagcaagatttgactgaagtacaagcattagatcaacttatggatgcattacaacaaagtattgctgacaaagatgcaacacgtgcgagcagtgcatatgtcaatgcagaaccgaataaaaaacaagcctatgatgaagcagttcaaaatgctgagtctatcattgcaggattaaataatccaactatcaataaaggtaatgtatcaagtgcgactcaagcagtaatatcatctaaaaatgcattagatggtgttgaacgattagctcaagataagcaaactgctggaaattctctaaatcatttagatcaattaacaccagctcaacaacaagcgctagaaaatcaaattaataatgcaacaactcgtgataaagtggctgaaatcattgcacaagcgcaagcattaaatgaagcgatgaaagcattaaaagaaagtattaaggatcaaccacaaactgaagcaagtagtaaatttattaacgaggatcaagcgcaaaaagatgcatatacgcaagcagtacaacacgcgaaagatttgattaacaaaacaactgatcctacattagctaaatcaatcattgatcaagcgacacaggcagtgactgatgctaaaaacaatttacatggtgatcaaaaactagctcaagataagcaacgtgcaacagaaacgttaaataacttgtctaacttgaatacaccacaacgtcaagcacttgaaaatcaaatcaataatgcagcaactcgtggtgaagtagcacaaaaattaactgaagcacaagcacttaaccaagcaatggaagctttacgtaatagcattcaagatcaacaacaaacagaatctggtagcaagtttattaatgaagataaaccgcaaaaagatgcttaccaagcagcagttcaaaatgcaaaagatttaattaaccaaacaggtaatccaacgcttgataaagcacaagttgaacaattgacacatgcttttaaacaagctaaagataacctacacggtgatcaaaaacttgcagacgataaacaacatgcggttactgatttaaatcaattaaatggtttgaataatccgcaacgtcaagcacttgaaagccaaataaacaacgcagcaactcgtggcgaagtagcgcaaaaattagctgaagcaaaagcgcttgatcaagcaatgcaagcattacgaaatagtattcaagatcaacaacaaacggaagcgggtagcaagtttatcaatgaagataaaccgcaaaaagatgcttaccaagcagcagttcaaaatgcaaaagatttaattaaccaaacaggtaatccaacactcgacaaatcacaagtagaacaattaacacaagcagtaacaactgcaaaagataatctacatggtgatcaaaaacttgctcgtgatcaacaacaagcagtaacaactgtaaatgcattgccaaacttaaatcatgcacaacaacaaacattaactgatgctataaatgcagcgcctacaagaacagaggttgcacaacatgttcaaactgctactgaacttgatcacgcgatggaaacattgaaaaataaagttgatcaagtgaatacagataaggctcaaccaaattacactgaagcgtcaactgataaaaaagaagcagtagatcaagcgttacaagctgcacaaagcattacagatccaactaatggttcaaatgcgaataaagacgctgtagaacaagcattaactaagcttcaagaaaaagtgaatgagttaaatggtaatgagagagtcgctgaagctaaaacacaagcgaaacaaactattgaccaattaacacatttaaatgctgatcaaattgcaactgctaaacaaaatattgatcaagcgacgaaacttcaaccaatcgctgaattagtagatcaagcaacgcaattgaaccaatcaatggatcaattacaacaagcagttaatgaacatgctaacgttgagcaaactatagattacacacaagcagattcagataagcaaaaggcttataaacaagcgattgctgatgctgaaaatgtattgaaacaaaatgcgaataagcaacaagtggatcaagcacttcaaaatattttaaatgcaaaacaagcattaaatggtgatgaacgtgtagcacttgctaaaacaaatggtaaacatgacatcgaccaattgaatgcattaaacaatgctcaacaagatggatttaaaggtcgcatcgatcaatcaaacgatttaaatcaaatccaacaaattgtagatgaggctaaggcacttaatcgtgcaatggatcaattgtcacaagaaatcactggcaatgaaggacgcacgaaaggtagcacgaactatgtcaatgcagatacacaagtcaaacaagtatatgatgaagcggttgataaagcgaaacaagcacttgataaatcgtctgggcaaaacttaactgcagaacaagttatcaaattaaatgatgcagtcactgcagctaagaaagcattaaatggtgaagaaagacttaataatcgtaaagctgaagcattacaaagattggatcaattaacacatctaaacaatgctcaaagacaattagcaatccaacaaattaataatgctgaaacgctaaataaagcatctcgagcaattaatagagcaactaaattagataatgcaatgggtgcagtacaacaatatattgacgaacagcaccttggtgttatcagcagcacaaattacatcaatgcagatgacaatttgaaagcaaattatgataatgcaattgcgaatgcagcacatgagttagataaagtgcaaggtaatgcaattgcaaaagctgaagcagagcaattgaaacaaaatattatcgatgctcaaaatgcattaaatggagaccaaaaccttgcaaatgccaaagataaagcaaatgcgtttgttaattcgttaaatggattaaatcaacagcaacaagatcttgcacataaagcaattaacaatgccgatactgtatcagatgtaacagatattgttaataatcaaattgacttaaatgatgcaatggaaacattgaaacatttagttgacaatgaaattccaaatgcagagcaaactgtcaattaccaaaacgctgacgataatgctaaaacaaacttcgatgatgccaaacgtctagcaaatacattgctaaatagtgataacacaaatgtgaatgatatcaatggcgcaatccaagcagtcaatgatgcaatccataatcttaatggtgatcaacgactacaagatgctaaagacaaggcaattcaatcaattaatcaagctttagctaataagctaaaagaaatcgaagcttcaaatgcgacggatcaagacaagcttattgcgaaaaataaagcagaagaattggcaaacagcatcatcaacaacattaataaagcaacaagtaatcaggctgtatctcaagttcaaacagcaggcaaccacgcgattgaacaagtgcatgctaatgaaataccaaaagcaaaaattgatgccaataaagacgttgataagcaagttcaagcattaattgacgaaattgatcgaaatccaaatctaacagataaggaaaaacaagcacttaaagatcgtattaatcaaatacttcaacaaggtcataacgacattaacaatgcgctgactaaagaagaaattgaacaagctaaagcacaacttgcgcaagcattacaagacatcaaagatttagtgaaagctaaagaagatgcgaaacaagatgttgataaacaagttcaagcattaattgacgaaatcgatcaaaatccaaatctaacagataaggaaaaacaagcgcttaaagatcgaatcaatcaaatactgcaacaaggtcataacgacattaacaatgcgatgactaaagaagaaattgaacaagccaaagcacaacttgcacaagcattacaagacatcaaagatttagtgaaagctaaagaagatgcgaaaaatgcaataaaagccttagctaatgcgaagcgtgatcaaatcaattcaaatccagatttaacacctgagcaaaaagcaaaagcgctcaaagaaattgacgaagctgaaaaacgagcactacaaaacgttgagaatgctcaaactatagatcaattaaatcgaggattaaacttaggtttagatgacattagaaatacacatgtatgggaggttgatgaacaacctgctgtaaatgaaatttttgaagcaacacctgagcaaatcctagttaatggtgaactcattgtacatcgtgatgacatcattacagaacaagatattcttgcacacataaacttaattgatcagctttcagcagaagttattgatacaccatcaactgcaacgatttctgatagcttaacagcaaaagttgaagttacattgcttgatggatcaaaagtgattgttaatgttcctgtaaaagttgtagaaaaagaattgtcagtagtcaaacaacaggcaattgaatcaatcgaaaatgcggcacaacaaaagattgatgaaatcaataatagtgtgacattaacactggaacaaaaagaagctgcaattgcagaagttaataagcttaaacaacaagcaattgatcatgttaacaatgcacctgatgttcattcagttgaagaaattcaacaacaagaacaagcgtatattgaacaatttaatccagaacaatttacgattgaacaagcaaaatcaaatgcaattaaatcgattgaagatgcaattcaacatatgattgatgaaatcaaagctcgtactgatctaacagataaagagaagcaagaagctattgctaagttaaatcaattaaaagaacaagcaattcaagcgattcaacgtgcgcaaagcatcagtgaaataactgagcaattggaacaatttaaagctcaaatgaaagcagctaatccaacagcaaaagaactagctaaacgcaagcaagaagctattagtagaattaaagacttttcaaatgaaaaaataaatagtattcgaaatagtgaaattggcacagctgatgaaaaacaagcagcaatgaatcaaattaacgaaattgtgcttgaaacaattagagatattaataatgcgcatacattacagcaagttgaggctgcattgaacaatggtattgctcgaatttcagcagtacaaattgtaatatctgatcgtgctaaacaatcgtcaagtactggaaatgaatctaatagccatttaacaattggttatggaactgcaaatcatccatttaacagttcgactattggacataaaaagaaacttgatgaagatgatgacattgatccacttcatatgcgtcactttagtaataatttcggtaatgttattaaaaacgctattggtgtggtgggtatctctggcttactagctagtttctggttcttcattgccaaacgtcgtcgtaaagaagatgaagaggaagaattagaaataagagataataataaagattcaataaaagagactttagacgatacaaaacatttaccacttttatttgcgaaacgtcgcagaaaagaagatgaagaagatgttactgttgaagaaaaagattcgctaaataatggcgagtcactcgataaagttaaacatacgccgttcttcttaccaaaacgtcgtcgtaaagaagatgaagaagatgtggaagttacaaatgaaaacacagatgaaaaagtgttgaaagataacgaacattcaccactcttattcgcaaaacgacgcaaagataaagaggaagatgttgaaacaacaactagtattgaatctaaagatgaggacgttcctttattattggctaaaaagaaaaatcaaaaagataaccaatccaaagacaaaaagtcagcatcaaaaaatacttctaaaaaggtagcagctaaaaagaagaaaaagaaatctaagaaaaataaaaaataa

SEQ ID NO: 414275 - DNA, 444 bp, Staphylococcus aureus
gtgacactaagttctgaaaatccaccagcgtcagtttttgaacacgcaattggaccaattggaaagaatatttttggtattgtgttatttgctgcagctatgtcatcagtaattggctcagcatacacaagcgcaacatttttaaaaacacttcataaatcacttaacgaaagaagtaatttaattgtgattgtgtttatcgttatttcaacaatgattttcttatttattggaaaaccaatcagccttttaattatagcaggcgcgataaatggatggattttacctattacgttaggtgcaattttgattgcaagtaaaaagaaatcaattgttggtgattataaacacccaaattggatgttcatctttggtatcgttgcagtacttgttacaatattgacaggtatattctcattcaaagaagtacttcagttattttaa

SEQ ID NO: 414276 - DNA, 816 bp, Staphylococcus aureus
atgagagaaaattttaaattacgtaaaatgaaagtcggtttagtatcagttgcaattactatgttatatatcatgacaaacggacaagctgaagcatctgaaactaatcagaaggtaagtacaaatcaagaatcaaaagctgtttcgcagactgaacaaaattccaaagaaacaaaagcggcagagtcttctaaaaactttgtaaatttagatcctatcaaaccaggagctcaaaaagtaacaggtactacattaccgaatcatattattttacttaatatagatggtaaaagtgctgattcagttgaaggaggatatggtgattttataactgcaaatgacaaaggagagtttgagtatcctttaaataatcgtaaaattgtccataaccaagaaattgaggtatcatcatcaagccctgatttaggtgacgatgaagaggatgaagaagtagaagaatcttcaactgaaaaagctggtgctgaggaagaaagtacagatgctaaagctacatatacaacaccacgatatgaaaaagcgtatgaaataccgaaagaacaactaaaagaaaaagatggacaccaccaagttttcatcgaaccaattactgaaggttcaggtattattaaaggtcatacgtctgtaaaaggtaaagttgctctatctattaataataaatttattaattttgaagaaagagctaaaggtggaattagtaaagaagatactaaagctagttccgatggtgtttggatgcctattaatgaaaaaggatattttgattttgatttcaaaaaaatccttttgataacttag

SEQ ID NO: 414277 - DNA, 219 bp, Staphylococcus aureus
atgaccaaaagtattgaaagtaaaaatagtaggattaatattaattttaaacaagatataattaatggtaaacatctgacaactggttttcgttcttttaataaagaacacgaaaagaataaccacattattatagaaaagttacacactagatatgtactaaaagaaataccaccttcttgtatgacatatctaaataagttcacagcaaattcatga

SEQ ID NO: 414278 - DNA, 201 bp, Staphylococcus aureus
ttgtggagtattacaacagagcattattcattaagtgcccatgttgtgttagataaaaaatatgagggtgatgattatcaagcgattgatcaagtatcatcattgttgaaagaaaaatatggcattgcacattcaacgttgcaaattgaaaacttgcaattgaatccattagatgagccatacttcgacaaattaacataa

SEQ ID NO: 414279 - DNA, 1179 bp, Staphylococcus aureus
atgacaagaccatttaatcgtgtacatttaatcgtaatggattcagtaggtattggtgaagcgccagacgcagctgattttaaagatgaaggttcacatactttaagacataccttagaaggtttcgatcaaactttaccaaaccttgaaaagttaggtctagggaacatcgataaattaccagtagtaaatgcagttgaacaaccagaagcatactatactaaattgagtgaagcttcagttggtaaagatacaatgactggtcactgggaaattatgggattaaatattatgcaaccttttaaagtataccctaatggattccctgaagagttaattcaacaaattgaagaaatgacaggtcgtaaagttgttgctaacaaaccggcatcgggtacgcaaattatcgatgagtggggcgagcaccaaatgaaaactggtgacttaattgtttatacaagtgcagacccagtattgcaaattgctgcacatgaagacattatcccattagaagagttatatgatatttgtgaaaaggttcgtgagttgacaaaagaccctaaatatttaattggtcgtattatcgcacgtccatatgttggtgaaccaggaaactttacacgtacatctaatcgacatgactatgcgttaaaaccatttggtaaaactgtcttagatcatttgaaagacggtggttatgatgttattgccatcggtaaaattaatgacatttatgatggtgaaggtgtaacagaagcggttcgtacgaagagtaacatggacggtatggatcaattgatgaaaattgttaagaaagatttcacaggtattagcttcttaaacttagtagactttgatgcattatacggtcatcgtcgtgataaaccaggttatgcacaagcaattaaagatttcgatgatcgcttgccagaactgtttagcaacttaaaagaagacgatttagtaattattacagcagaccatggtaatgacccgacagcgccaggtacggaccatacgagagaatatatcccagtaattatgtacagtccgaaatttaaaggtggtcatgcactagaaagtgatactacattcagttctatcggtgcaactatagcagataatttcaacgtaacattaccagagttcggtaaaagttatttaaaggaattgaaatag

SEQ ID NO: 414280 - DNA, 816 bp, Staphylococcus aureus
atgacacaggaaatagcaaaatataaagttcacacaaaagcacacaaacgaaaattgattaaaagatggcttattgcaattgtcgtcttagctattatcatctgggcatttgcaggtgtaccaagtttagaacttaaaagtaaatcattagaaatcttaaaatccatattcagcggattattccatcctgacatcagctatatctatataccagatggcgaagacttattacgtggtttacttgaaacctttgcgatagccgttgtaggtactttcatcgccgcaattatctgtattccattagcatttttaggtgcaaataatatggtaaagttacgcccggtttcaggtgttagcaaatttattttaagtgttatacgtgtcttcccagaaattgtaatggcacttatatttatcaaagctgttggcccaggttcattttcaggtgtattagctttaggtatccattctgtaggtatgcttgggaaacttttagctgaagatattgaaggtctagatttcagtgctgtagaatcattaaaggccagtggtgcgaataagattaaaacactcgtatttgcagtcataccacaaattatgcctgcctttctatcactcatactttatcgctttgaactaaacttacgttcagcttctatactggggctaattggggctggtggtatcgggacaccactcatatttgccattcaaacacgttcttgggaccgtgtaggtattatattaatcggtttagtactaatggtcgcaattgtcgatttaatttccggttcaatccgaaaacgtattgtttaa

SEQ ID NO: 414281 - DNA, 801 bp, Staphylococcus aureus
atgcctttagaaatacctacaaagtatgactcccttttaaagaaaaaggtttctttaaaaacgagttttaccttcatgttaatcattgtgcttatcatttggagcttcatttatacggggtttaattttggagatttaatgataggaatacctcaaataggtgatctattcaaacaaatgattccacctgatttcgagtatttacaacaaattacaacgccaatgttagataccattcgaatggctatcgtaagtacagtattaggtagcatcgtttcaataccaattgcgttattatgtgctagcaatatcgttcatcaaaagtggatttcaataccctcgcgctttattttaaatatagttcgtactattccagatttgttattagcagcaatctttgtggctgtatttggaatcggtcaaattccagggatattagcattgtttattttaactatctgtattattggaaaattattatatgaatcattggaaacgatagatccaggtccaatggaagcaatgacggctgttggcgctaataaaataaaatggattgttttcggtgttgtaccacaagccatatcgtcatttatgtcatacgtattatatgcatttgaagtaaatatacgagcttcagctgtgcttggattagtcggcgctggcggtattggattgttttatgatcaaacacttggtttatttcaatatccaaaaacagcaacgattattttatttactttagttatcgtcgtcgtcattgattacatcagtacgaaagtgagggcacatctcgcatga

SEQ ID NO: 414282 - DNA, 774 bp, Staphylococcus aureus
atgagtcaaatcgaatttaaaaacgtcagtaaagtctatcctaacggtcatgtaggcttgaaaaatattaacttaaatattgaaaaaggtgaatttgcagttattgtcggactatctggtgctgggaaatccacgttattaagatctgtaaatcgtttgcatgatatcacgtcaggtgaaattttcatccaaggcaaatccatcactaaagcccatggtaaagcattattagaaatgcgccgaaatataggtatgattttccaacattttaatttagttaaacggtcaagtgtattacgaaatgtactaagtggacgtgtaggttatcaccctacttggaaaatggtattaggtttattcccaaaagaagacaaaattaaagcaatggatgcactagaacgcgtcaatatcttagataaatataatcaacgctctgatgaattatcaggtggccaacaacaacgtatatctattgcacgtgcgctatgccaagaatccgaaattattcttgcagatgaaccagttgcttcattagacccattaacaacgaaacaggttatggatgatttaagaaaaatcaaccaagaattaggcatcacaattttaattaatttacattttgttgacttggcaaaagaatatggcacacgcatcattggtttacgtgatggtgaagttgtctatgatggtcctgcatctgaagcaacagatgacgtatttagtgaaatatatggacgtacaattaaagaagatgaaaagctaggagtgaactaa

SEQ ID NO: 414283 - DNA, 957 bp, Staphylococcus aureus
atgaaaaattttaagtatttatttgtattaatgttagcagtcattgtttttgcagcagcatgtggaaactcaagttctttagataatcaaaagaacgctagtaatgattcggattctaaatcaggaggatacaaacctaaagaattaacagtacaatttgtaccttcgcaaaatgctggaacattagaggctaaagcaaaaccattagaaaaattactatctaaagaattaggaattccagttaaagtgtctgtatcaactaactacaatacaattgttgaagctatgaagtctaaaaaagttgatgttggtttcttaccaccaacggcatacacattagcacatgatcaaaaagcagctgatttattattacaagcacaacgttttggtgtaaaagaagatggttcagcaagtaaagaacttgtagatagttataaatcagaaattcttgttaaaaaagactcaaaaattaaaagcttgaaagatttaaaaggtaagaaaattgccttacaagatgtaacatcaactgctggatatacattcccacttgcgatgttaaaaaacgaagcaggtattaatgcaactaaagatatgaaaattgtgaatgttaaaggtcatgaccaagcagttatctcattattaaatggagatgtagatgctgcggctgtatttaacgatgcacgtaatactgtgaaaaaagaccaaccaaatgtatttaaagacacacgaattttaaaattaacacaagctattccgaatgacacaatttctgtaagaccagatatggataaagatttccaagaaaaattgaaaaaagcttttatagacattgctaaatcaaaagaaggtcacaaaattattagcgaagtttattcacatgaaggatacacagaaacgaaagattcaaatttcgacattgtaagagagtacgaaaaattagttaaagatatgaaataa

SEQ ID NO: 414284 - DNA, 402 bp, Staphylococcus aureus; identical to SEQ ID NO: 408187

SEQ ID NO: 414285 - DNA, 960 bp, Staphylococcus aureus; identical to SEQ ID NO: 409297

SEQ ID NO: 414286 - DNA, 363 bp, Staphylococcus aureus
atggactggatatttttttatactaacattgttatattcattgcatgtgtatatacaatgtatagacgaattgaagtgagtaagaaaattggtgaattaagacgtgatataaaagagaacgaaaaagcattggataattataaaaaagaaaacagaccaatcgaatatatcgtcgagttaaatgacggtgtgtactttcgaaaaaaacatacagatgcgtttgcgcaaaggaccacatatattataactaataatattttcgaagctaaatcatatgacaatttattatcagctaaaatagatgccgaaattctaaatggccgtgtattaaaatataaaccaaatttagaggaggttgggtag

SEQ ID NO: 414287 - DNA, 696 bp, Staphylococcus aureus
atgccgaaaattactagttatatcactcaagacgacggcacaacaacagttgtcatctcgggtgttgaattaggcaataaagaaacattactacttgataacggatttgatgtggaagtcgatgtaagcgtcatagatccgtttcaaattaccggcaagcaacgacgaaaaatattcgcgcttgtcaaagacatagaagaatatacaggtcaaccaatggactatatgcgacatatgttcatcgagtatgtaaggacttactacggctatgatgaacgtatttcactaagtaattgtacgagaacacaagcaagtcaaatcattgaagcaacgcttgactggacgttctacaatgacataccacttagctacaaaacaagcgacttgctgaaacgagataaatcattcttatactggtcaactgttaaccgcaactgtgtaatatgcggaaagcctcacgctgacttagcacattatgaagcagtcggcagaggcatgaacagaaacaaaatgaaccactatgacaaacatgtattagcgttatgtcgcgaacatcacaacgagcaacatgcgattggcgttaagtcgtttgatgataaataccacttgcatgactcgtggataaaagttgatgagaggctcaataaaatgctgaaaggagaaaacaatgggagaagtatcatggataaaacttaa

SEQ ID NO: 414288 - DNA, 591 bp, Staphylococcus aureus
atggataatataaatctcactcaacgacaattagatttaataaagaaaaatcaagccatcttgtctaagttgcctattgaaacttacgctaaagtcgtaaatactatgaatgatcttagaatcaaccaatcgaaattatctgattgggcttcctatatgcatcgagtaactaagaatcatccaatgttcaaaactaatttattttctgaaaaaattcttgatgaattcataagttctaacagctttccggaggatgaagtccgcaaagttagcactcatttgagaaattcttttgtcgatactgtcgatgtccctgttcttggtaaaaccgtcgattctgcccatccaatagatgacgtaaatactaagaaatacaatagtgtattcaatgaatcgctcaatcatatttttatttctccttctgcaaaatttataaaaaaggtttctgtcggttctgctatcggagtaacatctccggttatggttagaacgatacttgaccaatatgtgaactactttatgttttttaatgtaatagcaactcttttaacactttacgtaattgctaattacttagatgacgagaactga

SEQ ID NO: 414289 - DNA, 144 bp, Staphylococcus aureus; identical to SEQ ID NO: 408815

SEQ ID NO: 414290 - DNA, 195 bp, Staphylococcus aureus
atgcaagctcaaaacaaaaaagtcatctattactactatgacgaagaaggtaatagacgactattatcaattggtaatttagatacctatttattagcagatatcaaatcaagatttggtttatataaaaaggcaatccctgatttagataatctatacattcaaatagatggtatcgaatttaaattatattaa

SEQ ID NO: 414291 - DNA, 396 bp, Staphylococcus aureus; identical to SEQ ID NO: 413143

SEQ ID NO: 414292 - DNA, 777 bp, Staphylococcus aureus
gtgaagactatcgaagaaagaatgaacgaatatttcaactggttaaaacaaaattatatcttcaaagaattagatagttctacagaaattactactcccttaaagaaccattggaatgattttattagaatatatgctgatacactacctaataatgaaatttgtctatcagatgacggattgacgattaatgaattagaaatgttgggtattgatataaacacaaaaacgagaactaaacttatacagaatattttaaatcaatttaatttaaaattagttgataaagaaattacagcggatgttaaaaatgagagttttgctcagtctaaacataatttaattcaaggcatattgaaaatttatgaccttactttaactactaaatctaacgttacaaacatattctatgaagaagtatttgaattcttatatgaccaagaaataagaggtttagcacaagtttctgtttctggacaatcaggtttaaaatattctattgattatattgtttctgaaacaaaatcacaaccagaaaaactagttaactttacaaacaacttagatttcaacaaaataactaatgaagcttatatttaccgtgatatcaaaccaaacagaccatccagaaacaaattagaacctatcatgttgagaattgtaaatgatgtagatcatccgataaatgaaagagcacaaactgtagcagaacatgaaaaccttgagatattaaaatggtctaataaatcaaaaatcattgaaactttaacctcataa

SEQ ID NO: 414293 - DNA, 558 bp, Staphylococcus aureus
atgaacaagattacttatttaaatgaattagaaacagcacttgatgcgctacctaggcatttaagagatcaaaaaatgtatgaatatgaacgttatttttatgagcaagaacttaatggcgttgatgaaggggaaattttaaagaagttaaaagacccacaagatgttgcagctgaaacaaaagctagaagtgttattgattatgctgaatctaaaccaacatttgaaaatatttcaagagctgttgctgcttcattaagtttaggcattctatctatttttgtcatccttataccagtatctatagttggattatttgtattagcattatttttaatatcacttttgctgctgttttgtccaattattttattagcatcagcaatatccagaggaattgtggactcaattagtaatgtattttttgccatatcatattcaggattaggattagtatttatcattgtcatatttaagattttagaatacatttatcgtttaatcttaaaatatttactttggtatattaaaactgtcaaaggaagcgttagaaaatga

SEQ ID NO: 414294 - DNA, 492 bp, Staphylococcus aureus
atgactttcgaagaaaaacaaagtgaaatgtacaataaaattgcaaatgagattagtggaatgataccggttgagtgggaaaaggtatatacaattgcttatgtagataatcaaggtggagaggtcatttttaattatactaaacctggaagtgaagaattgaattattattcagatattcctaaagatttcaatgtctcaaatgatatttttatggatttatggatgaaagtttatcggatgtttgatgagttaagagaaacttttaaaaaagaaaggtttgaaccatggacatcatgtgaatttgattttacaagagatggtaatttgaatgtatcttttgattatatagattggttaaatacagaatttgatcaattgagtcttgaaaattattatatgtacaaaaaatttggggttataccagaaatggaatatgaaatggaggaggttaaacaaatcgagcaatatattaaagagcaagaagaataa

SEQ ID NO: 414295 - DNA, 915 bp, Staphylococcus aureus; identical to SEQ ID NO: 411026

SEQ ID NO: 414296 - DNA, 324 bp, Staphylococcus aureus
atgccttatatttatttaataatagccataagtactgaagttattggaagtgcatttcttaaatcttcagaaggcttttcaaaatttataccatccttaggaacaataatttcatttggaatttgtttctattttttaagtaaaacaatgcaacacctaccactaaatataacttatgcaacttgggcgggactaggtttagtcttaacaaccgtagtctcaataattattttcaaagaacaaataaatctaataactatagtatctatagttttaatcatagacggcgtagttttgttaaacattttcggaacatcgcattaa

SEQ ID NO: 414297 - DNA, 393 bp, Staphylococcus aureus
ttggaaaacactaataatctattcgaaagattagaaatattaacaaaaccagaaaatatagaaactacattttttattatccttaaattcattatttttatcatcattctaatgataggagcgttaatagttttaggaatattgaatagcagaagaaattacaaccctgaaaaaatttggaacaaaagaaaaattcgcgctcttaaatcagaaattggcggaggacaggaatactattttagatactggatctggcaaagaaataaaagaaaaaatattctaatcgctttaagagattactctccatatgaagaatattatccaagtcaaaaatggctaaaaaaagataaatctaaattaccattccgaagagaaatatgggttataaaataa

SEQ ID NO: 414298 - DNA, 393 bp, Staphylococcus aureus; identical to SEQ ID NO: 410215

SEQ ID NO: 414299 - DNA, 324 bp, Staphylococcus aureus; identical to SEQ ID NO: 410216

SEQ ID NO: 414300 - DNA, 324 bp, Staphylococcus aureus; identical to SEQ ID NO: 410216

SEQ ID NO: 414301 - DNA, 324 bp, Staphylococcus aureus; identical to SEQ ID NO: 410216

SEQ ID NO: 414302 - DNA, 324 bp, Staphylococcus aureus; identical to SEQ ID NO: 410216

SEQ ID NO: 414303 - DNA, 687 bp, Staphylococcus aureus
atgatgcaatatattaagcaaaaggaagataaacaattcatctttttaacacttacgacgccaaatgtaacagttgagcatttggaagatgaaataaaacattataatgagtcgtttagacgattaagtaatcgtaaacactttaaatctatagctaaaggttacgtaagaaaattagaaatcacttataacaaaaaacgcgatgattataatccacattttcatgtattaattgcggttaataaatcatattttacagataagcgatattatataagccaaaaagaatggcttgaactatggcgtgatgtgacaggtaatcaagctattacacaagttcatgttcaaaaggttaagcaaaacaataataaagaactttatgaaatggctaaatattccggtaaagatagcgattatctcgttaatcaaaaagtattcgacgcattttataaagcattaaaaggcaaacaggtacttgtctattctggattgtttaaagatgcacgcaaaaagctaaaaaatggcgagttggattatctcaaagaaagtgatccgacagaatatatttaccaaatcttttatgtgtggaatcaaaaagagtatctagcaagtgagatttacgacttaaccgaagaagaaaaacgagaagtaaacaaccaaatgattaacgaaattgaagaagagtaa

SEQ ID NO: 414304 - DNA, 438 bp, Staphylococcus aureus
atgtgtataagagacagatattatataagccaaaaagaatggcttgaactatggcgtgatgtgacaggtaatcaagctattacacaagttcatgttcaaaaggttaagcaaaacaataataaagaactttatgaaatggctaaatattccggtaaagatagcgattatctcgttaatcaaaaagtattcgacgcattttataaagcattaaaaggcaaacaggtacttgtctattctggattgtttaaagatgcacgcaaaaagctaaaaaatggcgagttggattatctcaaagaaagtgatccgacagaatatatttaccaaatcttttatgtgtggaatcaaaaagagtatctagcaagtgagatttacgacttaaccgaagaagaaaaacgagaagtaaacaaccaaatgattaacgaaattgaagaagagtaa

SEQ ID NO: 414305 - DNA, 525 bp, Staphylococcus aureus; identical to SEQ ID NO: 406840

SEQ ID NO: 414306 - DNA, 189 bp, Staphylococcus aureus; identical to SEQ ID NO: 407427

SEQ ID NO: 414307 - DNA, 156 bp, Staphylococcus aureus
atgatgattaaacaaatattaagactaatattcttactagcaatgtatgagctaggtaagtatgtaacggagcaagtatatattatgatgacggctaatgatgatgtagaggtgccgagtgattttgaaaaaatcagagctgaagtttcatggtaa

SEQ ID NO: 414308 - DNA, 537 bp, Staphylococcus aureus; identical to SEQ ID NO: 410845

SEQ ID NO: 414309 - DNA, 954 bp, Staphylococcus aureus
ttgcacaatgaagatttaattcatgacagagatattcgaattggtgatagtgttgtagtgaaaaaagcaggtgacatcatacctgaagttgtacgtagtattccagaacgtagacctgaggatgctgtcacatatcatatgccaacccattgtccaagttgtggacatgaattagtacgtattgaaggcgaagtagcacttcgttgcattaatccaaaatgccaagcacaacttgttgaaggattgattcactttgtatcaagacaagccatgaatattgatggtttaggcactaaaattattcaacagctttatcaaagcgaattaattaaagatgttgctgatattttctatttaacagaagaagatttattacctttagacagaatggggcagaaaaaagttgataatttattagctgccattcaacaagcaaaggacaactctttagaaaatttattattcggtctaggtattaggcatttaggtgttaaagcgagccaagtgttagcagaaaaatatgaaacgatagatcgattactaacagtaactgaagcggaattagtagaaattcatgatataggtgataaagtagcacaatctgtagttacttatttagaaaatgaagatattcgtgctttaattcaaaaattaaaagataaacatgttaatatgatttataaaggtatcaaaacatcagatattgaaggacatcctgaatttagtggtaaaacgatagtactgactggtaagctacatcaaatgacacgcaatgaagcatctaaatggcttgcatcacaaggtgctaaagttacaagtagcgttactaaaaatacagatgtcgttattgctggtgaagatgcaggttcaaaattaacaaaagcacaaagtttaggtattgaaatttggacagagcaacaatttgtagataagcaaaatgaattaaatagttag

SEQ ID NO: 414310 - DNA, 1200 bp, Staphylococcus aureus
atgaagcgtacattagtattattgattacagctatctttatactcgctgcttgtggtaaccataaggatgaccaggctggaaaagataatcaaaaacataacaatagttcaaatcaagtaaaagaaattgctacggataaaaatgtacaaggtgataactatcgtacattgttaccatttaaagaaagccaggcaagaggacttttacaagataacatggcaaatagttataatggcggcgactttgaagatggtttattgaacttaagtaaagaagtgtttccaacagacaaatatttgtatcaagatggtcaatttttggacaagaaaacaattaatgcctatttaaatcctaagtatacaaaacgtgaaatcgataaaatgtctgaaaaagataaaaaagacaagaaagcgaatgaaaatttaggacttaatccatcacacgaaggtgaaacagatcctgaaaagattgcagaaaaatcaccagcctatttatctaacattttagagcaagatttttatggtggtggagatacaaaaggtaagaatattaaaggtatgacgattggtttagctatgaatagtgtttattactataaaaaagaaaaagatggaccgacttttagtaaaaaactagatgatagcgaagttaaaaagcaaggtaaacaaatggctagtgagatattatcaaggttacgtgaaaatgatgatttaaaagatataccaattcattttgcaatttataagcaatcaagtgaagattcaatcacaccaggtgaatttatcactcaagcgactgcagaaaagagtcaaacaaagcttaatgaatggcataatatcaatgaaaaatcagctttattaccttcttcaacagcagcagattatgatgaaaatttaaataataatttcaagcaatttaatgataatttgcaatcatatttttctaatttcacacaagcagtaggaaaagttaaatttgttgataaaaagccacaacgattagtagtagatttaccaatcgattactatggacaagctgaaacaattggtattacacagtacgttactgaacaagcgaataaatatttcgataaaatcgataactatgaaattcggattaaagatggtaaccaaccacgtgctttaattagtaagacaaaagatgacaaagaaccgcaagttcatatttacagtaattaa

SEQ ID NO: 414311 - DNA, 588 bp, Staphylococcus aureus
ttgctagatattgaaaatgctaatttacaacgtatcacacgtcatttattgaaaaaatatcaagaacgattttacacatatccagctgctagttctcatcatcataactttgcgagtggcttaagctatcatgtattaacgatgttacgtattgcaaaatcaatttgtgacatttatccattgttaaacaaaagtttgttatatagtggtattattttgcatgatattggtaaagttagagaattgagtggtcctgttgcgacgtcgtatacagtcgaaggtaatttattaggacacatctcgattgcgagtgatgaagtagttgaagcagctcgtgaattgaacattgaaggagaagaaatcatgttgttaagacatatgattttatctcatcatggtaagttagagtatggttcgccaaagctgccatacttaaaagaagcagaaattttatgctatatcgataatatcgatgctagaatgaatatgtttgaaaaggcttataaaaaaactgacaagggtcagtttacagataaaatatttggtcttgaaaatcgtagattctacaatcctgaatcactcgattaa

SEQ ID NO: 414312 - DNA, 693 bp, Staphylococcus aureus
atgaataaagctgaaaggcaaaatttaataattactgcaattcaacaaaataaaaaaatgaccgctttagaattagctaaatattgcaacgtatccaaacgcacaattttaagagatattgatgatttagaaaatcaaggtgttaaaatttatgcgcattatgggaaaaatggtggttaccaaatacaacaagcacaatctaaaattgcattaaacttatctgaaacacaattatcggccttatttttagtgcttaatgaaagtcagtcgtactcgacattaccatataaaagcgaaatcaacgcaattataaaacaatgtttaagtcttccacaaacacgcttaagaaagttgcttaagcgcatggacttttatattaaatttgatgacacacaacatatgacactcccaatgttgttttccgacattttaatttattgtacagaacgaaatgtgatgttagtagatcatagggttgatgataatattaaagccgaaaacgttatatttattggccttttgtgtaaacatggacattggcatgcagtcatttatgacattgctcaagacaaaactgccgaactcgaaattgaaaatattatagatatttcgtattcattcggtaagacgattcaaaccagagacatatccattgataactatcatcaatttttaaaccccatcgattcctaa

SEQ ID NO: 414313 - DNA, 342 bp, Staphylococcus aureus
ttgactaaattaccaagcgaagtgagtggcggacaattacaaagatttaatgtcatgcgttcgttattagcacagcctcgcgttttaatatgtgatgagataacttcaaatttagatgttatagctgaacaaaatgtaataaatatattaaaagcgcaaacgattacgaacttaaatcattttatcgttatttctcatgatttatccgtgttacaacgcttagtcaatagaattatcgttcttaaggatggcatgatagtcgatgattttacaatagaggaattatttaatgttgatagacacccttatacaaaagaattagtgcaagcattttcatattag

SEQ ID NO: 414314 - DNA, 720 bp, Staphylococcus aureus
atgtttaaaacagcattaaaattagcgggagacccttattattctggtatggctttaccatcagacataagttcacctgcccaaaagctaagaagaggattgaatcaagtaggcttaggtgtgaaaacaggtatagatttaccaaatgaaacaaaaggtcaaatcgaaccattaacaaataatccaggtaattatctagatttatcaattggtcaatatgatacctatacaccattacaattatcacaatatgtttcaactatagcgaatgatggttatagaatacaaccacacattggattaacgattcatgaatcaactaataaagatgatgttggtccactcaagaagaaaattaatggcactgtcttgaacaaggttaataatactgaaaaagaaatcaaacaaattcaagaaggattcaaaatggcatttaatgataaagatggtactggatatgttagttttaaagatacagtagtgcctactgctggtaaaactggtaccgctgaagtgttccaaaacggagagccaagagttaactctacttatataggatacgcgccaattgatgatccaaaattagcgttttcaattgtatatacaaatcagcctgtaccaccaccatggttaacaggtggagacttaggtagagatgtaattaactactactttaagcagttaggtaaagacgataaaaataaagacaaagacaaataa

SEQ ID NO: 414315 - DNA, 459 bp, Staphylococcus aureus
gtgtatttaaataattctgatacagtattacaacatattaagaataacactatcgatttaggtataatcgaaaaagaggttcaaagtaatattatacacagtagacgtattgctcaagatgaaatagtattaattcgcaaaaaatcatcatcttcaaataagtcaatatgttttatcagagaacgtggatcagggacaagagtctatcaggaaaatgcgttatcacaaatgacttcatcctcttatttagtagaaattaacaacacaaatctaattaaaaatatggtccacgctgataaaggcttttctattgtttctaaatcaacattaacaccttatgatttagaaaagctagaagtaacaaacttagacatcaaacgttatttctatttagtcatacataaggataagtatattgatacgaagcttaatgaagttattaaaaatttgatttcatga

SEQ ID NO: 414316 - DNA, 501 bp, Staphylococcus aureus; identical to SEQ ID NO: 410354

SEQ ID NO: 414317 - DNA, 756 bp, Staphylococcus aureus
atgcttaagggacacttacattctgtcgaaagtttaggtactgtcgatggaccgggattaagatatatattatttacacaaggatgcttacttagatgcttgtattgccacaatccagatacttggaaaattagtgagccatcaagagaagtcacagttgatgaaatggtgaatgaaatattaccatacaaaccatactttgatgcatcgggtggcggtgtaacagtcagtggtggcgaaccattgttacaaatgccattcttagaaaaattatttgcggaattaaaagaaaatggtgtgcacacttgcttagacacatcggctggatgtgctaatgatacaaaagcatttcaaaggcattttgaagaattacaaaaacatacagacttgatattattagatataaaacatattgataatgacaaacatattagattgacaggaaagcctaatacacacatccttaacttcgcgcgcaaactgtcagatatgaaacaacctgtatggattcgacatgtccttgtgcctggttattctgatgataaagacgatttaattaaactaggggaattcattaattctcttgataacgtcgaaaagtttgaaattctgccatatcatcagttaggtgttcataagtggaaaacattgggcattgcatatgaattagaagatgtcgaagcgcccgatgatgaagctgttaaagcagcctaccgttatgttaacttcaaagggaaaattcccgttgaattataa

SEQ ID NO: 414318 - DNA, 705 bp, Staphylococcus aureus
ttgttaaagtatgaacatattgctaagcaacttaatgcgtttatacatcaatctaatttcaaacccggtgataaattgccaaacgtgacgcaattaaaagaacgttatcaagtaagtaagagtactatcattaaagcattaggcttattggaacaagatggtttgatctatcaagcacaaggcagtggtatttatgtgagaaatattgcagatgccaatcgtatcaacgtctttaagactaatggtttctctaaaagtttaggtgaacatcgaatgacaagtaaggtacttgtttttaaggagatggcaacgccacctaaatctgtacaagatgaactccaattaaatgcagatgataccgtctactatttagagcgattaagattcgtggacgatgatgttttatgtatcgaatattcttattatcataaagaaatcgtgaaatatttaaatgatgatattgctaagggctctatcttcgattatttagaatcaaacatgaaacttcgtattggtttttcagatattttctttaatgtagataaactcacttcaagtgaagcttcattactacaattgtctacaggtgaaccatgtttacgttaccaccagactttttatacaatgactggcaaaccctttgattcgtctgacatcgtatttcattatcgtcatgcacagttttatattcctagtaaaaagtaa

SEQ ID NO: 414319 - DNA, 405 bp, Staphylococcus aureus
atgaaaaaatcagctgttttaaatgaacatatttcaaaagcaatcgcgacaattggtcattttgatttattaacgattaatgacgctggcatgccaattccaaatgatcatcgccgtatcgacctagctgtcacaaaaaacttaccacgctttattgatgtcttagctacagtgttagaagaaatggaaatccaaaaaatatacttagcagaagaaataaaagaacataaccctacacaattgcaacaaattaaacaattgatttcatcggaaatcgaaatcattttcattcctcacgaagaaatgaaaagtaacttagctcacccattaaataaaggtaatattcgtactggtgaaacaacgccctactctaatattgcattagaatcgaatgttactttttaa

SEQ ID NO: 414320 - DNA, 315 bp, Staphylococcus aureus; identical to SEQ ID NO: 408085

SEQ ID NO: 414321 - DNA, 684 bp, Staphylococcus aureus; identical to SEQ ID NO: 408089

SEQ ID NO: 414322 - DNA, 201 bp, Staphylococcus aureus
atgactggtttaaaagtttttttgataatctgtatatctgcttttgttggaaattttatattaatgatttttgagagtatgcctatcaatatttgggttgctaggtttatcggaggtgtagcagctgctatttcaggtatgttgcttacttattattttcaaaaaataggattgaggaataggtttttggaaacgagttga

SEQ ID NO: 414323 - DNA, 303 bp, Staphylococcus aureus
ttgttgaaatctaataaaaaatattatctttatataggatttcaagaatgtccgtattgccgagatttttctgaaacattaagagaatttagtagtaatgccaatctccctatttattattttaatttaaacagtggaaactctaaactaaatgaatcagataaaaagttcatagaaaaggtattgaacgaaagtgtaaatttaagaggaactcctacatttttaaagattgaaaagaaaaaaataattgctaaatttgaaggttctcagacaacaattagagatttaaatgatattaattaa

SEQ ID NO: 414324 - DNA, 177 bp, Staphylococcus aureus
atgtataaaaattttgacttatttttaggtattgtatcattactatctgcaataatcatttatattattgattcagatagtaaagggatagctctcgtagttttaataatggggatagtatttattttgactagtatgatacgaaaaaaagggttctgttgcaaagttaaaaaataa

SEQ ID NO: 414325 - DNA, 696 bp, Staphylococcus aureus
atgggtgttttaacaatagaacatttaacaaagaagataggcaacaaaacgattctcgaagatgtatcatttaagctgaaacgcggacaaatagttggtctcgttggagcgaatggtgcaggtaaaacaactttaatgaaagttatattaggttactctagtttccaaagcggaaattttaatgttattaacagcaaagacagcaaaagcaatatcggtgcattgattgaaaatccaggaatatatccttttatgtctggatatgaaaacttgaagttattgaatgaatcaaaaaacactcaagatatcgataaaattgtctcacaacttcatatggatgaatacattcataaaaaagctaaaacgtattctcttggtatgaaacaaaaattaggaattgctatagcatttttaaatgaacctcaattcattatcttagatgaaccaatgaacggcttagatccaaaagctgtgcgagatgtacgtgaattgattgtccaaaagtcgcaagaaggtgttactttcttaatttcgagtcatattttaagtgagttagttaaaatcacaaactctatccttattattaacaaaggtaaaattgttacagaaacatcggaagaagaacttaaacaatttaaagataatgatttagaaaatgtattactagaaatcatagaaagggaggaccaagcataa

SEQ ID NO: 414326 - DNA, 516 bp, Staphylococcus aureus
ttgcattattcttttttaagagcgttaatattaggattttttataggatttattccaattaatatatataatgatttaaaactgaataatttacaatttatttcagtattaacttgttacacagttatgggttatttatcttcacgttatttaactaaatacttgaactataagtttgtgtcagaaatttgtttaataatatttttaataatatatacatatcaaagtttcatagcagttactatttctatgatatttttaggtatttcttcagggttaactcgtccacaaactataaataaactttctagcagtagtaacttaagagtgatgcttaattatgcagaaacgttatattttatttttaatatcgcatttttacttattggtggttatctatattcaattggaactattcaatatttaatgttatttatgtcattattgacgtttatatatttactaacattattttatttaaggagagatcaacatgaaaatcaacacagaatttaa

SEQ ID NO: 414327 - DNA, 663 bp, Staphylococcus aureus
atgaagaagaatttcaagttacgcatttcaacgctactattgatagttattttagttgtttttgctgtattactcatcgtgaatgaaactaaattgtttaaaaatgatgtgaattactcttttgatgaggctgtttcaatgcaacaagggaaaggtattgtacagacaaaagaagaggatggtaaatttgttgaagcaaataataatgaaattgctaaagcaatgactatttcacataaagacaatgatatgaagtatatggatatcacagaaaaagtgccaatgtcggaatctgaagttaaccaattgctaaaaggtaaggggattttagaaaatcgagggaaagtttttctagaagctcaagaaaaatatgaggttaatgtcatttatcttgttagccatgcattagtagaaacaggtaacggcaaatcagaattagcaaaaggcattaaagatgggaaaaaacgctattacaacttttttggtataggagcattcgatagtagtgctgttcgtagtgggaaaagttatgctgaaaaggaacaatggacatcaccagataaggcgattattggtggtgcaaagttcattcgtaatgaatattttgaaaacaatcaactgaatttatatcaaatgcgatggaatccagaaaatcctgcgtaa

SEQ ID NO: 414328 - DNA, 2745 bp, Staphylococcus aureus
atgacgtctaaacttcttagacaactctccttattcatatcttatatccttattctctcactactcatatttttcacagcgcgagcgtcactgattgctggtgcaattcttgcaattgtatttataatattttctataatattacgatttattatgaaaataattaaattacagaataatattaaatattatagaatattaacttatgaaggagatttccctaaatctgataaaatttttaaattattaaaaaatattcattcaactagaagaaatatttttgaaagatttttttatggagatccgtggtttacttttttaatctatagagaaaatagaccaggaaaaagtaaggatagtaaattaggtttttatttagcaggggataaagagttaatggtttcagttagaaaacattttagcaatgtttatccaaacatagaatttcatgaagcagatgaaagccatttagattttcctgttaaaagatcatattttggttatgctaagttaaaacataattctttaaaacagggttatcctatagaaaactttcaacatgataatttaactaagatagttagcattatggaacctgatacatggttgcaatttagatttagaagaaattacggttttaagttaagaaaagctataaaaaagactgatgaagatattagagagcaaaagttcaaggatcgggataattacgaaaaggagatttggaaagaaaccaacaaacgttttacgtatagtgatgttgcttttgatacaacaatcagtatggcgactaactcacatgacggccagcatttattaaaagatatgtatacaattcttaatgaatgtaagtctgtaaatgaacttgtatataggccttcaatgtttaaggtagtggattggtacaatttatggaaacgtggtaaaagtgtcttaacttcaagagaattagctaattttgtgcatatgccagttattaatcgagataatagcttgattgataaaattaagccatttacaccatatattgaattaggtaatacgcctttaagtgaagacactttagcaacgggtcttaaattgggaactttagatcaccctataattaaagatagggaagtatttattttacctgaaatactaagaaaacaattttgtgttacaggcgcaacgggttcaggtaagacgaaccttttaaattgtattttgaataacttcaataaaagttttgttgaaagtttagaagcgacgccagggttttcattagtagatccttcaggaagtgcaataaaattactacttaatagattgcgtgtttttgaaacttttgaaggtaacgaggtagattgggataaagtacatttcatcaaagttaaagatagtgaatacccgttagcatgtaatttattggctaaattagatggggaaaattctgaagaaatgatagataatgttttcagaattatcagcgaaaactttgatacagcaacccaagctgaaagactattgcgatatacaattaaagcgttaattcatgatccgaaagaaactcatacgattatgtctgttataagaatgttatacaaaaatgatgatatttttagaaaacgtatcatagaccgtattagaccatatacagaaatgtatgaagtggttaatttctttgataatgaagcttctgatttaattgaaagtccatcaggtcaagctgttttgaataggttagatgtatttaaatcgaatagtacattaagaaacctattttgtcagaaagagtttaacctaccaatccgcaagtggatggacgaaggacatatagtattttatgatcttgtcggaatgagtgaacaggaaattaaaatattttgttcatacattgcttatatgtattatcgtgttgcagatcaaagacccgcagacacttctttacttcatttaacagttgttgatgaagcgcataaagtacaagcttctatcttccctaaaatcatcagtgaacaaagaaaattcggccattcattaggaattgctacacaaaatttagatgatttaaattcagaattaagatcagcattagttaataatcaatctaatttctttgtttgtagacagggggaaagtggttcagcattagcaactaaaatcttcaaaagtagcgacaaaaaagaacaacattacactgaaagttattttaaacagttgcccgacaatgtttgtgcattgagaacacaagatgttattgaaggcgaaacagttaatgttaaaacgcaagttaaagtgaaacctatcgaccgtgttatggaagatgggaaagttgctgattataaagatcggtatgaacctaaaattgcagacgaatggactatgaaaaaggctgtagagttaagcgctaacaatggtatgtattataaagagatacctaaaatggtaagagcattttttgaagatgaagaatacacttatcaaggtaagcaacaagaagaatttaaagcagatgttattaaacgtaaaccgattgttccagaagaaattaaacgtaagccaaaagaacaaaaacaagaaattaaacctaaaacaaaaaaagttaaattaaataaatctaaagtcgtctttaaaacatcaaaagacgaagtcaatcaagaggaacgaactaaacccaatgaaaacagtcaagtttcacaggaaacagagaaatcaaaaaatgtaggttcctttttaagtggcttcacagataagggggactga

SEQ ID NO: 414329 - DNA, 861 bp, Staphylococcus aureus
atgtcatatacaacattaaatgaaaaagacttcaaattatttagcttcttagaagctcatatatatttgactatcgagcaaatacgcaccgcaatatatttaaatgatgatggttcaatgaaatcagaaaaatcggtttggaatagattaactaaattagaagaagacggctatattaccaaatttaaagcgcaagcaacattacaagctaagcgcccaaactcaatatattgtttaactaaaacaggtagtatgtttttagaaagtatgcaaggttatacgcatttcaaatcagtatatgagaaaaagcttccaatgtggtatatgcaccagttagccgttaatgatgttgtattatcatatgaaaaacataaaatacccgctgttgatttactagaatatgcaaacgagcaaagaactacttttcaatataatgacggccgtgaagatgttattcgtcctgatggtgcaattttattagaaagacaagatggttacgttataggcattatgttagaagttgaaagatctaaaaaagctagaaaatttacttacgataaattagtgagatataaagacttttttaatcagtcaaataacactatgaaaagatttcatattcatgcaggttttgaagaatttgtagatgaatggcgtttgttatttgtgagtaatgaagatgaaaattatcgtaaattgaaacgtgatttcaaaacggtagattttgaagacgcttttaaaggtcaaaatagttttgatgtaatgatagcaaaacttgatgacataataactaatccttatggtgcaatatataattatttcaaaccaggtttagactttgatgaatttagaacactttaa

SEQ ID NO: 414330 - DNA, 1176 bp, Staphylococcus aureus
atgagaaagtggggcaagcagtccgataaaaaggttaaaaaacaaaaatcaaagcccgcacaaaatgaagaaacgacagaagattatagaaaaaagaagaagtcagcagatcgtttgtttaaacgtaacaagttaaaaaaggcgttaaaaaacagaggtaaggacgacaaaattttaagtaaagctaaattgaaacgccctaaaggttataacgttgttaaaacggtcataatcatagctttatttttagtagttgttagttggataaatgcaggtaatgctaatagaaaagcaagtgacgcacaaaaacaatatcagaaattagcctcacaaattgatactactaacaaaggcaatccagctacacaagtaggcgcccaggaatacgcgaaagatttcatacaaaaatattacagttatgataaagggcaagaccgcgataaatggttagataatttaagcgattatgtagacagttcaacattagatgataatagctttaagcctgaaaatataggtggcagtatttcagttaaggacgttaaaatcaatgatgttgaaagtgcagataaaaaccaagcgaaaatatattttacagttacgctagataaaaagacagttgaagaaaaaactgttaagaagaaagttaaaggcaaaaaaggcaagaaggataaagaagaaacaaaaacagtacaagaagataaacacgaagatgttaaattcaacagatacattaaagtatatggcgacgataaaggttataagttaatcactttacctttaccatatgaacaaaaatcaaatgcagatgttcagatgaggctagatactgataatggtagagatgttacaacaaattatcctgatgttaaagattacattacaagctttatgaaagtttacgcttcagatgatagagatacagcgcaaacatatttctataataaatctgatacacaattattgaataacaatgttgaaattaaaaacgttgaagaagtgaaagtgtatcaagaaaacaaacaagatgaacttaaagcgattacaacggtacaaatggaagaaaaagatagtggcttaacaagtcgaaacaaatttgaaattaagcttaaaaagcttgatgacaataagtataatgtaattaaagtaagtgaacctcaatacactaaaaaataa

SEQ ID NO: 414331 - DNA, 297 bp, Staphylococcus aureus
atgttagatttaatgacgtcaattgcttcaatagactttagttctttcacattaggacaagcaggtggagatttagtaaataacgcgcgtgaaggagaaagaaactttacattagtcttaaacattgtttattgggctatcgctgcgattattattgtggtattagcattatctaagaaattcagaatggcattaggtgcattgattatcttaggtgttatcggcgcgttagttgttagagatccgcaaaatttacaaaacttaggcgaaagtatagcgcaattctttggcttctaa

SEQ ID NO: 414332 - DNA, 459 bp, Staphylococcus aureus
atgagtaatatgaaaaaaatcattggttactgttcatcacaattagatgaaataccaaacttaatacgtggtttaggcggtggagagcaaggcttttcactgcctttttctttgacagttagtcagataatcgttattttcacgattattttacctggtttatttttcttacctataacaaatggattattagactttttgccgaaatacggtagatatgcaattgtctttttcattcatataggttttcccgctgtatttggttttttcataggtcaaaaaagtatcgaaaatatgaacgttgtgaaatatgcaaaagtatatatggctacaaaatttaatgaaacgtctgattatgtaggacgtgaagaattagataacaagaaatcatataagttgagaaaaaaagttgtagcgcgtaccttttcagatttccgcataaacaaggaggataaataa

SEQ ID NO: 414333 - DNA, 2586 bp, Staphylococcus aureus
atggctaaaagactagattttgatatagaagcagttgtagaaaacatcatctttactaaagatggccgtatgcaagcatggtttgagtttgaagggtttcacagtaactttgatacagaaaacgaattattaattaaatttagacagttgaaacgtgtatttaaagaggtaaaaaaagaagttcattgtttaattatccccgaacgtcaagacttagatgaaattaaaaatcaacatctttcatacagtagagggcgtttgataccagtattagaacaacatgaagacgctatttttgaccatttaaaaaattcaaatgaattaggttcatcagaaaacaaagttcgttattatatgggctttgaattaggaaagagtacaatggtcaactttactaatgaagatgttacgtggggcgagatatacacagaaacaaaagaaaagttaattaaccttattactaaagcgattactggtaaagacgtattattaacaactaacaaagttaaaacagcatataacaaaatggatcaattaagtaatacgctaaataacttaccgtttacatttagagaaattgaacccgtagaaatggcaaagcttataacatggcctaataatttaaatgtaagagaaccgtttttaaatgataattggtttgaacgtttaacacccgtttacaatggcgatagattaatcgctaaaattagagatcgtggccatgtagaagatttatcaacagtatcatattcaaatcctagcagtagaaaacatcttgtattacaccaaaatgacgcgttaggcaaagaaagagatacttatatttcatttttacaactagcaaaagtaccagttgaaacgcacttccctgatacacgttggcttgaaatacttagaaacttacaatttggcgtaggtgtttcattaaaattaacttatcaaagttcagatagaagattaatgaaacttagatctaaaaaagctaacttagaagaccaagtagaacatttggcagattacggcgatagtgcaagttcaaacgtttatgacggcatagacatagctgatgatttaatcgcaaatattgaaaaaaatagggaagctagtttcttaatgtcagctatattcgtagttacagccgaatctcaaaaggcattaaataggaaattagatgaacttaaagaaacaatgtcaaatcatcagtacattgttcagaatacaagaggtttacaattaagaagtttgcttgaatgtatgccaggaagtagaagatatgtaaaagagtttgtgaaagattgcgatataaacatgatgacaagttcattttttggaaaccgtcacgagttaggcgatccttacggcttttacgtaggtcaaattgctacaaattacggtacgccagtatttcatatgccaggttttgcgtctacaggacaagctaaaaaccaatcattggccatttgtcatacaggaaaaacaggcggtggaaaatcattcggtgcaaaccttttattctatgaatatgcaatatggggcgcaaaagttttaatagtagaccctaaacaagagcgaatgaataagtgtgaatggcataagaaattagatgaattaggtacacaattaaacttcattactttgtcagctaaacctaaagacgcaggtaaacttgatccgttctatatctttacagacgtatcagacgctgtaggtgtatcagaacagatacttcataatttactatcaatttctattagaaatgaagcaactatagatcaagcaacaatgattaacagggcattagaatatgtagcgaatagagatgaacctaaaattaatcaggttacagaagaacttacatctatgagtacaggcgagaaaaaagatattacattaactgaagatgaaaaagaactttgtaagcgtcttgtaaatagaattaatgtatatactacacactcattaagtacgctaatatttggagaaagaattgatgatacagaagttttagatattaatagtcaattaaacgtgttgcaagtagaaaatttagaacttgcagacgctgatatagaccctaaagactattcaaaagcaaatattgtaagtgatagtattttatatgctttaacagcttatcaaagacagtttattaacatgttccctaatgatctaacagttatcggacttgatgaagcctggaaatacttcaaaaactcacaaggacgttcagcctttcaaagtttattccgtgaaggccgttctaaaggggcttcaattcatatcatgacacaaagacttagtgatatacctgaagacatgcagtcacaaatcggacaactatttgcatatttagaaagtaatacagatgaaattaataaacttcagcaattctttagatttgatgatagtacagacttacaagcgattatgcctgaacttgaaacaggcgtatgtgtttataaagacttgaatgatcgcgtcggtattcttgatgtaagagtattacaagagcatttagtagacgcgtttgatacaagtaatcaacttgaaaaacgagaagacacaaaacaagaggtgcaagtataa

SEQ ID NO: 414334 - DNA, 597 bp, Staphylococcus aureus
atgaaaaaattaacatacttattactaatagcaatcgttgttttatctgcttgtagtagtaaagatagttcaaagtccaaaaaagatgactatactgaagaagctattaagtttactaaatatatggctaatggccagtattcaaaattaacagatatgtatggaatttcaaaagatgaaaatgatgtatcagatgacaaagaagaaatgcaagaatactatgaacagatttacacatttgtagatgaagaagatttagaaaatgctaaagatgaaccgttaaaatatgcaatatttgaaacgccatataaagaaaagcaaaaagtatttacgattgtatttaaaccaaatgtaaaagatattttattagatcctggagaaccagcattagacggtaaatatagacaactgaatttattggtaatgggagaaggacaatataaaagagttaatggaaatacagaaggtaaagctattatgcagattaatgaacgtaaacatggtttgtcagaaaaattaatgagtaagatttcagaagatagcaagttagttgaaagtaaaggtattcctaagaaggacttgaaaaaattagagtag

SEQ ID NO: 414335 - DNA, 2082 bp, Staphylococcus aureus
atgaaggataaaacaaaaggctttttgtggttccttgctgttctaatggtattaagtgtttgcttagtaggagttaatgaagcctttgcgaaagaaaaagatccaatttcaggcatgtttccaagtaaccaagatgatgatttacctgaagttaaatcaaatattgtcggttacaaagaacataatttagacaactattcaatggattatgtattagaagaaaaagacgataaaccctggtatgacgttatcgggttaagtgaaaaagcttataacttcactgaaaattcaaagtacgaaattttaaatggtatatggtcaacatataaaatacttgcttcagtattcatattcctggtaagtgaagcttttgaatttactatattaggttctatagttagcgagttagcagatgtaatttcagctataggcggatcatcaggattaggtaaatttataacatgggcttttattggtgtagttgtatggttgattgcaacgattagtaaaggagagttgagaaaaggggcaacaggcgttatgttagccattgtatttacagcccttttcactatctatgtttcaaacgcaaagccaatcatacaaggtacttcagattttagccaatatgtgagtaacactatattgaatacaagtacaagtgtgactggagaaaatcaatcagatcaagctgaagtttccgaaaatgatgtatcaaataaagaaggtttggccacaatgaaaaatacattacatgaaattttgattgtgaagccgtggttacaattggaatttggtacaactaatgtaaatgaaattggcggaggtaaagctggcgaagataataaggttgaagatggcaaaaagttgataaatgggatattagaccataaacctaagtctgataaaagaaatgacataataaaagacaataaaaagaatatgtcagtaagtaacaattacacaactagccgaattgtagtagctgtttttgtctatataccatcatttattattggtataagcgcgatattgttcgcggttgctaaacaattttatgaattaggctttgtagtaggcgcggttgttatggttggtgttctaatcattgcaattataccgtcatttgttggctatttaaaaggtacagccaagcgtacaggtggccacttactaatgtctatcgtgtatgtattcttactggtgcttatgtttacattaattaatgtaacttatcaaatttcagaagaaaaaaattggaattacattgtaacagccatatcattaagtttaatttgtttaggcatgttgtttatgcaaggtaaattgataaaaaatgattatcaaaaagtaatgagttctattaaacaacaaaacatcagtgaacaacgagcgcacgcccgtaaaaagcgtgaagaaaataaacaaaataacggtcaaggtaatcaaccagtatatggtggtaatgatacgaacgttaggaaaaaaccaactgaacatatatctaagaagaaagctaacgaccataacactacttcaaatggtgtgaataaaaaagatggtggcactataagcaagaagcctaaagctagtgagcaagaacagagtaagaaacctaataacaatattaagaaaaaagaagatcaaaaaatcaagaaaaaacctaaacaaaaacaaaaccgcaatgatagtccaggcaatcaagatccaaataataattacaatactaagcctaaatcacgaagtggaaatgataccgttgatgaaggttcaggaagtaaaccatcaattaatagaaaagacggcggaacaattaagaaaaaaccgcaggcagtaccagataaaaaaacagaaggttcacacactaaacaatctaggaacgatagcagttctaaagatagattaaacaaaaatgaaggtggcaacgatagttcaagagttaatgaacaaatacagacaaataaaccacaaaataaaccagtcatcagaaaaaaaccaaaaccagtacaagacacccaagaaaaatcagcaagtcgtgaaacagaaaatagaatagacgctataaaaagaaataaaaagtga

SEQ ID NO: 414336 - DNA, 531 bp, Staphylococcus aureus
atgaaagagattatacaagatatacttaactatttagcgccttacaaaaagcgtatattgtttgttgctatttgtgtattggcgtttggcattgtgctgttattgccaccttctccgcttagagcggtattatctttactcatagtatttgtttttgttgtagaaggttataagtggataggacaacctgaattatggggcagtaagataggtaagaccatgctagggaagttatcaaaaaatgaagctgaagacctagaagaaaacatagaagaagtaactattattaaattgtttaccgatgaagaagaaacggacatcttagatgaaatagaagctgatcctgaattattagatgaattagatactatacaatatacggcaacaatagattttaatgaagatatagaaaaccaaattatccctgaaggtacaacgaattatagatatgaatatcacataatttatgatggcgcagaattttatcatgttacttcttatgaaatgagtgacgcagatgaagaaaattaa

SEQ ID NO: 414337 - DNA, 1095 bp, Staphylococcus aureus
atgaagaaaattaatcaaaaaaatgacggtggtaatttaaaaaagcttactaacctagcattagaatttaagaagaaaaaaataaaattatatatatatggtgcattagctttactaggcataatatttattgctgtatctttaatgtctatgatgttgctagcgccatttgatgatgaattagatgaaagcgaaagtggtggtagcagttcaggttgttcagtaagtggtggatctgtcgaaaaaaaggggcaacaagtttttgaacagaacgctaaaggcggagagctagaaggtaaatcagacaaaattgtaaaaattgctaaaaaaaataaagtaccacctaatttgtttatgtctattattgctagtgaaagtatgtgggggcgtggcgaaaatgccactgttcaaaagaacccgctatctgtgatgggtactaaatcaattgatgattctacttataaaacaatagaagatggtatggaagacggagcaaaaaacttacatgatttgtatatttcaaaaggtttaactacaccagaaaaaataggtaaaaagtatgcgcctattggtgcttctaatgatcctagtaatatgaatgctagatgggtacccactgtcaaaaaaatcatgaaatctttaagtgaaggtagtaagagtgccaaggttgattgtgatagtggcaaaggaaaaggcgatgttggaaaagattataaaggtaaaataccatcatggtctaacgacaatccaggaaaaggcaatttatatacagcaggtcaatgtacttggtatgcgtacggaatacgaaaaaaaataggtaaaccaatatcaactttttggcatgacgctcataaatggaatgaaagagccaaagctgaaggatacaaggttggtaaagtacctaaaaaaggtgcatgttggatttcggaacaaggcgcaggtggtgcacctatgacaactggacatgttggtattgttatagatgttaaagacaaaaatacatttgttgtttctgagatgaatgtaaaaggtggaccataccatgtttctcaaagagaaattaaaatgactgaaggatatagctttatttattaa

SEQ ID NO: 414338 - DNA, 612 bp, Staphylococcus aureus
atgaaacaggttcccaaaaatatggttgtaataatagtattagtattattagcgataggtacattagtatttactatacgtcattatgatgaagaattgtctaaagctaataagcaaaatgaagataataaagcacaagttaaacagctaaaaaagcaaaataaaaagcagagtgacattattgcgagacaagatgaaaaagtagttactaaagaggaacaggatattagggatcaatccaaaaagtttgttaagaccttgtttactttaaaaccaaaacaagattataaagagaaagagaaaattttaacaccaatattagataaaaagtacaaaaaagaattgtttgaagatgttggaggaaaaaataatttatttggtaaagtagatgtatccaatgttaaaacatttttagaagaatatagacctcaaaatgatacgtatgatgtttatgttcaatttgaagaaaaagtacaagatgttgacgaagaagacagtacaactagcaaaacatcaggaaagatacattttgttagaaaaaatgataaatggcttattgataattttgaacgatttacattagagagaaataaaagtggagatccaaaataa

SEQ ID NO: 414339 - DNA, 780 bp, Staphylococcus aureus
atgacgaaagtaataacaataggctgttttaaaggcggtgtaggtaaatcaacgttaactgaaatattgtcttatttattagcaaacgatggatataaagtactagcgatagatacagatccacaaagtaacttgactgaaaagctacaaagaacctaccaaaagcagtttaaaaaagatccgtcatttatgcatggtattaaaaaattggatttagagccttgcatagaaaatgtgactgataatttggatttattaaaaggcgactggtcactagagaaattcgataaatatgtaatcaaaaactttgatgaaaaaggtgaatactttttacttaactcattgttaaagccatttagagacaattatgactatataattatagatacaagaccttcaacaggtattttatctaataacgctgtatgcgcttctgattacgttctaattacatctaagactgaagaagatagttttacttcagccaaaaagtattatagttatttgggacaaattcagcaaaataagaaatcatcacttaaattcttaggactattaccatatctagttaatcaaaagggttcaacaaatagaagtgttataaataagattaataatctatttagagatgacgtatttgaaaactatatacgttctagtgatcgtgtagttacatggggagaaaaaggtattacagaagataaaccacatgataaaaagactatgaaaatgtatgtagatgttaaagatgaaatattaaagaaattggagagtgaataa

SEQ ID NO: 414340 - DNA, 222 bp, Staphylococcus aureus
atgtcagaatttaataacgacttagtaaataacgaatatagagaagatgaagtttttgatgagatgataaaaaagaagaaaaatgtaagacctagaaaatcggtaaaaatgtatacagatgattggtctatagcttatcaagtgaaagctaaaacaggagaaaatttagtagatattatttctgaagcaatggcattattgaaagaaaaacatgatctttaa

SEQ ID NO: 414341 - DNA, 378 bp, Staphylococcus aureus
atgccattcgttatttttatatctatagttgctgttatggttattctatttaagttaaatgataaaagggttgaaaaaataaatagaaaacacgatcagcaagttaaaaatattattgaaacttattacacagttgataaggttgaatgtatatatatagaaaatggaaaaactgaattggtatttcaagacaactcattaaatttaaatagttatcaagtaaaaattgttaatgactttgaagatgaaaaagttgaaattaaagcccctttgtataatgaacatgatctaaatgatttgtttgaacgcgtattagctgaaacttatttttatatttctaaggctagatatgatggtttgatacaagctacagcttaa

SEQ ID NO: 414342 - DNA, 213 bp, Staphylococcus aureus
atgtttgtaactaaagaagaatttaaaaatattgatgtagaacaagttttcaaagaaggtcataactttataaaaataacgaatggtagacatgaaatatttaaagttaattcaggttataagatcattgattataaaaaaggaattggcctaacagcgacaaataaaattccaaagtatatacaaaacaaacttttaaaaaagcctcgctaa

SEQ ID NO: 414343 - DNA, 159 bp, Staphylococcus aureus
atgaaccatgataaagcaatgtatattgaatggttattattaatggatcctttagaaagtagggaaaatttaagagataagacaatagaagaacttcgagacaaatttaatttgtgtagactgaagcaacttgatgaagaaatggaggaagcacaatga

SEQ ID NO: 414344 - DNA, 195 bp, Staphylococcus aureus
atgattattgatgaatttaaaactagaaataatgtgtatgtattaaatgtaatttatgacttttgggctgatcttgttgtacaagttattgaaaatggtaggtttataggatatatcaacgaaagatattctattgatgaagcgaaagctatgataaaagaaaaaagcgattataaaaaagtgattattatatga

SEQ ID NO: 414345 - DNA, 348 bp, Staphylococcus aureus
atgaatttaaaagacatagcaaacttattaaatgatgaaaaaactttgtatacgcaacaaggcgggcaagatatagcagtaaatgaaggtgtgtatattatggagaaaaacaacactatttatactggtaagcttcaaaataataatttagatgatttaattcgtgaaagttctgaaccgcagcaactaatagatgttaatgaagtagctcaaagactaggtgtaacaagacaaaatgttactatgcacgtcaaaaataaaaactttaaatttgtgcctaaacctttgttttattatgagaataaaagctacactaaatatttttgggttgctgaacaatttgagtaa

SEQ ID NO: 414346 - DNA, 861 bp, Staphylococcus aureus
atgaaaatatttaaaccactgatagccttattattatcgcttattgtattaagtggttgtgatacggaaaaggcaataaatgaagttgatgatttaatatcaactattagtgattttatcaaatcagatacacctgaaataaaaaatagtaaagaagatatagacttaataggtgctgaaactaatagcgaaaactatgcttttatcaatgataacaagacagaattaagtcaggaagatcagaacttactgaatgaaaagggtaatgatcgtttttgggctgattatcctgatttggataaatacggtagagcgggaaaagttacggcgttaattacaaataaagctgttcaaagtcattcttcaaaagcacaagaaagaccgtcttttgattatgatgtacatgtagcaggagaatataaagatggtacatataaccctgaaaagcagacgtgggaaggcgagaaatcaaacaaccaaatattacaattagatgggtataggggttatatatataataaatctcattcgcttgcctggtcattgggcggagatatggaaacacataatttaacattaggtactagggcgcaaaatgttggatctaataaagtccctgaaggtgggggcatgggttatcctgaaacgcaaataagaaatgtaatgtatgataatcctgaaacaaaagtgttttatgaagttacgcccgtttataaagatgatgaacttgtgccaagaggttcacacgttagagcctactcaattaatgatgacggccaaacaataaatatcaatgtttggattgcgaataaacaagaaggcgttcaaattaattataaagacggtagttataactattaa

SEQ ID NO: 414347 - DNA, 981 bp, Staphylococcus aureus
atgaaaaaattaattgttagtacagcagtagcaacactattattaactgttccaggtatggccaaagcagaagaaaataaggaagattgggataaacccgtttttataaaaggggctgatcttgaaggccaagacttacaacagactgaagatgatttaggcgtaaaagatgactatgaaacttacagcgtaacaactgatgacgttagtaaatatattcctaatagtggcaatttaagttatatatattcaagtgcaactattaagcataaaaaatggggtaacggtgtagatgtagaaatagacacacctgataacatcacaaaggttacaagtgaacaatatcaaaatgcgtcaatcacagcaggcattaaagacgctgaaattcacatagcttcagttgaaaaagttactggagaaggtgctttagcaggtatttataaagcttatgaagaaaagggcaatgaattaaattctgaagatattcaaaactcaaataaagaaatgcaagatttaacttcaatatctgaagaaaatcaaaataaagacgggtattcagacgaagctttaaacgcgtctatagcagatattaaacaacagttagcagatattaagaaaaaacaagatgaacagataacaccacaacaagttgaagatatagttaataaagtgcttgatgaacgagggttgtcgggaacattaacagataatcaaaaacaaatgataactgataatatgaccaatgttgcaaattctaacgctttaacttcagatcctaaagcatttgctaaaaatgcaaaagacgctttgaaaggtattgaaaaaaattcaggcgacttattaaataaagctaaagacaaggctaaagacttaaatactgaagaaaatagaaactttgtacaaaaaatttgggatagtattttacaaattatacagtctatcatagatttcattacaagcttatttaatcgtatcttttaa

SEQ ID NO: 414348 - DNA, 411 bp, Staphylococcus aureus
gtgttattgaatgtagataaaaattcaaaaaacgtatcgttaaagaagattaggaataacgaattattgtatttaatgagttgttcgagtagtttacctggtgctgatagaactatttgcaatgtattaattgatgaaatgaaaaatattatacatgtttatgatgatttaagacactgttcaacgtccattttcacagaattagacaaaacattaattatagaactgatgtcacttctaggggttgaatatgcacgatatagaattgtactttattatgcaccaatacttaaaaaaccgtttataagagaatatgaattaaaaagtgaaaaattaataactgttaatactgaagaccttaacgaattattttatagaaaggctttgaataatgaaagtttagaaaaatag

SEQ ID NO: 414349 - DNA, 480 bp, Staphylococcus aureus
atgaaaaaggaacagtacattttaaaagttttagatttagttcaagattatcaagttatggaagatgaaaggtttcaaatatcacaaccaagcgacgttgttaagctattacaaaaagaaataggaagcttcacaagagaacactttgttatgattggcttaaatactaaaaatgaagttacaacgctttatactgtgcatataggtacgttagatatgtcaatcatacaccctagagatagttttcaagttgcaatcttaaataattgtaaatcagttatttttgcacataaccatccaagccaagatgtaacgccatcagtcaacgatattatggttggcaagagattaaagcttataggggaattgctaagtattgatgtattagatagtttagtagtaagtgataacaattatacaagtttagaagaattagagttattagaaacagaactcaatataaatgatttattagaataa

SEQ ID NO: 414350 - DNA, 243 bp, Staphylococcus aureus
atgatgtatttaaaaacacgttatataacattaaatgatttaaaacaattaggaattgcagataaacacggcttaatagactatcaagaatttaataaattaaagctagaaaataaagacaaaggagttaatttgaaaatgggcacaaacaacatatttgaaagaggtataaatttcatagacaaaagcccgatttactacaacggaaagcgttacgataataaaattgatataattgaatga

SEQ ID NO: 414351 - DNA, 393 bp, Staphylococcus aureus
atgatccctgaaaaatatgctaatgaaacagattatagaaaaataccccgtgagtatttaaaccctaatatcccacaaggtcgaggaatgaaaaaatggctacctatggccaatatccccgaacaatacgaaagattagaacagtacattcaaggccaaaataaaattgaaaagccattacttagcgaagaccaagtagaaaatataaatgatacattggccagtaaaatgattgataatactttagccaaaattcattattttgctaatggctatataaaaagtgttcaaggtataatacacaaggtcaatacattagatagtgttttatatatttatactgatgatgttttaatgcctgtaaaattaactgatatttataatattgaataa

SEQ ID NO: 414352 - DNA, 723 bp, Staphylococcus aureus
atgaaaaaagattatgatactaaattatggtatgaagttgatgttagcaattttgatgtaaaaaaagaattgcagaatattgatttgtataagcatgagtacgttaaactaattaatgataaatggatagacgtactagacaaaatatatagaagtatcggagattttggagaacgtccacaagatactttacagacattttcagtatatagaggtaatacagcaggaaataagtatatttatgacataggttttaatgttgatttggcaagagatttaataaaaaagactaatagaaaaccattggaagcgccaaatgatatttttaatgatggaatacacattaactatacagaaaaagaaaacccttatacttttacgcctgatgaaccaataattttaattcctgatttagtaacatcaagagaagcaagatttaaaaaaatatacgatataccaacatcattattagtattagatggcaataatagagttactttgatgaaaaaatataaccaaccctatatacactgttattacgtttcattagatgaattgttagaaaacaaagtgtttttaactgactttgatagtgctgtttattgtcagatggcagatctggtttatatattaaaacatatagatgaacctagtattaatgaaatagcaaaggtatattataatcaaagttatttagtaaagcattttagtaaatatatataa

SEQ ID NO: 414353 - DNA, 696 bp, Staphylococcus aureus
atgataaatacaaaaacatatgaagatattaaaaatgaattagtaaaagcaatactaactgattatgaacaatataaagacgcacttgaaaattttcaaagtaaaattaagcaggggcatagtttctatatagttagcactagaaagccaattagtgaacatgcttcagctaaacgatcagctatgtatgcaaatagaacacttactgaagatgaaaatttagttagaatgttaagaaatttaagtgaaagatttgtatatatatataactatagaagggcatttagtttagtcaaagaacatagaagtaagttaattgcgaacgttaaggagttaataagctttaataaaataacgaaagacaaattttcagaaaaaaatgatgccacagctattttcaagcctattgaaacatatgcagttaataagcatttagatatatattttagaagtattgaaacagtaaaaggccatattgataattatttagagaataaatatgagcttgatttgaaccaaatagcaattaaagaagacggtgtttatagcatagatgatgataggctacaagaaagtgaaaaagttttctttgaagaagttatgaaggctattaaatatgatatagaacaagtaaaagctattgagaagcaaaaagatagtgaaaattatctgaagtattgtttattgtttaaataa

SEQ ID NO: 414354 - DNA, 1326 bp, Staphylococcus aureus
atggaaaatgaaaaccaggagtttaaacgatcagaaaaggctgaaaacaagcaaagcaagctgaaaataatatttgtaattatgattattttattattactgtgcattataggagcaattgtatattttgttttatcgaataatgcaaaagcgcagctagatgattttgaagaagctgttcaatctaaagactataaagcagtatctaaaacattaacttctaaagatgttaaagttactcatgcagaagctaaacaatttgtagattatatggccaagaaagacaaacgtaacaaattcaaaaaagaaatgaacaacattaaaagcaatattgaaaatagtgaaagtgatacggttgattttggatatataacagacaagcaggaacgaaagttgatagaaataactatgaatgggaacaagtttatatttattgatagattggcttttaaacctatatttcatgatgtatatatagaaaataattcatattcaaatgctaagtatgaatttaataatgttgaagataaacagcaaattattacagcacctaaaaataaaacaacaaatattggtaagttttttgtaggtaaatatgatatagaagcccaaaaaatttatgatgatgataattcattgattaagggcaaggttaagggcaatattcgatttgatacagataatctaaatagtgataaaaaagtcattgcacatgctagttttaaggacgcaaattttaaagcaaatttaattaacaacgaaaaagtagatgacgatattaagctttatatcaatgataagccgattaagtatgaaaaaaataaagtgtacggtgcatatccagtaaataaacctttaaaagtttatgctaaaggtaaaataagcgataaagcatttaaaactaatacagtaactataaaggacgatcagggggcagaacctcaaaatataattttgaaatttaatgaagatactattaatgactacttaaagagtatcaaagatattgaactaggcgcgaaatcgtttatggaagactatactaaagatttgaataaagcttataaagaaagtgattataagtttatagataaatatattgaaagtaacagtgatttatcacaatatatgcggtcaatggttgaaagcaagaagaaaaaccaatacagacgacctgaatttgaaagcgttaattatcaagatggaaaagttaatgtcattttgaaaaaggaaaatcagaataaagatagcataaaatctaagtatttactgaagtacaataaagaagacgatagctttataatacaaagttatgaagatatataa

SEQ ID NO: 414355 - DNA, 513 bp, Staphylococcus aureus
atgaataacaaacaaatttctgaagcagttacacaaaatttattaaataaagaagcgtatttatctatcgttgtattttggttattattaactttaagaagcattgtccttcacagtacatctcattttcaacttgatgtaaatattttttttgaaatctgtatatttctatttcctacagctttcatttcatcaaataagatccacaaaaatgtaaatgtcaaagaagtttttaacaaacgtataaccatttttttattcattatatgtacaatatttacggttttgggttgtgccattatcgccttgtgtaattattttatgaaggaatcgggtgctttaatttcgataatcttaatgctaatttgtcatttattactaatcgtaataatatctgcaatttttaatttttgggtcacacttcaactcaaagttctatccagtgacaaatttttatatatcttcataactttgtattataaagctatcgtcttctttattgtacttcagtaa

SEQ ID NO: 414356 - DNA, 702 bp, Staphylococcus aureus
ttgataaatatagatgggtaccaatatagtgaccttgctgatttaatagaaagttttaaaaaaacgttagaaccaaaatttgaaaaatcaaaccgtttcaaatacacagactttactatttcagatgaaaaagagtataaagtgattttaaaatggttattgagtaacggttactacattaagcaatttcctaatgtagtaaaaaaacaaacaccattagaaagatttgcttatgatgaaataaaggccaaaataagagcaattaaaagttataattctggcgacagtataccgtgggctgatcgcagagcattaatcaatgaactggatataataaaagagagtggagatactttttttgaagttgagaaagacttaaataacactattaatgaaattgctaatggtaggggtggccttgaacatcagacagtagatgaccaattaggaactttgaataattgtatagaatacttattgaaagaagaaggtaagtttaaagatgtaccagaaagtgtattttatgattttttaaataataaagatattatgaagtataggaaagatacacatatatttagacatgctagcactgaagcattagaagaaaaaaataaatggagtaatgacaaaaaacaattttatatcagattaggggttattatgattacagcaatatataatgatatttattggttttaa

SEQ ID NO: 414357 - DNA, 555 bp, Staphylococcus aureus
ttggctaaaataggctatgcaagagtttcaaccatcagtcaaagtttagaaacacaaattaacttattaaaagctgaaggttgtattaaaatattttctgaaaaagtgagtggcaaaaaaacaaatagaagtaaattagatgagtgcttaaaatatttaagggaagatgatgtattagttgtgactaaaattgatagattaggacgcacaactaaacaattaataaatttagcaagttggctacaggaacataatatagaattaaaaatattagatggaaactttaatatgaatagtccactaggaaaaatgatatttactgtaatgagtggctttgcagaactagaaacagatttaaatagagaaagaacccttgaaggtttaaacgaagcgaaagctaggggaagaaaaggcgggcgtccaggtgttacggaagatgtaaagaactatgttatgtatctatacaataatacagagttatcaggtaatgagatcgccaaaaaaacgggtgtaagtagatcaacggtatatcgtatcaaacgtgattttaattag

SEQ ID NO: 414358 - DNA, 249 bp, Staphylococcus aureus
atgaatgaaaatatattattagaactttgttctaaacttaaaggaataaggaagggcaagaagtatacacaacaagaagtcgctgacataataggaattaatatatggactgtgaacagaattgagaataaaaaattagaagaagttaaacttaaaacaattttacgtatgcttgatttatatgaaattacactatatgaatttatagaagctaataaagatttagcaaatagagcatataacaaataa

SEQ ID NO: 414359 - DNA, 636 bp, Staphylococcus aureus; identical to SEQ ID NO: 408193

SEQ ID NO: 414360 - DNA, 756 bp, Staphylococcus aureus
atgaaaacatacagtgaagcaagagcaaggttacgttggtatcaaggtagatatattgattttgacggttggtatggttaccaatgtgcagatttagcagttgattacatttattggttgttagaaattagaatgtggggaaatgcaaaagatgcaatcaataacgattttaaaaacatggcaacagtatatgaaaacacaccatcgtttgttccacaaataggtgatgtggctgtatttaccaaaggaatatataaacaatacggtcatattggtttagtgtttaatggtggtaatacaaatcaatttttaattttggaacaaaactatgacggtaacgcaaatacgcctgcaaagttacgttgggataattattacggctgtactcactttattagacctaagtataaaagtgagggcttaatgaataagatcacaaataaaattaacccacctgctcaaaaagcagtcggtaaatctgcaagtaaaataacagttggaagtaaagcaccttataaccttaaatggtcaaaaggtgcttattttaatgcgaaaatcgacggcttaggtgctacttcagccactagatacggtgataatcgtactaactatagattcgatgttggacaggctgtatacgcgcctggaacattaatatatgtgtttgaaattatagatggttggtgtcgcatttattggaacaatcataatgagtggatatggcatgagagattgattgtgaaagaagcattttaa

SEQ ID NO: 414361 - DNA, 735 bp, Staphylococcus aureus
atgaacgagaaaaatataaaacacagtcaaaactttattacttcaaaacataatatagataaaataatgacaaatataagattaaatgaacatgataatatctttgaaatcggctcaggaaaaggccattttacccttgaattagtacagaggtgtaatttcgtaactgccattgaaatagaccataaattatgcaaaactacagaaaataaacttgttgatcacgataatttccaagttttaaacaaggatatattgcagtttaaatttcctaaaaaccaatcctataaaatatttggtaatataccttataacataagtacagatataatacgcaaaattgtttttgatagtatagctgatgagatttatttaatcgtggaatacgggtttgctaaaagattattaaatacaaaacgctcattggcattacttttaatggcagaagttgatatttctatattaagtatggttccaagagaatattttcatcctaaacctaaagtgaatagctcacttatcagattaaatagaaaaaaatcaagaatatcacacaaagataaacagaagtataattatttcgttatgaaatgggttaacaaagaatacaagaaaatatttacaaaaaatcaatttaacaattccttaaaacatgcaggaattgacgatttaaacaatattagctttgaacaattcttatctcttttcaatagctataaattatttaataagtaa

SEQ ID NO: 414362 - DNA, 735 bp, Staphylococcus aureus; identical to SEQ ID NO: 414361

SEQ ID NO: 414363 - DNA, 735 bp, Staphylococcus aureus; identical to SEQ ID NO: 414361

SEQ ID NO: 414364 - DNA, 462 bp, Staphylococcus aureus
atgattttcgaagaaaaactaagtcaaatgtacaatgaaattgcaaatgaaatcagtgggatgataccagtagagtgggaaaaagtatatacaattgcttatgtaaatgaaagaagtggagaagtgttctacaattatactgaaccaagaagtgatgaattattttactatacgagcgtgttaaataaatataatatatcaagatcagaatttatggactcagtatatgaattatataagcaatttgataaactaagagatttatttaaagaagaaggactcgaaccatggacatcatgtgaatttgactttacaagagacggcaaattgaatgtttcatttgattatattgattgggcgaattcagagtttggacaaatgggaagagaacattattacatgtataaaaaatttggaatttggcctgaaaaagaatatgccataaattgggtaaaaaaataa

SEQ ID NO: 414365 - DNA, 369 bp, Staphylococcus aureus; identical to SEQ ID NO: 408582

SEQ ID NO: 414366 - DNA, 468 bp, Staphylococcus aureus
atgacgattaaagttgaagataataaaattattttttcaagaacgatagaagcaccgattgaaaaggtgtttgatgcctatacgacaaaagaattatttgaaaaatggtttcatccaaaaggggctagcacaaaagtatttcgctttaatgctgtttcaggcggtgatgcattttatgcgattaaaacacctacaatgaccagctatacattagcagaatataaaacggttaagcgtccatatttaattgaatatattgactcatttgcgacacctcaaggtgcaaaagatacaaaaatgccaagcatgaaaattactttgtcattttccaagagcaatacaacgaaaacgacagtgacatcaacatcggtatttccaacaaaagaagccgctcaacaagtcataaacatgggtgttgaacaaggtatgaatcaaactttagatcaacttgatgctttattgaaataa

SEQ ID NO: 414367 - DNA, 600 bp, Staphylococcus aureus; identical to SEQ ID NO: 405936

SEQ ID NO: 414368 - DNA, 285 bp, Staphylococcus aureus; identical to SEQ ID NO: 411710

SEQ ID NO: 414369 - DNA, 276 bp, Staphylococcus aureus
atggaaaataaatttgttcctggtattttaattggtgccgtaattggtggtgcaattagtttagctgataaatctacacgtcaagctttagttcaatcagttaaagatgcaaaaaatggtaaccgcactcgtaagccttctaaagtcagcaagattaaagacgaagttttatactggaaagatgttgttgaagaaattcgtcgtaataatcctgaattagaacgttcattaaaggatgcgaaagaaacatttgttaatagaaaaaatcaacgctaa

SEQ ID NO: 414370 - DNA, 762 bp, Staphylococcus aureus
atggcttatatttcattaaactatcattcaccaacaattggtatgcatcaaaatttgacagtcattttaccggaagatcaaagcttctttaataacgatacaactgctaaaccattaaaaactttaatgttgttacatggattatcaagtgatgaaacgacatatatgagatatacaagcatagaaaggtatgcgaatgaacacaaattagctgtgattatgcccaatgtggatcatagcgcatatgctaacatggcatatggtcatagctattatgattatattttggaagtatatgattatgttcatcaaatatttccactttccaaaaagcgtaatgacaattttattgcaggtcactctatgggaggatatggcacaattaaatttgcattaacacaaggggataaatttgccaaagctgtaccattatctgctgtgtttgaagcgcaaaatttaatggatctagagtggaacgatttttcaaaagaggccataattggcaatctttcaagtgttaaaggaactgaacatgatccgtattactggctagacaaagctgtagctgaagataaacaaattccaaaattgctcattatgtgtggtaaacaagactttttatatcaagacaatttagattttatcgattatttatcacgcaaaaatgttccttatcaatttgaagatgggccaggagatcatgattatgcatattgggacgaagcgattaagcgtgctataacatggatggtgaatgattaa

SEQ ID NO: 414371 - DNA, 363 bp, Staphylococcus aureus; identical to SEQ ID NO: 412845

SEQ ID NO: 414372 - DNA, 378 bp, Staphylococcus aureus; identical to SEQ ID NO: 408254

SEQ ID NO: 414373 - DNA, 303 bp, Staphylococcus aureus
ttgccagttggtttcctaggtattggagaaccattaatctatggtgtgactttgccattaggtcgacctttcttaactgcttgtattggcggtggtattggtggcgctgtaataggtggaattggacatattggtgccaaagcaataggcccaagtggtgtgtcactattaccattaatctcagataatatgtatttaggttatattgcaggattacttgctgcgtatgctggtggattcgtttgtacatatttatttggaacgacaaaggcgatgcgacagacagatttgttgggtgattaa

SEQ ID NO: 414374 - DNA, 387 bp, Staphylococcus aureus
atggaaaatattttagaagtaaatcaagtaaaaaaatactacaaaattaaaactggattattacaaaaaactcagtacgttaaagctgttgatgacgtatcgttttcaataaaaaaaggacaaacttttggattggtaggcgaatcaggttgtggtaagtcaacgttaggtaaagtgattatcagacttgaagatgcaacttcaggctcaataattgttaatggtgaagatataacaagattacaaggtaaaaaactgagaaaatcacgacaacaatatcagatgatatttcaagatccgtatgcatcattgaatccgatgcaaatggttggagatatcatttcagaacctattttaaattataaaaaattgcaaaagaagaaataa

SEQ ID NO: 414375 - DNA, 528 bp, Staphylococcus aureus
atgaaactgcttaaaacgaagaattgtttatattatcgtaatggcgacaataaactatctgagtatcaactattaacgcaatttaacccagcatttattaataaaaaaattaagatgtgtgaattccaaattgaaagtatgtaccatatgagtgcgtcgaccacaacatgtgatgaaataatgggggtcgtgtctgtctcatatccgattgaaaaattagttatcaaaattattgaaacaaaagcagggttacaaaactataaaaatagatctataaataatatggcgttgttgaaaaaggtactaaatcattatacagaaaaagagcagaagcaagttgtaaaatatatgcgttcaaatggacgatataagccttacaacgtcattgaacgcttacaagttgatttgtatcaagcaagtattaaacaacgttcagaacgtcaaaaacaaagaaatacagcaattgaaaacagtaagattgcacgagtaaatgcatatcaccaatcttcatatgtaaaagtggtgtaa

SEQ ID NO: 414376 - DNA, 630 bp, Staphylococcus aureus
atgacattgattaaagagatgtttccgaacgctaaaatagtcatcgatcgattccatattgttcaattattaaatcgtgctttaaatggtattcgagtcactgttatgaatgaattaagaacgacgaatcaacctttatataataagtttaaaagatatgcgaaattactattaaaacctgaagaagatttagaggcatttgaatatcgtaaagtagctttatttaaagaatggaagacacaaaagggtatcgcaaagtatttattaaatcaagatgactcgttaaatgacgcctaccaatatatcaatcagctacgattcaaacttaaacataatgattatgaaggctttatttacgaattaaaacatatgcgattatcccaaacgcattcagttgtccaacgagcaattgagacacttaacaaacatgtatactttataaaaaatacatttgattattacaatttgtcaaatggtcctttagaaggtataaataacaaaataaaattaattaaacgtacatcttttggttatggaaattacaatcatttgcgcaatcgaatattattatgttcaaaactttacgctccaaaaaggaaaaaagaagttaagcaatgtttagttgcctaa

SEQ ID NO: 414377 - DNA, 621 bp, Staphylococcus aureus
atgacattgattaaagagatgtttccgaacgctaaaatagtcatcgatcgattccatattgttcaattattaaatcgtgctttaaatggtattcgagtcactgttatgaatgaattaagaacgacgaatcaacctttatataataagtttaaaagatatgcgaaattactattaaaacctgaagaagatttagaggcatttgaatatcgtaaagtagctttatttaaagaatggaagacacaaaagggtatcgcaaagtatttattaaatcaagatgactcgttaaatgacgcctaccaatatatcaatcagctacgattcaaacttaaacataatgattatgaaggctttatttacgaattaaaacatatgcgattatcccaaacgcattcagttgtccaacgagcaattgagacacttaacaaacatgtatactttataaaaaatacatttgattattacaatttgtcaaatggtcctttggaaggtataaataacaaaataaaattaattaaacgtacatcttttggttatggaaattacaatcatttgcacaatcgaatattattatgttcaaactttacgctccaaaaaggaaaaaagaagttaagcaatgtttag

SEQ ID NO: 414378 - DNA, 216 bp, Staphylococcus aureus
  misc_feature (78)..(87): n is a, c, g, or t
atgaaacaaaaaaaatctaaaaatatcttttgggtattttctatattagctgttgttttcttagtattatttagtctnnnnnnnnnngtattatttagttttgctgttggtgcatcaaatgtaccaatgatgattttaacatttatattactcgttgcaacctttggaattggatttactacaaagaaaaaatatcgagaaaacgattggctataa

SEQ ID NO: 414379 - DNA, 528 bp, Staphylococcus aureus
atgaaattaaacttatttggttggaaaacaaactttggtgaagcgatcttccaatcaattaacccattatttattttattattagctccaattatttcacttttatggcaaaagcttggaactaaacaacctagcctgccagtaaaatttgcaattggtacgttcttagcaggtgcgtcatacatactaattggtattgtaggttatgcatcaggttcatcaaacttctcagttaactgggttattttatcgtacattatttgtgttatcggtgagctatgcttatcaccaacgggtaatagtgctgctgttaagttagcacctaaagcatttaatgcccaaatgatgagtatttggtacttaactaacgcttctgcacaagcaatcaatggtactttagttaagttaatagaaccactaggtcaaacaaattactttattttcctaggtgttgttgcaattattgttacaacaattgtattagcattctcacctttaatcatcaaagcgatgaaaggtatacgttaa

SEQ ID NO: 414380 - DNA, 267 bp, Staphylococcus aureus; identical to SEQ ID NO: 412854

SEQ ID NO: 414381 - DNA, 237 bp, Staphylococcus aureus; identical to SEQ ID NO: 414235

SEQ ID NO: 414382 - DNA, 207 bp, Staphylococcus aureus
gtgacgcaatacttagtcacaacattcaaagattcaacaggacgcaagcatacacacataactaaagctaaaagcaatcaaaggtttacagttgttgaggcagagagtaaagaagaagctgagcgcaaatacgaggcacaagttaaaagagatgcagttattaaagtgggtcagttatttgaaaatataagggagtgtgggaaatga

SEQ ID NO: 414383 - DNA, 165 bp, Staphylococcus aureus
gtgaaaccgatgagtgctactaaagaccatcacaataaagcaaaagcattaccagaaacaggtagtgaaaataacggctcaaataacgcaacgttatttggcggattattcgcagcattaggttcattattgttatttggtcgtcgtaaaaaacagaataagtaa

SEQ ID NO: 414384 - DNA, 255 bp, Staphylococcus aureus
atggaaacaattgctattataaatgaatatcaaaaagatatatcttatttaaaaaatataattaataaaatgaatgaaaatagaacttataatcatattgatagttttatcacttcagagtaccgacgaaaaataaacgattataatctttatcttgataaatttgaagaacagtttagtcaaaagtttaaaataaacagaacttcgataaaagaaagaattattattaatttaaacaagaggagatttaaatga

SEQ ID NO: 414385 - DNA, 417 bp, Staphylococcus aureus
atgaacgagcaaataataggaagcatatatactttagcgggaggtgttgtgctttattcagttaaagagatttttaggtattttacagattctaacttacaacgtaaaaaaatcaatttagaacaaatatatccgatatatttagattgttttaaaaaggctaaaaagatgattggagcttatattattccaacagaacagcatgaatttttagatttttttgatattgaagtctttaataatttagataagcaaagtaaaaaagcgtatgaaaatgttattggatttagacaaatgattaatttatcaaatagagttaaggcaatggaagattttaagatgagtttcaacaatgaatttagtacaaatcagatttttttaatccttcttttgttatggaaacaattgctattataa

SEQ ID NO: 414386 - DNA, 459 bp, Staphylococcus aureus
atgatttcacacttgataacggatacttcgaagaagaaacatcagacagtgactcagacagtgattcagattcagatagcgattcagactcagatagcgattcagactcagatagcgactcagattcagaaagcgactcagactcagacagcgattcagactcagatagcgactcagattcagacagcgactcagattcagaaagcgactcagactcagacagcgactcagattcagacagcgactcagactcagatagtgattcagattcagacagcgactcagattcagacagcgactcagactcagaaagcgactcagattcagacagcgattcagaatcggatagcgactcagacagcgactcagactcagacagcgactcagactcagatagcgactcagattcagacagtgactcagatagcgactcagattcaggaaaacatacacctgtga

SEQ ID NO: 414387 - DNA, 453 bp, Staphylococcus aureus
atgatttcacacttgataacggatacttcgaagaagatacatcagacagtgactcagactcagattcagacagcgattcagattcagacagtgattcagactcagacagcgactcagactcagacagcgactcagactcagacagtgattcagactcagacagtgactcagactcagacagtgattcagattcagacagcgattcagattcagatagcgactcagattcagacagtgattcagactcagacagcgactcagattcagacagtgattcagactcagacagcgactcagattcagatagcgactcagactcagacagtgactcagactcagatagcgactcagattcagacagtgactcagactcagatagcgattcagattcagatagcgactcagattcggatagcgactcagattcagatgcaggaaaacatacacctgtga

SEQ ID NO: 414388 - DNA, 207 bp, Staphylococcus aureus
gtgacacaatacttagtcacaacattcaaagattcaacaggactaccacacgaacattttactgtggctagagataatcagacgtttacagttgttgaggcagagagtaaagaagaagcgaaagagaagtacgaggcgcaagttaaaagggatgcaattattaaagtgagtcagttgtttgaaaatataagggagtgtgggaaatga

SEQ ID NO: 414389 - DNA, 402 bp, Staphylococcus aureus
atgaaaatcaaagttaaaaaagaaatgctattagacgagttaattaaatgggcgcgagaaaatccggagctatcacaagggaaaatatttttttcaacaggatttagtgatggattcgttcgttttcatccaaatacaaataagtgttcgacgtcaagttttattccaattgatatccccttcatagttgatattgaaaaagaagtaaccaaagacacggtatttgataagttgtttgaaatgtacgagatggaaggaggagtctatgaaaccgtattatatgcaaacactagtataaaagaatgtttatatggtagacgtttgcctaccaaagcattctatatcttaaacgatgatatgacgatgacgttaatttggaaagatggggagttggtagtatga

SEQ ID NO: 414390 - DNA, 696 bp, Staphylococcus aureus
atgccaataattactagttatatcactcaagatgacggtacaacaacagttgtcatctcgggtgttgaattaggcaataaagaaacattactacttgataacggatttgatgtggaagtcgatgtaagcgtcatagatccgtttcaaattaccggcaagcaacgacgaaaaatattcgcgcttgtcaaagacatagaagaatatacaggtcaaccaatggactatatgcgacatatgttcatcgagtatgtaaggacttactacggctatgatgaacgtatttcactaagtaattgtacgagaacacaagcaagtcaaatcattgaagcaacgcttgactggacgttctacaatgacataccacttagctacaaaacgagtaatctactgaaacaagataaatcattcttatactggtcaactgttaaccgcaactgtgtaatatgcggaaagcctcacgctgacctagcgcattatgaagcagttggcagaggtatgaacagaaacaagatgaatcactacgacaaacatgtattagcgctatgtcgcgaacatcataacgagcaacatgcgattggcgttaagtcgtttgatgataaatatcacttgcatgactcgtggataaaagttgatgagaggctcaacaaaatgctgaaaggagaaaacaatgggagaagtatcgtggataaaacttaa

SEQ ID NO: 414391 - DNA, 240 bp, Staphylococcus aureus
gtggtactaaatttaaaaagattgagagcggaaagaatagcttgtggtattacgcaagatgaaatggctcacaaaatggggtggaaaacaagaacgccttatgcaaagagagaaaatgggatagtagatattggagcgaatgaatttattaaaatggcaaaaatattaggttatgaaacaaataacctagatattttttttaccaataacgttcccgaaaaagaacgtcaaacaaattag

SEQ ID NO: 414392 - DNA, 132 bp, Staphylococcus aureus
atgaatatagtacctattgaaatgatttctattacaatcatatttgtattgctcataagtcttgctacaatcattatcaataaaaagaattggtggggtggtatcaaaaaaacactaagtggaaaagattaa

SEQ ID NO: 414393 - DNA, 1848 bp, Staphylococcus aureus; identical to SEQ ID NO: 408739

SEQ ID NO: 414394 - DNA, 2496 bp, Staphylococcus aureus
atgaatttaaaagcaccgtatgcaggtttaagagataatttgttattaacgaaaactggcgaagtttgggcgtattatcgtgttcgttctgagtctatttcaacagcaaattatgatgcaaaagaagaatcaaaaaagcgtatgcgttattttttagagtcgattaaaggttatcaagattttcattttgaaatgtatgaccatgatttagatttgcgaaataaatttaaagaaattagtaaagattttgatgatgaagcttttaatgtagctgaatattattcaaaagaaactattgacgtattagaacaagaattacaaatgattacgcataattcttttgttatgggtgttaaaatacgtgaattagctgacgatgcagttacacttaaagagattttaaaaagtacattatcagatacggctgagcgtattgtttcgaattttggttttgatgttaatttagacgataaaattttagataagtataaaacatttgaacgagatttggctgatagttttctaggtattggaggcgaacgtttaactgagaatgagctggcttatattattcggaagccatttatatcaaatgcaacacatgacgtacaggaagaatcttcaagacgagctattacagatatttataatgcagtaattgaccccactcgtttgagtgttttagaagttgaaaatgataatgaaaaattttacacaacaacagttgttgttgatgattttccgttagatatggaatatacacatttatttgagaaagctcaaaatatgccttttccggttgaatgtcatgtaaaagcaaaaattattaataatgaaaaagttaagaaaaaatttgaccgtgcgaaaataaatcataaacaacaagcaaaagaaaagcaagatactggcgatagtgcttcggaagatgttcaagataatttgtttgtattgaatcaaatggaaagagaagtgactggctcaggtgtatttattgagtgggtatttatgtttgtaattaaaagtgatgattatagagactgtaaacgtaaagcaaagcgtttgatgaaacgattaaaggaaactcaaatatatgcagttaatccattagctgaccagttacaattgttttatcagtgtttacatggtaatgatttatttattaataagtattggttacaaagaactacggcaacaggtatagcagaaaatttatttggtgtgtctcaaagtttgggaacaaaaacaggtttttatatagggcgtattgataaatttattcgttctgtttcacgtgaggaagctgttgcaagttcaagggatataattttatttagtttattgttggctgcaaaaggtattaaaggggctgtcagtgatagtccgcatgttttaattactggtcaaactggtaaaggtaaatcatttttagcaaaattattatggatttatacatcattttttaaaggtcaaatgttgtactgggatccaaaatctgagtttgcagaatggtttgacagagtaacagaaagtaaggaaatgcaagaaaagtatcccctatttattaatcatttaaaaacatttaaatatgtaacattgaattatgaagattcaaccaattatggttgtctagaccctattgtatttttagatggtattgaagctaatgagatgttgaaatcagtgtttgatgaaattaaatcttttgaaaattatcatcatattgaaacggcaatttatcaagctatttctgatacggttgaagaacgtgaaaatggtaaaaaagttggttcattaaatgtaattgaaaaattacagaataatgaagatgagcatgtaaaaaatgcaggcgatttattatttgaaaaaacgcaaaacaatattttaaaacttgtttttagtgatggtacgaatccagctttaaatattcaagaaaaagcaactattttacaggttaaaggtttagatatgcctaaagcagatgatgatacatcaagttattcaacaagtgagaaaaatgggattacattaatgttattaattggtaagtttttagagaaattcggttctcgtagagatgttcaaacgactatatttattgatgagggttgggcttttagtgcttcaagacaaggtaaaaaagttggtaagcgtataaaaagaacgggacgttctgagaataattcacttgtatttattacacaatcggtaaaagataaagcagatgatgatggtggtaactttggttgtcattttgcatttgatgaaaaagatgaacgtgaggatattttaaaatctttaggcttagaatattcaaaagaatctcctgaaaatatggaaatgttgaaagatttgaagaaaggtcaatgtatatttagtgatttttatggacgtgttggaaaaatggttgtacattgtccatttgaggaaatgactgaagcatttagaacacaagaagattctgcaagctctaaagctgaagaaaaatttgcgatgtaa

SEQ ID NO: 414395 - DNA, 384 bp, Staphylococcus aureus
ttggataaaaaagcttataatttaaagcgaacttttgaacaaccgatagttatgtatgaatttacagataagtttcgtattaataagggttttcgtttagatttttgggctacatttttgattgtatggtttatattatttttgttattttggtatttattacagcctgtcattatgtcgattggtggacttatgtttatttactttacggttgcaccatattatataacgaaatatattgttaagttaaaacaagatggaaagaaattatttttcttcttatgggattttgtaatatttgtttttaatgtgcagctaagaaaagttaaattaagttatgatgaagaagtagaatatcatgataaaaaaataacatttaaatag

SEQ ID NO: 414396 - DNA, 261 bp, Staphylococcus aureus; identical to SEQ ID NO: 408740

SEQ ID NO: 414397 - DNA, 1056 bp, Staphylococcus aureus
atgaaaataataagcaagtacattttaacacgattttctaaaaacggaaagcattttgatattcctaaagaacaacgccgagtaattccaaaatttaaaaatcgtcgtaagatgattgtaatttgtttttactcattattagctattttgttaattcttttattagcttcttttattaaagctacaagagcaaataatgatagtaaagaagcagttaataaaacgaatatgattcaaaaaaagtatgaagataatgcgaatacagttcagtatagtcctaaattaaagttatatgctgataaatttattgatacgtatatgaatatttctaaagactcaaaagaattagaatctagagaaaaagagttattgaaatattttccatcagattataaaaagcctgaagaaaaaacatcagatactgaacgtaaattaaatagtaaggaattttataatattaaacgtaaagataaacaaacgattatacagtatattgttaattatgatgtgaatattactgaaaagaaagaagttaaagtaaagaagaaaaagaaaaatgataaagataaagatgaatatgaaacaaaaacagaagaaaagcaacgtaaagtaaatcaaaatattctaattaatatacctattaagagtgagaataataagtatgttgttgttgaatatccttattttacgccaattcctgatagtcaattaaataaagctaagatggttgaggataacttgaaagataataaacgtgaagataatccgaaagcaaaagtatttattgaggatttctttaataaatatgcttctagtaagcctgatgatatggcttatttaatggataatcctgagggattagaaggaactagagaagtttctcaaataagagaaattaggttatatccaaaaggcgatgattatgttgctaaagttgaaattttgatgaaagataaagattctcctttggagaatttggaacattacacattagatataacgaaaaaagatggtaaatattacgttaaaaatatgactaattctattggaggttaa

SEQ ID NO: 414398 - DNA, 1092 bp, Staphylococcus aureus
atgactttaaaaaatcagtgtgccccccttactaataggggggtagagcgtacaaataaaagtgccgtggaggcagttgttgactgggttcaggtcactttccatataacccctatttcagcagtaattgaggacgttatcggtttgcctataacgttgttcaaaaaacgaaatagtggcatttacttttataatcgcggttatgaattttcaaacattaaattgtattattcaagtgatgatgaatcaatgggcattcacttacagttaactggtacaggttgtagagagtttgaacatcatttacaacagttgaataaaacttggcaagatttttttgataaatgtttatcagttaatgcaaattttacaagaattgatattgcaattgatgattataaaacatatttaaaagtgcctttattaattaaaaaggctgaaaaagctgagtgtgtttcacgttttagagctggaagcgcaataaacggttttaatttatcagacggaagaagtaaaggcgctactttttatattggttctaaacaaagcaatttatattgtcgattttacgaaaagaattatgaacaagcgtttaaacgtcattgtgatgtcgaagacattgggttatggaatcgttatgaaatacaaatgcgaaaggcatatgcagttaattgtgcgaaagttttgagtagaacagataatataagcgaaattgtaaagtctatattgcataataatttgcgttttatctcccctcctaaagatggaaatgataaaaatcgtaagcggtggccattgtatagaccttgggcgttatttattaaagatactgaaaaattgaatttaactactagaccaacattaaaatccattgaggataatcttgattggttatgtaaacaagttgctactactttagatacagttttaactgccgaaagtatggcgcaatctgaggggttgcttacagatactgattttttagataaaattttagcgcattcacaatttaatgatgagcatacgaatagaattaatcattatttggaggctttaaaacaaaaaaagcacttatcaaaagataagtgttaa

SEQ ID NO: 414399 - DNA, 303 bp, Staphylococcus aureus
atggattattatacagcagatagattatatcgctacacaaatagttcaaatttgagtgaacctattttaaactatgttgctagtcgtataaattggggcgataaagtttcattaatgactttagctaaagaaatacagtctaaatttaatgatagttatgttaaagaaaatacggtaaaaggtcggcctaaaatttacgctgacctttgtctattgtgtatgagcttgagtgaagcaggacatggcagaatgctacaagtgaatttggaagattgtatttatattggcgatattgatgtttaa

SEQ ID NO: 414400 - DNA, 1092 bp, Staphylococcus aureus
ttgtttacttactttaaatcagcatttaaaaatgctaaaccacaattattaataacattgatatatgcacttatagcatttgctgtaattgcagttgtatatttacttgctaatttccagcttgctaagtatgcacaaactattgcaatttattcacaatttgggcaaaaaccaccagtagatgcatatttaaaagttatcgctgtattacttatagcagctgtagtttcactgtttgttttagttcaaatttttatcggaattacaaatgttatgaaacgagcaatgagtcatgaaaaagtaaaatttaccgatttatttattgcatttaaaaaaggtaattatttaaagagcgttctgatcggtcttgtatctatagcaatgattatcgttctttcacttctgacatcattactatacaaattattttctccagtatcagaaatgattatgaattcagtacaatcatcatatgcagatagtacacacctgattggtattgctattacaactcaaagcatcataatcattgttgttttattgattaaagcaattattacttggttattgttaatacctattttcaactttatgactagtttcgttgaatcaactaacgataaagtaaaaacacacttagctaatggatttaaagcaatgaaaaatggtcaaaaaacatttttcaaatttttcattggaatactattattaaacttaattattattttatttaaaacacctgttggttacttgatttcatttaatacgcaatcactctctcaaagtgttgcagaaaatatcataagagtttatacagtaatgacaatcattttattcgttgttattcatgcaatcattttaatgggtatcgttcaatattacttaaaacgtggtcaaaaaattactaaagataaagtaaaaacagctgacaaggataaaaaagttgtcactgaaccaaaaaatacaaaagtagaaaatggtaaagtgacaacatctgttgaaacaaaaacagaaaaagcacaagattcattaaatgataatacaacaaaaacgatgacttcagataaaccagaagacaatcaaccaaaataa

SEQ ID NO: 414401 - DNA, 1125 bp, Staphylococcus aureus
atgaatgcactatttattatcatatttatgattgtagtaggggcgataattgggggcattactaatgtaattgcaattagaatgctgtttcacccctttaaaccatactatatatttaaatttagagtcccatttacaccaggtttaataccgaaaagacgcgaagaaattgcaactaaaattggccaagtgattgaagagcatttgcttacagaaactttaattaatgaaaaattaaaaagcgagcaatcacagcaagcaatagaatctatgattcaacagcagttacaaaagttgacgaaagatcaattgtcaataaaacaaattacttctcaaatcgatattgatttagaacaagtattacaaactaatggaaatcaatatattgaatcacaattgaataattattatacaaagcatcaaaatcaaacaatagcatctttattgccaaatcaacttgtaacatttttagatcagcatgtagataacgcaacagacttattatgtgatcgtgcaaggaattatttatcatctgcaaaaggcacacaagatattaatgatatgttggatacttttttccatgagaaaggtaagttaattggtatgttgcaaatgtttatgacaaaagagagcattgcagatcgcattcaacaagaacttatacgtttaacatctcatcctaaagcaagaacaattgtgacatcgttaattaccaatgaatatcaaacttttaaagataaaccattgaatgaactgttagatgcatcgcagtttaatgaaatcgctgaaaatctatcagtgtatgtaacaacatatgcaagcaatcaagcgaataagccagtggttacgttaatgcctcaattcgttgattatttagaaggtcaactctctagcaaattagcaaatttaatcattgaaaaattatcgattcacttatctacaattatgaaaaaagtggatttacgaggattaattgaagaacaaattaatacgtttgacttagattatattgaaaaattaattatagaaattgctaacaaagaactaaagttgattatgtcattaggtttcattttaggtggtattattggatttttccaaggtttggttgcaatctttgtctaa

SEQ ID NO: 414402 - DNA, 345 bp, Staphylococcus aureus
atggcagtaaatttatatgattatgcaaatcaattagaacaagctttaagagaaagcgaagaatacaaagcaatcaaagaagcattcgctaatgtaaaagctaacgaagaatctaaaaagttattcgatgagttccgtgaaactcaaattaacttccaacaaaaacaaatgcaaggtgaagaaattgctgaagaagatttacaaaaagcgcaagaacaagcgcaagcaattgaaaaagatgaaaacatctctgcattaatgaatgctgaacaaaaaatgagtcaagtattccaagaaatcaaccaaattatcgttaaaccattagacgaaatttacgctgactaa

SEQ ID NO: 414403 - DNA, 471 bp, Staphylococcus aureus
atgctaaacagaacaatattagttggtcgtttaactagagacccagaattaagaaccactcaaagtggtgtaaatgtagcatcattcacattagcagttaaccgcacatttacgaatgcacaaggagagcgcgaggcagactttattaatatcatcgtatttaaaaaacaagcagagaacgttaataaatacctatctaaaggatcgttgacgggcgtagatggtaggttacaaacgcggaattatgaaaataaggaaggtcaacgtgtatatgttacggaagttattgctgatagtattcaatttttagaaccgaaaaactcaaatgacactcaacaagatttataccaacaacaagtacaacaaacacgtggacaatcgcaatattcaaataacaaaccagtaaaagataatccgtttgcgaatgcaaatgttccgattgaaatagatgacaatgatttaccattctaa

SEQ ID NO: 414404 - DNA, 405 bp, Staphylococcus aureus
atgaaaatcaaagtaaaaaaagaaatgagactagatgaattaattaagtgggcgcgagaaaatccggatctatcacaaggaaaaatatttttttcaacaggatttagtgatggattcgttcgttttcatccaaatacaaataagtgttcgacgtcaagttttattccaattgatatccccttcatagttgatattgaaaaagaagtaacggaagaggctaagtttgataggttgttagaggtatatgagattcaagaaggagtctataaatccgcattacacaaaggtatcagtttgaacgaacgttttgaagacgacaatatttttcctactaaagcattctatatcttaaacgatgacatgacgatgacattgatttggaaagatgggagattggtagaatga

SEQ ID NO: 414405 - DNA, 279 bp, Staphylococcus aureus
atgatacaaacaataacacatattatgattattagttcactcattatttttggaattgcattaatcatctgtttatttagattaatcaagggacctacaacagcagatcgtgtcgttacatttgatacaacaagtgctgtcgtaatgtcaatttgtgggtgtgttaagtgtacttatgggcaccgtttctttcttagattcaatcatgctcattgccattatatcttttgtaagttctgtttcaatatcacgctttattggtggggggcatgtgtttaa

SEQ ID NO: 414406 - DNA, 720 bp, Staphylococcus aureus; identical to SEQ ID NO: 410363

SEQ ID NO: 414407 - DNA, 549 bp, Staphylococcus aureus
atggttatcgaaccaaaagggaaaaatatggaatcgagaggaatggtgctctatatcaatcgcaatactagaacaacgaagggtaattttattgtcaccgaaataactgaagatagtaaaggatattcacgtagtaaagaaaaaaaatatcctgtcaagatggaaaataatcgaattattccaacaaagcctataccggatgacaagttaaaaaaagagattgaaaactttaagttctttgtacaatatggaaattttaaagattttaaagattataaaaatggtgatatttcatataatcctaatgtgccaagttattctgcaaagtatcaattgaataatgatgactataatgttcaacagttaagaaaacgatatcatattccaaccaaacaagcgcccgaattaaaattgaaaggatccggcaatttaaaaggctcatccgtaggatctaaggatctagaatttacgtttgtagaaaatcaagaagagaatatctatttttcagattcggtcgaatttacacctagcgaggatgataaatcatga

SEQ ID NO: 414408 - DNA, 501 bp, Staphylococcus aureus; identical to SEQ ID NO: 410812

SEQ ID NO: 414409 - DNA, 243 bp, Staphylococcus aureus
ttgtttaataacaacggtaaaccagtatttatagttattaaagactttgaaaacagaatcattgaagagggtgaacttaaaacctataattcagctggtagcgatttcgatttactagaggttgagcgacaagatttcaaagtatctgatttagcgtcaaacgatgaattgtatattaaacatacacttgtagaccttaaacaacaaattaaattggatttatatttaatgaatgaatattaa

SEQ ID NO: 414410 - DNA, 693 bp, Staphylococcus aureus; identical to SEQ ID NO: 404976

SEQ ID NO: 414411 - DNA, 276 bp, Staphylococcus aureus
atggagcacgtgagtgtggtagtttatggggcagatgttatatgtgcaagttgcgttaatgcgccaacatcgaaagatatttatgactggctacagccgctattaaaaagaaaataccccaacttaacagatcatgatttacaatttattgaaagaatagaacaagatgaactattttatccattaattacaatgaacgatgaatatgtagcagatggttatatacaaacaaagcaaatcactcgatttatagaccaaaagcttgtgaatgaataa

SEQ ID NO: 414412 - DNA, 501 bp, Staphylococcus aureus
atgactttcgaagagaaaataagcaaattatgtaatgagattgcgaatgagattagcagtatgataccggtagagtgggaaaaagtatatacaatggcttatatagatgatggaggaggtgaagtattctttaattatactaaaccaggtagtgatgacttgaattattacaccgatatacctaaggagtataacatttctgtgcaagtatttgatgatttatggatggatttatatgatttgtttgaggaattaagagatttatttaaagaagaaggacttgaaccatggacatcatgtgaatttgactttacaagcgaaggtaaattaaaagtttcatttgattatatagattggataaatacagaatttggtcaagtaggtcgacaaaattactataagtatagaaaatttggaattttaccagaaacggaatatgaaattaataaagttaaagaaatcgagcaatatattaaagagcaagatgaagctgaaccatag

SEQ ID NO: 414413 - DNA, 123 bp, Staphylococcus aureus
atggcgaaacaagcaacaatgaaaaatgcagctttgaaacaattgactaaagatgctgatgaaatcttgcatctgattaaagttcaactagataatttaacagcaaaatcaacttctttttga

SEQ ID NO: 414414 - DNA, 483 bp, Staphylococcus aureus
  misc_feature (462)..(471): n is a, c, g, or t
atgaagaattttagaagtattttacggtatattggtaaaacctcaaagtttattgattatccgttattagttacatatattgtattgagtttaattggattagtgatggtatatagtgcaagtatggttccagcaactaaaggcacattgactggtggtatcgatgttccaggaacgtatttttacaaccgacaattagcatatgtcataatgagttttataattgtattttttattgcatttttaatgaatgttaaattactgagtaatattaaagtgcaaaaaggtatgattataactatcgtctcactattattactgacgttagtaataggtaaagatattaatggttctaaaagttggataaacttaggatttatgaacttacaggcatctgagttattaaaaattgcaatcatattatatatcccatttatgatcagtaaaaaaaggcctagagtnnnnnnnnnnagtattaagtaa

SEQ ID NO: 414415 - DNA, 981 bp, Staphylococcus aureus
  misc_feature (797)..(806): n is a, c, g, or t
atgtttaaaagaactaaactaatcttaatagcaacattactgctatcaggatgttcaactaccaataacgaatctaataaagaaacaaaatcagtgccagaagaaatggaagcttcaaaatatgtaggtcaaggcttccaaccacctgcagaaaaagatgtggttgaatttgcgaaaaagcataaagataaaattgccaaacgaggcgaacaattttttatggataatttcggtctaaaagttaaagctaccaatgttgtaggtagtggaaaaggcgtagaagtattcgtgcattgtgatgaccacgatatcgtatttaatgcgagtattccatttgataaatcaataattgagagtgatagctcattaagaagtgaggacaaaggcgatgatatgagtactttagttggtacagtgttgagtggctttgaatatcgaacacaaaaagaaaagtatgacaatttatataaatttttcaaagataatgaagagaaataccaatatacaggctttacaaaagaagcaataaacaagacgcaaaatgtcggatataaaaatgaatatttttatatcacttactcgtcaagaagcttaaaagaatatcgtaagtattacgaaccattgattcataaaaatgataaagaatttaaagaaggaatggaacaagccagaaaagaagtgaattacgctgctaatacagatacagtaacaacattgtttagtacaaaggaaaattttactaaagacaatacagttgatgatgtaattgaactgagtgataaactatatctgtctcnnnnnnnnnnagacaatacagttgatgatgtaattgaactgagtgataaactatataattttaaaaataagccagaaaaatctacaattacaattcaaataggaaagcctactattaatactaaaaaagccttttatgatgataatgatccaatagaatatggagtgtatcgtaaagatgaataa

SEQ ID NO: 414416 - DNA, 1206 bp, Staphylococcus aureus; identical to SEQ ID NO: 405998

SEQ ID NO: 414417 - DNA, 186 bp, Staphylococcus aureus; identical to SEQ ID NO: 407346

SEQ ID NO: 414418 - DNA, 129 bp, Staphylococcus aureus; identical to SEQ ID NO: 407347

SEQ ID NO: 414419 - DNA, 969 bp, Staphylococcus aureus; identical to SEQ ID NO: 407348

SEQ ID NO: 414420 - DNA, 570 bp, Staphylococcus aureus; identical to SEQ ID NO: 407349

SEQ ID NO: 414421 - DNA, 219 bp, Staphylococcus aureus; identical to SEQ ID NO: 407352

SEQ ID NO: 414422 - DNA, 579 bp, Staphylococcus aureus; identical to SEQ ID NO: 407353

SEQ ID NO: 414423 - DNA, 342 bp, Staphylococcus aureus; identical to SEQ ID NO: 407354

SEQ ID NO: 414424 - DNA, 513 bp, Staphylococcus aureus
atgcaggcacaaattttagatttaatgaaagaactacaacaaaaaatcgatacagcaattatttttataacgcatgatttaggggttgttgcgaatattgctgatagagtggcagttatgtatggtggtcaaatggttgaaacaggagatgttaacgaaatattttatgatccaaagcatccatatacatggggattattatcgtcaatgcctgatttatcaacaacaaatgacacaccattactagcgattcctggagcgccacctgatttattacacccacctaaaggtgatgcatttgcgagacgtagtcaatatgcattagatattgattttaaagtagaaccaccgtggtttaaagtttcaccgacacattttgtgaaatcttggttattagacgcacgtgcaccaaaagttgaactacccgagctggtaaaacaacgtatgaaaccgatgcctaataattatgaaaaaccactcaaggtagaaagggtgtcgttcaatgaaaaatga

SEQ ID NO: 414425 - DNA, 1026 bp, Staphylococcus aureus; identical to SEQ ID NO: 406996

SEQ ID NO: 414426 - DNA, 1125 bp, Staphylococcus aureus; identical to SEQ ID NO: 405599

SEQ ID NO: 414427 - DNA, 786 bp, Staphylococcus aureus
atgatgggttatttaaaaagacttgtattgtatatagttattatggttatgagtgtttttataataggttgtgataaatcaagcgatactgcagaaaaatcaaaagaagactcgaaagaaacacaaatcaaaaagagttttgcgaaaacgttagatatgtattcaattaagaatctcgaggaactatatgacaaagaaggctatcgagatggcgaatttgaaaaaggtgacaaagggatgtggacgatatatacagatttcgccaaaagtaataaaccgggtgaattggatgatgaaggtatggttttaaatctggatagaaatactcgaacggctaagggatattattttgttaagaaattttatgaaaaggataaattacctgatagaaaaaattataaagttgaaatgaaaaataataaaattatcttattagacaaggtagaagatccaaatctaaaaaagagaatagaaaactttaaatttttcggacaatatgcaaattttaaggatttggaaaattacaacaatggcgacgtgtcaataaattggaatgttccaagttatgacgtggaatataaaatgagcaataaagatgaaaatgttaaacaattaagaagtcgttataacattcctactgataaagctccaatgttaaaaatgcatattgacggggacttaaaaggtagttctgttggatataaaaggttagaaatagatttttcaaaagaaggtagggatatttcagtcattgattatttaagttataagccagcgaaaaaatag

SEQ ID NO: 414428 - DNA, 471 bp, Staphylococcus aureus; identical to SEQ ID NO: 406804

SEQ ID NO: 414429 - DNA, 420 bp, Staphylococcus aureus
atgatgacgaataactcaattaattttatttctagtggaaatattagaaaagctatagaaaaaaataattatgataaggttatttcattcataaaaattaacgactcaaattatagacttagtaatgttgatactatgaaagtaacgctttacagtaatggaagtaattatgataaagaggctttactaataaataaagatgagttttgtcctttaaggaaaataactttagataataagcttgattcacaacgggtaatggaaattgattcattggcagcaataataaacttagttaaacaaggaaaaggaaaggctttattacctatgacttttgagaataaaagagatatagtacaggacatttctaagatatttgaagttaactactatacttataatcatattatgcatcattaa

SEQ ID NO: 414430 - DNA, 315 bp, Staphylococcus aureus
ttgtctgacattttaaaatgtatcggttgtggtgcgccacttcaatctgaagataaaaataaacctggttttgtaccagagcataatatgtttcgtgatgacgtgatttgcagacgttgtttccgcttgaaaaattataacgaagttcaagatgtaggattagaaagtgaagactttttaaaattattatcaggacttgcggataaaaagggtattgtcgtcaatgtcgtggatgtatttgactttgaaggatcatttattaatgcagttaaactgtctcttatacacatctccgagcccacgagaccgtactag

SEQ ID NO: 414431 - DNA, 786 bp, Staphylococcus aureus; identical to SEQ ID NO: 406770

SEQ ID NO: 414432 - DNA, 873 bp, Staphylococcus aureus; identical to SEQ ID NO: 405708

SEQ ID NO: 414433 - DNA, 210 bp, Staphylococcus aureus
atgaataataaacaaaaagaagtaatagaacacgtggtttatcaacttgagttaagtatcatgaataattttgaaagttatgaacacacggaatatgttgatggtattgaagtggtttcagagatcagtcgtgaaaagcacttagaattgataatgaaatggtgcgcacaagaattaaagaataattttcaattagagaaaggagaataa

SEQ ID NO: 414434 - DNA, 519 bp, Staphylococcus aureus
atgttgagtaggaagtataaaatagatttaaaagcaattaatcaaaatactgagtctacaagtgctatttcgaaagcgtcatacgaagttgagaatgctaataataatggtctatcaaaaagagacgtgattaatcaatttaatgatttgaaaaaaatgaaaaaattcccttctaatcttgaatatgttgatagttacactgattctcttactggagtaacaacttctgcttttttaaataaagatacaggcaaagtaactctcgggatgactgggactaatttacaagacgaagcctttaaaaagttaaaagaaggtgaattttcaagacaaaatgttaccaatgctttggaaacagttaaagatggatatgcagatcttaaaatattatattctcctgcatctgatcaaaactatagatatgcgaatacacaagaatttataaataaaataaaaagtaagtatgacattgattttattactggacattcactaggtctgtctcttatacacatctga

SEQ ID NO: 414435 - DNA, 216 bp, Staphylococcus aureus
atgttcggaataaaaaatttcatagatactttcgctacgctagaattacataatcaagtttgtagtaatgcaattatccaagcaagatatcacgatttggaccaacttcaaaagcgatataaaagaaacgaaagctattataataatgcattagctatcaaaagattttttatagctttagataaaattattgacttcaacagaccaaaagtataa

SEQ ID NO: 414436 - DNA, 189 bp, Staphylococcus aureus; identical to SEQ ID NO: 410786

SEQ ID NO: 414437 - DNA, 606 bp, Staphylococcus aureus
gtgtataagagacagcctttaaaatataatcctaaagaagcaagagcacactgggacaaagctaaaaaagagttaggtaaaaatgaagtgacattttcaatgaacacagaagatacaccagatgcaaaaatatctgctgaatatatcaaatcgcaagttgagaaaaatttaccaggagttactttgaaaattaagcaattaccgtttaaacaaagagtatcactagaactgagtaacaattttgaagcatcacttagtggttggtctgcagattaccctgatcctatggcttatttagaaacaatgaccacaggtagcgcacaaaataatacagactggggtaataaagaatatgatcaattacttaaagtagcaagaaccaaattggcacttcaaccgaacgaacgatatgaaaacttgaaaaaagcagaagaaatgttcctaggagatgcaccggtagcaccaatttatcaaaaaggtgttgcacatttaacaaatcctcaagtaaaaggattaatttaccataaatttggtccaaataactcacttaaacatgtatatattgataaatcgatagataaagaaacaggtaagaagaaaaaataa

SEQ ID NO: 414438 - DNA, 255 bp, Staphylococcus aureus; identical to SEQ ID NO: 405269

SEQ ID NO: 414439 - DNA, 288 bp, Staphylococcus aureus
atgagtaattttgaggatagtcaagtttatataaattttaaaaacaatgttttaaacgataaatatctaattgtaatagaaacattggacgaaaatagtggcaacattaatcatttgatttctaaagaattaagagataaatatgaatggaaccctagtttactatctaaaattgacaactaccttaaaccagcaatagagattaaagagcataattttagtgataattccttgaatattaacgttacttttaatgcgttatacataattaaaataggaaaaaaataa

SEQ ID NO: 414440 - DNA, 195 bp, Staphylococcus aureus
atggcattgctaaaaattagtagtagcatcaaagatatattttatgatggttcttttaagagagaagatgattctgtagaaactttacgttcgactataaaagcacttgaaattagtggtgaaaatcaaattaaaagtcatatactatacgaagttctaatgatttatcgactgctagacagcagatatgcttaa

SEQ ID NO: 414441 - DNA, 288 bp, Staphylococcus aureus
ttgtttttattcttaatcacacttgcatcacaaaaaacagcaatgatattttcattaggtgtatttttagtactcattgtaccgtttattaaaccttttattacatttatcccaagatacggtgaaaaagttttagatgcttttgattatatcccttttgcttacttaactgataaaatgattagctctaactttgattttagcaattggcaatgggtaatttcattaggttctatagtgatattcttcattttgaatatcttatatgtcgctaaaaaagacatttaa

SEQ ID NO: 414442 - DNA, 348 bp, Staphylococcus aureus
gtgttatatgatcgttatcagttgccactttttattgtggaaaatggttttggtgcagttgatgaagtggtagatggacatattcatgatgattatcgcattgaatatttaaaagcacatattacagcagcgatggaagcagttgatcaagatggtgtagatttaatcggttatacgccatggggaattattgatattgtttcatttacaaccggtgaaatgaagaaacgctatggtttaatatatgttgatcgagataatgatggtcatggcacgatggaacgcttgaaaaaagattcgttctattggtatcaacaagtgatagcatcaaatggagataaattataa

SEQ ID NO: 414443 - DNA, 1446 bp, Staphylococcus aureus
ttgggtatcggtggtgcattaagtaatccaaacaccgttaaagcataccctattttagatattaccttattacaaaatatttttacattaatgtcagctgcaggtagtattgttttccaaaatttaccagtcatctttgcaattggtgtcgcaatcggattatctagaagcgataaaggtactgcaggtttagctgcactgctcggtttcttaattatgaacgcaactatgaatggcttattaactatcacaggcacattggcaaaagatcaacttgcacaaaatggacaaggcatagtgctcggtatacaaacggttgaaaccggtgtttttggcgggattatcacaggtattatgaccgcaatacttcacaacaaatatcacaaagtggtattaccaccgtatttaggtttctttggtggctctagatttgtccctattgttacagcatttgccgcaatctttttaggtgtattgatgtttttcatttggccaagcatacaagccggcatttatcatgttggtggatttgtaacgaaaacaggtgccatcggtacttttgtttatggcttcatcttaagattgttaggtccactcggtttacatcatattttttacttaccgttttggcagacggcacttggtggtactttagaagtcaaagggcacttagttcaaggtacgcagaacatcttctttgctcaacttggtgatccagatgtgacgaagtattattcaggtgtgtcgcgctttatgtcaggccgttttattacgatgatgttcggcttatgtggtgccgcacttgcaatttatcacacggctaaacctgaacataaaaaagttgtcggcggtttaatgttatccgctgcactcacttcatttttaacaggtattaccgaacctttagagtttagtttcttgtttgtcgcacctattctttatgtaatccatgccttctttgatggattagcatttatgatggcagacattttcaacattacaattggtcaaaccttcagtggaggctttatcgatttcttactttttggtgtgctacaaggtaatagtaaaacaaactacctatatgtcatacctattggaattgtgtggttctgtttgtattacatcgttttcagattcttaattacgaaatttaatttcaaaacacctggtcgtgaagataaagttgcagcacaacaagttgaggctactgaaagagcacaaactattgttgctggtttgggaggcgaagataacattgaaatcgttgactgttgtgcaacgagactacgcgtcacacttcatcaaaatgacaaagtcgataaagtattactcgaaagtactggtgccaaaggtgtaatccagcaaggcactggtgtgcaagtaatttatgggcctcacgttacagttatcaaaaatgaaattgaagaattgctcggggattaa

SEQ ID NO: 414444 - DNA, 123 bp, Staphylococcus aureus
atgggggattttttttatgtttgggatatagaaaagggacagaaaagggcaaaaaaggatgatgtgaatgttttgtgttcggaatttgcacaaagatatgtttatattgcaaaaataatatga

SEQ ID NO: 414445 - DNA, 909 bp, Staphylococcus aureus
atgacaaagacaaaagcaattgatattataggtgcaccatcaacatttggacaaagaaaattaggtgttgatttaggaccaacagcaattagatatgctggattaatttcaagattaaagcaattagaccttgatgtatatgacaagggggatattaaggtacctgctgtgaacattgaaaaatttcatagtgaacaaaaaggattaagaaattatgatgaaattatagatgttaatcaaaaattaaataaagaggtttcagcatcaattgaaaataacagatttcctctagttcttggtggtgatcattctattgcggtaggttcagtatcagcaataagtaaacattataataatttaggtgttatttggtatgatgcacatggtgatttaaatatacctgaagagtcaccaagtggaaatattcatggtatgcctctaaggattttgacaggcgaaggtcccaaagaacttttagaattaaatagtaatgtaatcaagccagaaaacatcgtactaattggtatgagagatttagataaaggtgaaagacaatttatcaaagatcataatattaaaacatttactatgtcagatattgataaattagggataaaggaagtaattgaaaatacaatagaatatttgaagtcacgcaatgttgatggcgttcatttatctttagatgttgatgctttagatccgcttgaaacgccaggcactggtactagagttttgggtggtcttagttatagagaaagccattttgcattggaattactgcatcaatcacatttaatttcctcaatggatttagttgaagtaaatccattgattgacagtaataatcatactgctgaacaagcggtttcattagttggaacattttttggtgaaactttattataa

SEQ ID NO: 414446 - DNA, 168 bp, Staphylococcus aureus
gtggctatgacaaatgaagagaaagtattagctattagagagaagttaaatattgttaatcaaggattattagatcctgaaaaatataaaaatgcaaatgaagaagaattaacagatatatatatgattttgttcaatcaagagaaagattgtcgccaagtgaagtga

SEQ ID NO: 414447 - DNA, 900 bp, Staphylococcus aureus
atgggcagaaaaccaaaattaaactacgaagaacaaattaaaaagttaaaatcactaggtattttatttaacgaaataaatgaaaacaaagctaaagagatactgaaaaacaacacatacttttttaaattatcttctttcagaaaaaacatacgtaaagataatagtggaaattataactttgaattttctgcactatctgatttagcaaccttagatatgagattacgctacatgttattacctatgtgtttagacattgaacactcacttaaaacagacattcttgaaaaaataactaatgacgattcagaggatggttatcaaattatgaaagattttattaacaatcatcaaggagatttagacaaaattttttctactgttataaaaagagataacactgttatgcctagttttcaaaaatactatgaagatccaccagtgtgggtgtgtttagaattaatgtctttcggacaattttctgcatttgtggaattctattcagatagaaccaatgacgccgaattaagaaaggcaggtaagtttattaaattcactaaaaatattagaaataagtgtgctcatagtcagcccatattactaaatttaactcctagatataaattgaaaacggaaagcgaactaaaaagacttggtcaaaaacaaggtttatcagaagttagtttaaaagttttaccaattatagatatactttcattatttatattacattctaaatattgcagtgaaggtattaaaaataatagaaaaaacgatttaattgcctttaaaaaacgtaaagatagaaaatataaacattacagaaatgtaccatccttatcttattttttcctatccctcaacaaaatgattgactattacaccaagagcaattaa

SEQ ID NO: 414448 - DNA, 696 bp, Staphylococcus aureus
atgaaatttggagatatattaaaggaatatagaaaacaattaaagttatctgtaaatcaactttctaaactatcaaacgtatcagtaggctatattagtaaacttgaaaataataaaaggaaattcccgactactagaacattgtttttattattactaggatttaaaaactcaaaaataaatgatcaatctaaatcaatacaagatgtagacaatgaaatcaaatatattttaaatgagtttataaatgctgaagatagcgaaataaatagtgaagatctggaaaatttatacaaagatttcaatactttctatgaagatttgcataaaaaagttggaaataaagatgaaagaaatagaaaaaagaatatatttgtatatgaggatgataagaaaaagaaacactctgttaatttagaaagacctataaatgatatagcttttcaccttaaagataatgcaaatcaaaaattttataacggtgtaatgttaaatgaatatgataaaaatatgataaatgaaatcattaattcgtttttagttactaaattatcgcaagaacaagtagatttaaacgaagatattgaacagctacaaaaagattttaatgatttcagaaaagaatctatgttaaataaaaaacaattaaaaatgtttgctattcacaacaacatccaatcacttaaagataaataa

SEQ ID NO: 414449 - DNA, 213 bp, Staphylococcus aureus
atgaaaaataatttaagtatgattatggggcgaaaaaggattacagctacaaaattgagtgaagataccggtgtttctagaactacaattcatgagttgtatcacgaaaaacaaattaatccaagttttagtactgtttcgaaattgtgtaaatcccttgatgtaactttgaacgaattttttggaatcaatgaaaaagagggggtcaaataa

SEQ ID NO: 414450 - DNA, 492 bp, Staphylococcus aureus
atgacatttgaagagaagcttagcaaaatatacaatgaaattgcgaatgagattagcagtatgataccggtagagtgggaaaaagtatatacaatggcttatatagatgatggaggaggtgaagtattctttaattatactaaaccaggtagtgatgacttgaattattacaccaatatacctaaggagtataacatttctgtgcaagtatttgatgatttatggatggatttatatgatttatttgaggagttaagagatttatttaaagaagaagatttagaaccatggacatcatgcgaatttgattttacaagagaaggtgaattaaaagtttcatttgattatattgattggataaattcagaatttggtcaaataggtcgacaaaattactataagtatagaaaatttggaattttaccagaaacggaatatgaaattaataaagttaaagaaatcgagcaatatattaaagagctagaagaataa

SEQ ID NO: 414451 - DNA, 957 bp, Staphylococcus aureus; identical to SEQ ID NO: 405478

SEQ ID NO: 414452 - DNA, 222 bp, Staphylococcus aureus; identical to SEQ ID NO: 407439

SEQ ID NO: 414453 - DNA, 654 bp, Staphylococcus aureus; identical to SEQ ID NO: 407818

SEQ ID NO: 414454 - DNA, 396 bp, Staphylococcus aureus
gtgattcagattcaacgagtgattcagattcaacgagtgattcagattcaacgagtgattcagattcaacgagtgattcagattcaacgagtgattcagattcaacgagtgattcagattcaacgagtgattcagattcaacgagcgattcagattcagcgagcgattcagattcagcgagtgattcagattcaacgagtgattcagattcaacgagtgattcagattcaacgagtgattcagattcaacgagtgattcagattcaacgagtgattcagattcaacgagtgattcagattcaacgagtgattcagattcagcgagtgattcagattcagcgagtgattcagattcaacgagtgattcagattcaacgagtgattcagattcagtga

SEQ ID NO: 414455 - DNA, 300 bp, Staphylococcus aureus
atgcaatcaatggttaaagttattgatgactaccatatacctataatcacaattactagtacaagggataatcccgtagcacaggcatcaaatattgttttaacttatgggaaaacggatgaaaatgagatgcatatgggagcaacaacttcattatttgctcaaatgttcactattgatattttatattatcgttatgttgcattaaattatcacgcatcattagattacataacacaatctaaaatggctttagacaactatcgtaaacatttatcaaatattaactttaaacattaa

SEQ ID NO: 414456 - DNA, 723 bp, Staphylococcus aureus
gtgttcgggagaaagcgagcaagcgaagagttacgtctcaaagaatccacagtaagagactacataaagcttttagaaaaccttggaactatcgtcgtaaagtccgacaacaaattttctgttataaccgttgtcaattgggcgatttatcaaagtatggaagaaaattccgacagcaaaaacgacaacaaatcaacaacaaatcaacaacaaatggacaacaaatggacaacaaatcaacaacaaatcaacacaaacaagaatgtaaagaatggggataatgtaaagaatggtgagaatgagaagaagaaggtaaccgccttcgacttcttccaagataacggattcggtttcataactccttacaatttagacgatttaaattattatcttgattcatttgaaaatgattcagatcaaatagttaccgcatcacttaaaatcgctaaagacagaaataaagttacttggggatatgctaaaagcattttgaatacatggcttaatgcaaacttgaaatctattgaacaagtacgtgcatttgaaaagcaacaacttgaaagcaaaaaacaaaattataaacctttcgttaaacaatcaaaagaaaaaacacccaaatggctcacagacagcacgagagaaacgaaaacgccggaagtagatgaaaaccttgagaaagacagagaagcttttattaagcgtctaaatagcaaatgggagtga

SEQ ID NO: 414457 - DNA, 351 bp, Staphylococcus aureus
atgagtaataaagttcaacgttttatagaagcagaaagggagttaagtcagttaaagcactggttaaaaacaacacataagatttcaattgaagaatttgtagtactttttaaagtgtatgaagctgaaaagattagcggtaaagaattgagggatacattacattttgaaatgctatgggatacaagtaaaatcgatgtgattatccgtaaaatctataaaaaagagcttatttctaaattgcgttctgaaacggatgaaagacaagtattctatttctatagtacttctcaaaagaaattgttagataaaattactaaagaaatagaagtgttaagcgttacaaactaa

SEQ ID NO: 414458 - DNA, 483 bp, Staphylococcus aureus
atgattcaacgtagtgaacctggcaaacgtgcaagacaatacttcatccaagttgaaaaagcatggaatagcccagaaatgattatgcaacgtgctttaaaaattgctaacaacacaatcaatcaattagaaacaaagattgaacgtgataaaccaaaaattgtatttgcagatgcagtagctactactaagacatcaattttagttggagagttagcaaagatcattaaacaaaacggtataaacatcgggcaacgcagattgtttgagtggttacgtcaaaacggattccttattaaacgcaagggtgtggattataacatgcctacacagtattcaatggaacgtgagttattcgaaattaaagaaacatcaatcacacattcggacggtcacacatcaattagtaagacgccaaaagtaacaggcaaaggacaacaatactttgttaataagtttttaggagaaaaacaaacatcttaa

SEQ ID NO: 414459 - DNA, 762 bp, Staphylococcus aureus
atggcttatatttcattaaactatcattcaccaacaattggtatgcatcaaaatttgacagtcattttaccggaagatcaaagcttctttaataacgatacaactgctaaaccattaaaaactttaatgttgttacatggattatcaagtgatgaaacgacatatatgagatatacaagcatagaaaggtatgcgaatgaacacaaattagctgtgattatgcccaatgtggatcatagcgcatatgctaacatggcatatggtcatagctattatgattatattttggaagtgtatgattatgttcatcaaatatttccactttccaaaaagcgtgatgacaattttatagcaggtcactctatgggaggatatggcacaattaaatttgcattaacacaaggggataaatttgccaaagctgtaccattatctgctgtgtttgaagcgcaaaatttaatggatctagagtggaatgatttttcaaaagaggccataattggcaatctttcaagtgttaaaggaactgaacatgatccgtattacttgctagacaaagctgtagctgaagataaacaaattccaaaattgctcattatgtgtggtaaacaagactttttatatcaagacaacttagattttatcgattatttatcacgcaaaaatgttccttatcaatttgaagatggaccaggagatcatgattatgcatattgggaccaagcgattaagcgtgctataacatggatggtgaatgattaa

SEQ ID NO: 414460 - DNA, 1425 bp, Staphylococcus aureus
atgttatcagttaaaaaagccacaaaatttgcagttgctaaccttattatcgtgtcaacagtttttagttctgtcacacctgcaattgcgcaatccgataaaagttctaaagatgaaagtttcgcggttggtaatactaaaaatccaaaaaatgttatctttttagttggcgatggcatgggtccatcatttaacacagcttatcgttattataaaaatgatccgcatgctaaagaaatgacccctactgcttttgattcatatttaaaaggtacaaatcgtacatattcaaatgacccaaaacagaatattactgattctgcagctggcggaacagcctttagttctggccataagacatataatggtgccatcggtgttgacagtaacaagcagaaagtaaagacggtgcttgaacgtgcaaaagaaaaagggaagtcgactggccttgtttcaacagctgaattaacagatgcaacaccagcagcatatgctgcacacgtgacttctagagatgataaaaacgaaatcgctaaacaattttataaagataaaatcaacggaaagcataaagttgatgttttattaggcggcggcgctaaatatttcggtaaaagtaatggcaatttagataaaaaattcaaaaaagatggttacgaccttgccacgaacagtaaggagttatcaaaatctgataaagataaagttcttggtttgtttgcagataaaaatatgccacttgcaatagatgcttctaaagacgaaccatcattagctgatatgcaacaaagtgcacttagtaagcttgagcgtaataaaaaaggattctttttaatggtcgaaggtgcttctatagataaatcagcgcattccaacgatattacaggcgttatgtctgaaatggaaggttttgaaaaagcattcgatgacgccattcaatatgctaagaaacataaagatacacttgtcgttgcaacagcagatcactctactggtggtctaacaattggtaaagataaaggatacgaatggaatcctcaaccgattaaatctatgaaacactctggatcatatatgacagaaaaaatggctaaaggtgaagaccctgaaaaagttattaatgaaggttatggatttgaattttcacaagatgatatgaaaaaggttaaaaaagagaataaaaagctaaaaagactacttaaaaaagaaaaagacgaaaaatccgcagaagtagaaacgcaaacaaaagccctacaacacgctattcagaagccagtaaatgataaatcttatacagggtggacttccgatggacatacaggcgaggatgttaatacctacgcttacggacctagatcagaatcatttagtggtaatatcgaaaatacagaaagcgcaaaaataatatttgatatattcaagtaa

SEQ ID NO: 414461 - DNA, 201 bp, Staphylococcus aureus
atgatactagtaatgttatctccattattaatcatattctttatagtgttgtctattttagaggagcgtaaacgtacgaagaaaaagcaactcgagaaagaaaaagcaaatacactaaatcaaaatacaaatgacacggaaagttcaaatcaagagccgtcattgcagcaggctaaagaacaaaaagataacaaaggataa

SEQ ID NO: 414462 - DNA, 1449 bp, Staphylococcus aureus; identical to SEQ ID NO: 407484

SEQ ID NO: 414463 - DNA, 318 bp, Staphylococcus aureus
ttgttgacataccaagatgaattagtacaattgttaaataaatatgtggaaatttcaaatcaagttaaatttcaagatattttaaaaagtaaaactgattatgaaaatcttttgattaaaaatttagaagaagatacaaaaattttggaaaatgcttacattaaatttatgtttaataggttttataaatattctgcaatttttgaagtagatcaagatgtattttctgaaagatttaaacaattaaaggataagttagaagaaactcaaaaaggaactgtttttttgatgaagaaattgaaaatcaaagcattttaa

SEQ ID NO: 414464 - DNA, 501 bp, Staphylococcus aureus; identical to SEQ ID NO: 408793

SEQ ID NO: 414465 - DNA, 501 bp, Staphylococcus aureus; identical to SEQ ID NO: 407664

SEQ ID NO: 414466 - DNA, 672 bp, Staphylococcus aureus
atgacgaatgtcttgtatcaacacggcacattaggaacgttaatggctggcttactagaaggaacagctacaattaatgaattgttagaacatgggaatttagggattgcaacgttaacagggtctgatggcgaagtaatatttttagacgggaaggcatatcatgctaacgagcataaacaatttatagaattaaaaggcgatgagaaagtaccgtatgcatcgattactaattttaaagcgagtaagacattttcattgcaacaattatcacaagatgatgtattcgcacaaattaaaaatgaaatgttaagtgagaatttattttcggctgttaaaatttatggcacatttaaatatatgcatgtacgtatgattgattcagcacgcagacaacctgaagaaaaaagacaagatattcgtggtgccattgttggatttttcacaccagaattatttcatggcgtagggtctgctggttttcatatacattttgcggatgatgaaagagcttatggtggacatgttcttgactttgaagtggatgacgttgtcgttgagatacaaaactttgaaacattccaacaacatttcccggtaaataacgagacatttgttaaagcgaaaatagactataaagatgtggcagaagaaattagagaagctgaatag

SEQ ID NO: 414467 - DNA, 348 bp, Staphylococcus aureus; identical to SEQ ID NO: 410388

SEQ ID NO: 414468 - DNA, 147 bp, Staphylococcus aureus
atgaaaatgtacttaacttatatttgcttagtttcattgttaacaatactattactagcaatatctaacatgtatgtcgcttttagcgtttatgcttggctaataactttaggatgtaatttaacaggaggattagaaaatgaataa

SEQ ID NO: 414469 - DNA, 147 bp, Staphylococcus aureus
atggtacatagcacattccaaggaatggaaatgatttctaaattagattcaagaacacaagtgatggcgaacgacaagattacactagcatttgatatgaataagtgtcacttttttgatgaaaaaacaggaaatcgtatcgtctaa

SEQ ID NO: 414470 - DNA, 261 bp, Staphylococcus aureus
ttgatagatgaagtcctagaaacatttaaaatcaaacgttcattaagtaccaaaggttgtccttatgataacgcagttgcggaagcaacgatgaaagcaatgaaaaccgaatttgtaaaacaaatgcaatttgaaaacttagaacagttagaaacagaattatttgattatgtaaattggtacaacaattttagaccacattcttcattacagtatttgacgccagtggcatttaaaaatctacacatgaaaactgtctaa

SEQ ID NO: 414471 - DNA, 282 bp, Staphylococcus aureus; identical to SEQ ID NO: 407821

SEQ ID NO: 414472 - DNA, 501 bp, Staphylococcus aureus; identical to SEQ ID NO: 413048

SEQ ID NO: 414473 - DNA, 612 bp, Staphylococcus aureus; identical to SEQ ID NO: 413979

SEQ ID NO: 414474 - DNA, 879 bp, Staphylococcus aureus
atgaaaaaaattgttattatcgctgttttagcgattttattagtagtaataagtgcttgtggtaataaagaaaaagaggcacaacatcaatttactaagcaatttaaagatgttgagcaaaaacaaaaagaattacaacatgtcatggataatatacatttgaaagaaattgatcatctaagtaaaactgatacaaccgataaaaatagtaaagaatttaaggcactacaagaagatgttaaaaaccatctcatacctaaatttgaagcatattataagtcagcaaaaaatttgcctgatgatacaatgaaagttaagaaattaaaaaaagaatatatgacgcttgcaaatgagaagaaggatgcgatatatcaattaaaaaaattcataggtttatgtaatcaatctatcaagtataacgaagacattttagattatacgaaacaatttgaaaaaaatagatacaaagttgaatcagaaattaaattagctgataataaaagtgaagcaactaatcttacgacaaaattagaacataataataaagcgttaagagatactgcgaagaagaacctagatgatagtaaagaaaacgaagtaaaaggcgcgattaaaaatcacattatgccaatgattgaaaaacaaattaccgatattaaccaaactaatattagtgataagcatgttaataatgcaaggaaaaacgcaatagaaatgtattacagtctgcagaactattataatacacgtattgaaacaataaaggttagtgagaagttatcaaaagtcgatgtagataagttgccgaaaaagggtatagatataactcacggcgataaagcctttgaaaaaaagcttgaaaaattagaagaaaaataa

SEQ ID NO: 414475 - DNA, 621 bp, Staphylococcus aureus
gtgaatcatgagacaccatctcatgaaaatcatgttacttcgaaaatattaagacctgctgaagtagcaaaatatttaattattacgtttttagtattgattgcaaactcagtgacattcgtctttataaatccacttattttatctaatggtcatgatatgtcattcgtttcattagcacttctagtaaatggaatcgctggcgttattggaacatcattaggtggtatattctccgataaaattacaagtaagcgttggttaatgatttctgtttctatttttatcgtcatgatgttacttatgaatttaatcttacctggttcaggtctattgttagcaggactatttatttggaatatcatgcaatggagtactaatccagcagtgcaaagcggtgtgattcaacatgttgaaggcgacacaagtcaagtaatgagttggaacatgtctagtttaaacgctggtattggtgttggaggcattattggaggcttggtcatgacacatgtttctgttcaagctatcacgtatacgagtgccatcattggtgcattaggattaatcgttgttttcacattgaaaaataatcattatgctaaaacatttaaatcatcataa

SEQ ID NO: 414476 - DNA, 558 bp, Staphylococcus aureus; identical to SEQ ID NO: 409124

SEQ ID NO: 414477 - DNA, 141 bp, Staphylococcus aureus
atgattaacattatttcagctataggatctattggaacatttattatggctttattttattttgtatcagtttcagttcaactttatcaaatgaaaattagctttctgccagctttaggttttaaccaaattttattataa

SEQ ID NO: 414478 - DNA, 462 bp, Staphylococcus aureus
atgggaaaatacgaagacttattgataaagtatgatgatttatcaataaaagaaaaagatgatatgcctagttttttatcaggtttatacttagacggagaaatacatatcaacaacagaaaatgcaataaaaacaaattagaaacactagcagaagaattagcgcatcacaaaatcacatacggaaatattataaatcccaacagtataatgaatcgcaagtatgaactaaaagctagacgtttagcaaatgaaatgttgatatccctcaacgatatagtggaagcatttaaaaatggagtacacaatttgtatgaactggctgaatactttgaagtaacacaagaatttgtattaaaaacaatcgaacattacaaacaaaaacatggattaaacacaaaatgcggggactatgttattaaattcgaaccgttgagtgtttttgaatataaagaaatatga

SEQ ID NO: 414479 - DNA, 315 bp, Staphylococcus aureus
atgttcagtcagaacttaaaatatttaagaaaaaaacatgatatggaacaaatagacctcgcgcataagttaggaagaaaaagtgcgtcaagtgtaagcgaatgggaaaaaggaaaatacactcctaaaatgacaacacttaaagaaatttcagaaatattcaacgtaagtattaacgatatgatgacaaaagatttgagtaatcctgaagaaatagaaacagttgcagcgcacctagattacacagatttaacagatgaagaattggaagaagttcaaagatatatcgattttgtaaaaagcagaaagaaataa

SEQ ID NO: 414480 - DNA, 246 bp, Staphylococcus aureus
ttgacaacaacagaaaaagaaaaactgaaattgactatcggtcaatggcgagctttgaaaggtatgagtaaagctgaattatcaaggaaatcaggggttaccgaaaagacgatttacaattacgaatctagccaagaatatatcaaaaattctaattttaagacattgaataaattagctataggtttaggcataactgtagataatatttttttgggtagtgattcggaaaaaccgaaattttaa

SEQ ID NO: 414481 - DNA, 126 bp, Staphylococcus aureus
atgacgttcaccttatcagatgaacaatataaaaatctttgtactaactttattttagaggagatgaaaatgatgagaattaaaactgcaagcatagaggtcgaaaaagtggaggtagtagtatga

SEQ ID NO: 414482 - DNA, 249 bp, Staphylococcus aureus
atggataaccgtgaacaaatagaacaatcagtgatcagtgctagtgcgtataacggcaatgacacagagggattgctaaaagagattgaggacgtgtataagaaagcgcaagcgtttgatgaaatacttgagggaatgacaaatgctattcaacattcagttgaagaaggtattgaacttgatgaagcagtaggaattatagcaggtcaagttgtctataaatatgaggaggagcaggaaaatgactaa

SEQ ID NO: 414483 - DNA, 423 bp, Staphylococcus aureus
atgccttataattacaagaaacaaaatggagagttaatgtctgtaatgagccaaggtgaaaagtttattcatcaatcacccgttaatgatgaacttagtgcattgattaagttattaatttcaaaaattaacggttgtcattattgtgttgatatccataaaaaagaattaaaggaattgggtgtaacacaaatgaaaattgatgaagtcttgagttttagacatttagatttatttactgatcaagaaaaagtgacgcttgaatttgcagaaatgttaaattcaatcaaagactttaagaagtttgaaattattgaccggctaaaatcattttatgatgaagaacaaattattgatcttgtctttgttgtaaaccaaattaacggttggaacagactaaatattattagtgataaactataa

SEQ ID NO: 414484 - DNA, 366 bp, Staphylococcus aureus; identical to SEQ ID NO: 412537

SEQ ID NO: 414485 - DNA, 456 bp, Staphylococcus aureus; identical to SEQ ID NO: 414101

SEQ ID NO: 414486 - DNA, 579 bp, Staphylococcus aureus
atgtcaatcatgcgactatttacattcattttaagtatttttatcgtaggaatggttgaaatgatggttgcaggaattatgaacttgatgagtcaggacttacatgtatcagaagctgtcgttggtcaattagtgacaatgtacgctttaacatttgcgatatgtggacctattctggttaaattaacgaaccgtttttcatcaaggcctgtattattatggacattacttatatttatcattggtaatggcattattgctgtagcgccaaatttttcaatattagtagttggtagaattatctcatctgcagcagcagcactaattatcgtaaaagtattagctattacagcgatgttatcagcacctaaaaatcgtggcaaaatgattggacttgtctatacagggtttagtggggccaatgtttttggtgtaccaattggaacggttatcggcgatttagtaggttggcgctatacatttctattcttaattattgtgagtattattgttggcttcttgatgattgatctatttaccgaaggatcaggaaatacaacgaggccctgtgaatcatga

SEQ ID NO: 414487 - DNA, 621 bp, Staphylococcus aureus; identical to SEQ ID NO: 414475

SEQ ID NO: 414488 - DNA, 396 bp, Staphylococcus aureus; identical to SEQ ID NO: 413143

SEQ ID NO: 414489 - DNA, 864 bp, Staphylococcus aureus
atgacaatgatggatatgaattttaaatattgtcataaaatcatgaagaaacattcaaaaagcttttcttacgcttttgacttgttaccagaagatcaaagaaaagcggtttgggcaatttatgctgtgtgtcgtaaaattgatgacagtatagatgtttatggcgatattcaatttttaaatcaaataaaagaagatatacaatctattgaaaaatacccatatgaatatcatcactttcaaagtgatcgtagaatcatgatggcccttcagcatgttgcacaacataaaaatatcgcctttcaatctttctataatctcattgatactgtatataaagatcaacattttacaatgtttgaaacggacgctgaattattcggatactgttatggtgttgctggtacagtaggtgaagtattgacgccgattttaagtgatcatgaaacgcatcagacttacgatgtcgcaagaaggcttggtgaatcgttgcaattgattaatatattaagagatgtcggtgaagattttgaaaatgaacggatatattttagtaagcaacgattaaagcaatatgaagttgatattgctgaagtgtaccaaaatggtgttaataatcattatattgacttatgggaatattatgcagctatcgcagaaaaagattttcgagatgttatggatcaaatcaaagtatttagtattgaagcacaaccaatcatagaattagcagcacgtatatatattgaaatactggacgaagtgagacaggctaactatacattacatgaacgtgtttttgtggagaagaggaaaaaagcaaagttgtttcatgaaataaatagtaaatatcatagaatatag

SEQ ID NO: 414490 - DNA, 393 bp, Staphylococcus aureus
ttgaaatttgatattccattacctggacgtaagaaaacagaagaagaggttaagttattctctaaacaagactataaaaataaaaaaggtgataacgttgaccctaaacgtgcttcaactggtaatgaatacgaagacaaagctgcgtattacctagacggtttaggcggcaaagaaaatatcaaagatgttactaactgtacaacaagattacgcttaactgtttatgatgaaagtaaagttgaggatacggaatatttcacgcatcaacaaatggcacacggattagtaaagagtggtaagagtatccaagttgtagtaggtatgacagtaccacaagttcgtgaagcatttgaacaaatggttgaggatcaatcgtccgaagataaataa

SEQ ID NO: 414491 - DNA, 492 bp, Staphylococcus aureus
atgactttcgaagaaaaactaaatgaaatgtacaacgagattgcgaatgagattagtgggatgataccagtagagtgggaaaaagtatatacgatagcctatgtaaatgatagaggtggagaggtcatttttaattatactaaaccaggtagcgatgaattgaattattacacgaatatatctagagattataatgtttcggaagaaatatttgatgatttatggatgaatctttattacttgtttaagaatttaaggaatttatttaaaacagaagaacatgaaccatggacatcatgcgaatttgactttacaagagacggaaaattgaatgtatcttttgattatatagattggatcaatacagagtttgatcaattgggccgtgaaaattattatatgtataaaaaatttggggttataccagaaatggaatacgaaatggaagaaattaaagaaatcgagcaatatattaaaagccaagaaagttaa

SEQ ID NO: 414492 - DNA, 672 bp, Staphylococcus aureus
atgagcaatatgaatcaaacaattatggatgcatttcatttcagacatgctactaagcaattcgatccacaaaagaaagtttcgaaagaagattttgaaacaatattagagtcaggtagattgtctccaagttctcttgggttagaaccttggaagtttgtcgtgattcaagatcaagcgttacgtgatgaattaaaagcgcacagttggggcgcagcgaaacaattagatacagcgagccattttgtgctaatttttgcgcgtaaaaatgtaacgtcaagatcaccgtatgtacaacatatgttaagagatattaaaaaatatgaggcacaaacgattccagctgttgaacaaaaattcgatgcattccaagcagatttccatatttctgataatgatcaagccttgtatgactggtcaagtaaacaaacgtatatcgcattaggcaatatgatgacgacagccgcattgttaggtattgattcatgtccgatggaaggttttagtctggatacagtgacagacattttagcaaataaaggtatcttagatactgagcaatttggtttatcagtgatggttgcatttggctacagacaacaagatccaccgaaaaataaaacacgccaagcatatgaagatgttattgaatgggttggaccaaaagaataa

SEQ ID NO: 414493 - DNA, 1251 bp, Staphylococcus aureus
atgaagcgattaagtacaacattgaaagtacgattaattagtaattttttacaattgattattacgacagcgtttatcccatttatagcattatatttaactgatatgttaaatcaatctatcgttggtatatatcttgttgtcttagtgattttgaagtttccgttatctattatttctggctatattatcgaaatatttccaaaaaaggctctcgtgctgatttatcagttgacgatggttgttatgttagtgttaatgggcatatttagctctaaccagctatggcaaatcatctgcttttgcattgcatacgctatattcactatcgtttggggcttgcaatttccagttatggatacattaattatggatgcaataacggaagatgttgaacattacatttacaaaatgagttattggattacgaacttatcggttgctatcggagctttgttaggtggattaatctatggtcatagtatgttgatacttttcttagtcgcggcatgtatttttttaattgtactggtgattttatatatttggttgccagaagaccaaaatcaatcagtacgaactgttgctaatgcgcaaacgcctttttatcaacaatttcatattttgaaagtgttgcgtagttataaatcagttttaaaagatcgaaactatatgttaatgatttcaggattcagtattttaatgatgggtgaattctcaacatcttcgtatattgcaattagattaaaagatcaatttgagaccatcagcataggtccttatgatattacaggggcaaagatgttagcaattttactcatgaccaatactgttggtgtcattgtactcacgtattttatttcaaaagttgtattaaaaatagattttaaaatagctttagtgttcagtttactattttatattgtcggttatagtggaatcacgtatctcaatcaatttagcttgctcatcttattcatgatgattgctactataggtgaaatcgtttattcgcctatatttgaagagcaacgctttaaaattattccagaagataaaagagggacatatagtgcttttcatgcattaggtattcatatgtcggaaacattagcgaggttagggattgtcttgggtgtgttcttaacctccttacaaatggggttgtgtatgtttatcttgttagtaatgggtgctttgttacttgttataggtgtatttagaggacgaaagaaagtaagcatagattga

SEQ ID NO: 414494 - DNA, 870 bp, Staphylococcus aureus
gtgctcattgaactacttacagacattgatttactgtctgatgcagctaatgatccacttgtactcatagaatcgcttatcatttcagacgtgctcattgagtctgatgtgcttgttgagacactttgtgaccccgctacacttaatgatccagatactgaatcacttgtgctcgttgaatcgcttaatgattctgatgtactcatcgatttagaatcacttgtacttaatgatattgatgtactttgtgattccgatttgcttgttgatgcactcactgaattcgaaatgctattagaaatacttatagattctgatgtactacctgactcacttaatgattctgatgtactaattgaatttgatgtactatcacttaccgattgtgatgtactagccgaatcggatgtacttgttgataagctttgtgacttagacaagcttcctgatgtactcatacttactgaatcacttaacgatgttgatgtacgcaatgaatcagatgtacttgttgagacactctctgatttttcagtactgctagagttcgaaatagaatcgcttaatgatgttgatttactaactgaacctgacatgcttgatgatacactttgtgaattcactaaacttgtgcttgttgagcttgatacactattactttcagatgtgcttaatgacttagatgcactcacagaatcagataggcttacacttgttgatttcgaggtactagctgatgttgaagtcattattgaaccagatgtgctcgtagaagcactttgtgagtcagctttacttgttgtgattgttgggtacttcccgatgttgatacggaatcactcatactatttcttgttacttcatatttaa

SEQ ID NO: 414495 - DNA, 2391 bp, Staphylococcus aureus; identical to SEQ ID NO: 409701

SEQ ID NO: 414496 - DNA, 351 bp, Staphylococcus aureus
atgaaatttacagcattagcaaaagcaacattagctttaggaattttaacaactgggactttaacaacagaggctcattccagtcatgcaaaacaaaatcaagagtcagtaaacaaacatgacaaggaagcattataccgatactatactggaaagactatggaattgaaaaacattaatgctttgaagcatggtaaaaataacttgcgttttaagtatagaggtatgaagattcaagtattgctgcttggaaatgataaaaatagatttcagcagcgtagttataagggcttagatgtgtttttttgttcaagaaaaaagagacaaacacgacatattttatactgttag

SEQ ID NO: 414497 - DNA, 774 bp, Staphylococcus aureus
atgaaaccgttattcaacgaaaaaataaacgaaagtttaaaaaaatatcaaccaatcgaagtaatactaagacagaattgcgataaatgcgggcatcaatatgacttatataagtttgaaaatggatatgaatacaaagacggttgcgaatgtgaaattcaaagattggcttacgaagaatacaaaaggaataaacaaaagaaacttgattatattttcaatcaatcaaatgttaatccgtcattaagagatgcaacggttaacaactataagccacaaaatgaaaaacaagtaaaagctaaacaaacagcaatagagtatgtacagggtttctctacaaaagaaccaaaatcattaatattgcaaggttcatatggaactggtaaaagccacctagcatacgctatcgcaaaagcagtcaaatctaaagggcatacagttgcttttatgcatataccaatgttaatggatcgtatcaaagcgacatacaacaaaaacgcagaagaaactacagacgagctagtcagattgctaagtgatattgatttacttgtactagatgatatgggtgtagaaaacacagaacacactttaaataaacttttcagcattgttgataacagagtaggtaaaaacaatatctttacaacaaactttagtgataaagaactaaatcaaaatatgaactggcaacgtatcaattcaagaatgaaacacaatgcaagaaaagtaagagtaatcggagacgatttcagggagcgagatgcatggtaa

SEQ ID NO: 414498 - DNA, 165 bp, Staphylococcus aureus
atgtctttagaaaaccaactagccgaacttaaatatgattatgttcgtcttcaaggtgacttagaaaaacgggaatctttgaatttagatacttccgcacttgttcgtcaacttaaagatattgaaaatgaaattagaaacgttcgtgctcaaatgcaagattaa

SEQ ID NO: 414499 - DNA, 645 bp, Staphylococcus aureus
atgactatgtcaataccaattaatttacctacaaacagtactatgattaatgaattatgtacattacaaagtagaaccatcaatataaaaggagaggttttaataactgaaatatatgatgattacttttttaaaaatgatgagtggcacattacagcttttaacaaattcaagcaatttcaagatagtatcaagaactatagagacaaaagaaaaaatgttttctttaggattaaaagtaaaaatttgaatttagaatttaaatacctttttttgaaactgatagttaaagaggattggtccttatctaatttatttaatactggagcagtaaagcttaataagattgctaagttctttaatgaagtttatccaaatttaaattctttacttgattgtgatataaatacattagaaaagcactggtttaattggctgactgaaaataatataccaataaaaagaagatcatcaacaatagtttttggtgattatgaatacaaaagcggactggcttcttttttaaagaatatgtacattaatctaattaagttcattgataagcgagaagaatgggaaaaagataaatgggatattagaaatttagaaaaatatggattgagtcaattaaaatgcgagaattag

SEQ ID NO: 414500 - DNA, 132 bp, Staphylococcus aureus
atgaaaaagaaatatattttaataatagttagtgtaattttaataggtatgatagttattgcatatgcacataataaacaaaaaaaagaccattacattgaaatgaaatgctcccttcaaagtagacattga

SEQ ID NO: 414501 - DNA, 195 bp, Staphylococcus aureus; identical to SEQ ID NO: 409742

SEQ ID NO: 414502 - DNA, 816 bp, Staphylococcus aureus
atggctttacgttgggggattagtgttggtattgcatcagctgttttaacagttgttatcattttgatttccgaagtgattcccaagtctgtcgctgcaacatttccagataaaataacaaggcttgtatatccaattattaatatttgtgtaattgtgttccgtcctatcacattacttttaaataagttgacggacagtattaatcgaagtttatctaagggtcaacctcaagaacatcaattttcaaaagaagaatttaaaacaatgttagcaattgctggacatgaaggtgctttaaatgaaattgagacgagtaggttggaaggtgtcattaattttgaaaatttaaaagtaaaagatgtagatacaacacctagaattaatgtgacggcatttgcttcaaatgcgacatacgaagaagtttatgaaacggttatgaataagccatacactagatatccagtgtacgagggagatattgataacattattggggtgtttcattctaaatatctgttggcttggagtaataaaaaagaaaatcaaattacaaactattcagctaagccattatttgtgaatgaacacaataaagctgaatgggtattacgtaagatgactatttctagaaaacatttagcaattgtgttggacgaatttggtggtactgaagcgatagtgtcacatgaagacttaattgaagaattattaggtatggaaattgaagatgagatggataaaaaggaaaaagaaaaactttctcaacagcaaattcaatttcgacaacggaaaaatcgcaacgtatctatataa

SEQ ID NO: 414503 - DNA, 996 bp, Staphylococcus aureus
atgcaatataatactactagaagtataaccgaaaatcaagataataaaacgttaaaagatatgacgaaaagtgggaaacaacgcccatggagagaaaagaaaatagataatgtaagctatgcagatatactagaaattttaaaaatcaaaaaggcttttaatgtaaaacaatgtggtaatattttagaatttaagccaactgatgaaggttatttgaagttacataagacatggttttgtaaatcaaaattatgtccggtttgtaattggagacgtgctatgaaaaatagttatcaagctcaaaaagtgattgaagaagtaattaaggaaaagccaaaagcacgttggttgtttttaacactttcaacaaaaaatgcgatagatggagatactttagaacaaagtttgaagcatctaactaaagcatttgataggttgagtagatataaaaaggttaaacaaaatcttgttggatttatgcgttcaacagaagttaccgttaataaaaatgacggtagttataatcaacatatgcacgttttgttatgtgttgaaaatgcatattttagaaaaaaagagaattatataactcaagaagaatgggttaatttatggcaaagagcattgcaagttgattatcgacctgttgctaatattaaagcgatcaaaccaaataaaaaaggcgataaagatattgaatctgcaatcaaagagacctcaaaatattcggttaaatcatctgattttttaactgatgatgatgaaaaaaatcaagaaattgtaagtgatttagaaaaaggtttgtatcgaaagcgtatgttaagttatggtggattgctgaaacaaaagcataaaattttaaacttagacgatgctgaagatggaaatttgattaatacaagtgatgaagataaaacaacagatgaagaagaaaaggcacattcgattacggcaatttggaattttgaaaagcaaaattattatttaaggcattag

SEQ ID NO: 414504 - DNA, 348 bp, Staphylococcus aureus; identical to SEQ ID NO: 407392

SEQ ID NO: 414505 - DNA, 288 bp, Staphylococcus aureus
gtgacgcaatacttagtcacaacattcaaagattcaacaggatgcaagcatacgcacataactcgtgctaagagcaaccaaaggtttacagttgttgaggcagagagtaaagaagaagcgaaagagaagtatgaggcgcgtaacaaaccagttgatggagcgaccaacttaaacgatatcaaatcaaacattggtttctttcacgttgaaaaagtcgaaccaaacgagggtatggtagatattaacattgagacaatgaaactattcgaggaggcagacgatgattaa

SEQ ID NO: 414506 - DNA, 243 bp, Staphylococcus aureus
atgacagataacgcacgcaaagaatacctaaatcaattctttggatctaagagatatctgtatcaggataacgaacgagtggcacatattcatgtagtaaacggcacttattactttcatgggcatatcgtaccaggttggcaaggcgtgaaaaagacatttgatacagcagaagagctcgaaacatatataaagcaacatggtttggaatacgaggagcagaagcaactaactttattttag

SEQ ID NO: 414507 - DNA, 249 bp, Staphylococcus aureus
atgcctaaaaccgatagcacatgtaaagaatacttaaaccaatttttcggatctaagagatatctgtatcaggatagcgagcgagtggcacatatccatgtagtaaacggcacttattactttcatgggcatatcgtgccaggttggcaaggcgtgaaaaagacatttgatacagctgaagagctcgaaatatatataaagcaacatggtttggaatacgaggagcagaagcaactaactttattttag

SEQ ID NO: 414508 - DNA, 402 bp, Staphylococcus aureus
atgaaaatcaaagtaaaaaaagaaatgatattagatgaattaattaagtgggctcgaagtaatccggagttatcaaagggcaaaaatttttttacaacaggtaacggcgatgacatcgttcgttttcaaaaggacacaaatgagtgtacgacatcagtctgtgtgccacttgatgctcctttcgtagtcgaagttgaaaaagaagtaaccgaagatacggtgtttgatagattgtttgagatgtacaatcctcgagaaggaattcatgtctttgcatcacacactaatgtcagcatatacaaacgcttaagtgacgggttttttcctgttaaagcattctatatcttaaacgacgacttaactatgacattaatatggaaagatggggagttgattaaataa

SEQ ID NO: 414509 - DNA, 384 bp, Staphylococcus aureus
atgatttcacacttgataacggatacttcgaagaagaaacatcagatagtgactcagactcagacagtgactcagactcagagagcgattcagattcagacagtgactcggactcagatagtgactcagactcagacagcgactcagattcagacagtgactcagattcagacagtgactcagattcagacagcgattcagattcagatagtgactcagactcagatagcgactcagattcagacagtgactcagactcagatagcgattcagactcagacagtgactcagattcagacagcgattcagattcagacagtgattcagacgcagacagcgattcagactcggatgcaggaaaacatacacctgttaaaccaatga

SEQ ID NO: 414510 - DNA, 618 bp, Staphylococcus aureus; identical to SEQ ID NO: 407393

SEQ ID NO: 414511 - DNA, 843 bp, Staphylococcus aureus
atgacacaggaaatagcaaaatataatgttcacacaaaagcacacaaacgaaaattgattaaaagatggcttattgcaattgttgtcttagctattatcatctgggcatttgcaggtgtaccaagtttagaacttaaaagtaaatcattagaaatcttaaaatccatattcagcggattattccatcctgacatcagctatatctatataccagatggcgaagacttattacgtggtttacttgaaacctttgcgatagccgttgtaggtactttcatcgccgcaattatctgtattccattagcatttctaggtgcaaataatatggtaaaactacgcccggtttcaggtgttagcaaatttattttaagtgttatacgtgtcttcccagaaattgtaatggcacttatatttatcaaagctgttggcccaggttcattttcaggtgtattagctttaggtatccattccgtaggtatgcttgggaaacttttagctgaagatattgaaggtctagatttcagtgctgtagaatcattaaaggccagtggtgcgaataagattaaaacactcgtatttgcagtcataccacaaattatgcctgcctttctatcactcatactttatcgctttgaactaaacttacgttcagcttctatactggggctaatttggggctggtggtatcgggacaccactcatatttgccattcaaacacgttcttgggaccgtgtaggtattatattaatcggtttagtactaatggtcgcaattgtcgatttaatttccggttcaatccgaaaacgtattgtttaacattaaatcaggatactcctaaataa

SEQ ID NO: 414512 - DNA, 318 bp, Staphylococcus aureus
ttgctttgcgacgttgaagtggttaataagaatcctaaatatagaattattaaatataatgatgaatatttgatgatcgatttagtaagtacctggctaactttatttcttcctatgatgaattggttaatccctaaaaaatacgtgaagattaataaagaagaatttgaaaatttaaacattgttaaacctactaaaaatagagctttttggccagctgcaggcggctcagttttatttggagttacattcaggaaatatactcaatttcttaatattcaattagaaaaaacttggttattaccatatgttgcatga

SEQ ID NO: 414513 - DNA, 600 bp, Staphylococcus aureus
atggcagtaaacgttcgagattatatagcagagaattatggtttatttatcaatggggaatttgttaaaggtagcagtgacgagacaatcgaagtgactaatccagcaactggagaaacactatcacatattacaagagcaaaagataaagatgtcgatcatgcagtcaaagtggcgcaagaggcatttgaatcatggtcattaacttctaaatcagaacgtgcacaaatgttgcgtgatattggtgataaattaatggcacaaaaagataaaattgcaatgattgaaacattaaataatggtaaaccgattcgtgagacaacagcaattgatattccatttgctgcaagacatttccattatttcgcaagtgttattgaaacagaagaaggtacagtgaatgatatcgataaagacacaatgagtatcgtacgacatgagccgattggcgtcgtaggtgctgttgttgcttggaacttcccaatgctattagctgcatggaagattgcgccagccattgctgcaggtaatacaattgtgattcaaccttcgtcttcaacaccattaagtttattggaagttgctaaaattttccaatag

SEQ ID NO: 414514 - DNA, 471 bp, Staphylococcus aureus
atgtctcgtaaaggatcagtacctaaaagagacgtattaccagatccaattcataactctaagttagtaactaaattaattaacaaaattatgttagatggtaaacgtggaacagcacaaagaattctttattcagcattcgacctagttgaacaacgcagtggtcgtgatgcattagaagtattcgaagaagcaatcaacaacattatgccagtattagaagttaaagctcgtcgtgtaggtggttctaactatcaagtaccagtagaagttcgtccagagcgtcgtactactttaggtttacgttggttagttaactatgcacgtcttcgtggtgaaaaaacgatggaagatcgtttagctaacgaaattttagatgcagcaaataatacaggtggtgccgttaagaaacgtgaggacactcacaaaatggctgaagcaaacaaagcatttgctcactaccgttggtaa

SEQ ID NO: 414515 - DNA, 237 bp, Staphylococcus aureus; identical to SEQ ID NO: 414235

SEQ ID NO: 414516 - DNA, 2421 bp, Staphylococcus aureus; identical to SEQ ID NO: 409142

SEQ ID NO: 414517 - DNA, 381 bp, Staphylococcus aureus; identical to SEQ ID NO: 408523

SEQ ID NO: 414518 - DNA, 828 bp, Staphylococcus aureus; identical to SEQ ID NO: 414067

SEQ ID NO: 414519 - DNA, 336 bp, Staphylococcus aureus
atggtaaatgtgactggagttgatagtaaaggaaatgaattgctatcccctcattatgtcgagtttcctattaaacctgggactacacttacaaaagaaaaaattgaatactatgtcgaatgggcattagatgcgacagcatataaagagtttagagtagttgaattagatccaagcgcaaagatcgaagtcacttattatgataagaataagaaaaaagaagaaacgaagtctttccctataacagaaaaaggttttgttgtcccagatttatcagagcatattaaaaaccctggattcaacttaattacaaaggttgttatagaaaagaaataa

SEQ ID NO: 414520 - DNA, 822 bp, Staphylococcus aureus
atgaaaaaattatttggtcttattttagtattaacatttgcagttgtattagcagcttgcggtaatggaaacaaaagtggcagtgacgataagaaaataacagtaggtgcttcaccagcaccacatgctgaaattttagaaaaagcaaaaccattattagagaaaaaaggttatgacctagatattaaaacaattaacgattacactacgcctaataaattactagataaaggtgaaattgacgcaaactatttccaacatacaccatatttaaacacagagaaaaaggataaaggttacaaaatcgtaagtgccggtgatgttcacttagaacctatggctgtatactctaaaaagtataaaagtttaaaagaattaccaaaaggtgcgacagtttatgtgtctaataatccagctgaacaaggacgcttcttaaaattcttcgttgatgcaggtttaattaagatcaaaaaaggcgtaaaaattgaagatgctaagtttagtgatattacagagaataaaaaagatattaagtttaataataaacaatcagcagaattcttacctaaaatttatcaaaatgaagacgctgatgctgttatcattaattcaaactttgcaatcgaacaaaaactaaatcctaaaaaagattctattgctgtagaaagtgcgaaagataatccttatgcaaacttaattgctgttaaagaaggacatcaagatgataagaaaatcaaagcattaattgaagtattacaatctaaagatattcaagacttcattaatgaaaaatacaacggtgcagttattcctgctaaataa

SEQ ID NO: 414521 - DNA, 696 bp, Staphylococcus aureus
atgggtaaatcatttagtgaaattataaatgaaatgattacaatgcctaatattcagtggccagaagtttggactgcaatagtcgaaacactatacatgacagtcgtctcaactatatttgcatttatactcggtcttattttaggtgtgttattattcttgtctgctaaaggtaagtctatcggtgcaaggttattttattctatcgtttctttcattgttaacttatttagagcgataccatttattattttaattttattattaattccatttacaagtttgatacttggaacgataagtggtccgacaggtgcgttaccagccttgattattggcgcagcaccgttttatgcaaggctcgtagaaattgcttttaaagaaattgataaaggtgtcatcgaagcggcctggtcaatgggtgccaatacttggatagtaattcgtaaagtcctcttacctgaagccatgccagcgctagtgtctggcattacagttacagcaatcgctttagttggttcaacagcagttgcaggtgtaattggtgccggtggtttaggaaatttagcatacttaacaggtttcactcgaaatcaaaatgatgtcattttagtatcaactgtttttattttaattattgtatttataatccaattcattggggattggcttacaaataaacttgataaacgataa

SEQ ID NO: 414522 - DNA, 1026 bp, Staphylococcus aureus
gtgattgaattaaaagaagttgttaaagaatatcggactaaaaataaagaagtccttgctgtagatcacgttaatttatcgattcgagcaggatcgatttatggcgtcattggtttttctggagcaggaaaaagtactttgattcgaatgtttaatcatttagaagcgcctacatcaggtgaagttattatagatggagaccatataggtcaattgtccaaaaatggattaagagcaaaaagacaaaaagtaagtatgatcttccaacattttaatttgttatggtcaaggactgtgttaaaaaatattatgtttccgcttgaaattgcaggtgtccctagaaggagagctaagcaaaaagcattagaacttgtcgaactcgtcggtttaaaaggtagagaaaaggcttatccatcagagttatcaggtggacaaaagcaacgtgttgggattgcacgagcgttagctaatgatccaacggtcttgctttgtgatgaggcaacaagtgcacttgatccgcaaacaacagatgaaattttagatctactactaaaaattagagaacaacaaaatttaacaattgtactaattacgcatgaaatgcatgtcattcgtcgtatttgtgatgaagttgcagttatggaaagtggtaaagtgatagaacatggaccggtgacacaggtttttgaaaatccgcaacacactgtgacaaaacgatttgtgaaagaagatttaaatgatgatttcgaaacatctttaacagaattagagccattagaaaaagatgcttatatcgttagattagttttcgctggttcaacaacaaccgagcctattgtatcgagtctatcaactgcctatgatattaaaattaatattttagaagcaaatattaaaaatacaaaaaatggaacagtcggctttttagttctgcatattccatatatttcaagtgtagatttcggaaaattcgaaaaagagttaattgagcgacaagttaaaatggaggtgttaagacatgggtaa

SEQ ID NO: 414523 - DNA, 900 bp, Staphylococcus aureus; identical to SEQ ID NO: 406993

SEQ ID NO: 414524 - DNA, 405 bp, Staphylococcus aureus; identical to SEQ ID NO: 414404

SEQ ID NO: 414525 - DNA, 366 bp, Staphylococcus aureus
atgaactatgaaacagggttccaactaagcgtaatggacgctaggttgaagaagatgagaaaacaacgtgatgagtacaagaagcaacgtgacgagcttattggggatatagctaagttaagagagcgtaacgaagagttggagatcatgtggcgcacagtcaaaaacgaattgcttggaagatacgaattttaccgttttagacttaacgaactacagattgagagtagagcgaacaaggcagtagctataaacatgggagctaaaatcaacgcaagtgctatattgtaccgaatggacaaattagacggaacaaatgagttctacgaatttttaggtcaaatggaggaagacactaatgaataa

SEQ ID NO: 414526 - DNA, 315 bp, Staphylococcus aureus
atgcttactgaaaatatcaataatgaatttgagattgctgaatttaagttattcaataccttagttaacggcgaattagaagaaacatgttccacaacggttaacggcgtcgaatacgacagcggtttaaataacgcctcaagaattaatgttggcttagatatcatcaatacactgtcaaaacattttaaagttacagcgccaatatttattgataatgctgaatcagtaacagagcttatcaaaacagaatcacaacaaattcaattgatagtaaatgaacaagataaaaaattaagaatggagactatataa

SEQ ID NO: 414527 - DNA, 315 bp, Staphylococcus aureus
atgcttactgaaaacatcaataacgaatttgatattgctgaatttaagctattcaataccttagttaacggcgaattagaagaaacatgttcaacaacggttaatggtgtcgagtatgacagcggtttaaataacgcctcaagaattaatgttggcttagatatcatcaacacactatcaaaacattttaaagttacagcgccaatatttattgataatgctgaatcagtaacagagcttatcaaaacagaatcacaacaaattcaattgatagtaaatgaacaagataaaaaattaagaatggagactatataa

SEQ ID NO: 414528 - DNA, 219 bp, Staphylococcus aureus; identical to SEQ ID NO: 410529

SEQ ID NO: 414529 - DNA, 192 bp, Staphylococcus aureus
atgagaaaagagattgaagcgcttattttctcagacgtaagtagctatgatatttacgtgaacactgatgtaaatcaaggattaattggtgacattaaagatggttaccttactattgattctatgccttacattgatgctgagcgtttgtatcactttgctatggaacgtaaatcgttagtcactaactag

SEQ ID NO: 414530 - DNA, 378 bp, Staphylococcus aureus
atgacatacggtggtttgactgtagcaattggacaaggtattgctaaagctggagcaattttcccattattctctccagtattaggttggattggtgtgtttatgactggttcagttgtaaataacaatactttattcgcacctattcaagcgacagtggcacaacaaatttcaacaagcggttcattacttgtggcagctaacactgcaggtggtgtagcagcgaaacttatttcaccacaatcaattgccattgcgactgcagctgttaaaaaagttggtgaagaatcagcattattaaaaatgacgctaaaatacagtattatatttgttgcctttatttgtatttggacgtttatattaacgttaatattctaa

SEQ ID NO: 414531 - DNA, 1167 bp, Staphylococcus aureus
atgacactacttactgtaaatccattcgataatgtcggattatcagccttagttgcagcagtacctattattttatttttattatgcttaaccgtttttaaaatgaaaggcatttatgcagcattgacaactttggttgttacattgattgtggctttatttgtatttgaattaccagcgcgtgtatcagcaggtgcgattacagaaggcgttgttgccggtatttttccaataggatatatcgttttaatggcagtttggttatataaagtttctattaaaacaggacaattttctattattcaagatagtattgctagtatttcagaggaccaaagaatccaactattattaattggattttgtttcaacgcatttttagaaggtgcagcaggatttggtgtgccaattgcgatttgtgcagtattattaattcaacttggatttgaaccattaaaagcagcgatgttatgtttaattgctaatggtgcggcgggtgcctttggtgcaattggtttaccagttagtattattgatacgtttaacttaagtggaggcgttacaacattagatgttgcgagatactcagcattaacacttccaattttaaactttattattccatttgttttagtattcattgtagatggtatgaaaggtattaaagaaattttacctgtcattttaacagtgagtggtacatatactggattacaattattattaacaatattccatggtccagaactagcagacattattccatcactagcaacaatggtggtgttagcatttgtttgtcgtaaatttaaaccgaaaaacattttcagattggaagcgtctgaacataaaattcaaaaacgaacgcctaaagaaattgtctttgcttggagtccgttcgtaattttaactgcctttgtattagtatggagtgcaccattcttcaaaaaattattccaacctggaggtgcgcttgaaagtttagtattaaaaatgccaattccgaatactgtgagtgatttatcgcctaaaggaattgcgttgcgtctcgatttaattggtgcaacagggacagcgattttattaacagtaatcattacaattataattacgaagttaaaatggaaaagtgcaggtgctttattggtcgaagcaattaaagaataa

SEQ ID NO: 414532 - DNA, 1317 bp, Staphylococcus aureus
atggaagttacattttttggaacgagtgcaggtttgcctacaaaagatacaaacaaaattgacgcgtttatggaacatgtcttctatcatagacatgatgttagtaatgaagaaagctatcaagaattactagattttagtaatgaattagatagccaatttgaattaaaaggtaatcgactattctatttagcaatggcaccacaattctttggcgttatttctgattatctaaaatcttctggtcttactgatacaaaagggtttaaacgccttgttatcgaaaaaccattcggtagtgatttaaaatcagccgaagcattaaacaatcaaattcgtaaatcatttaaagaagaagaaatttatcgtattgaccactatttaggaaaagacatggttcaaaatatcgaggtattacgttttgcgaatgcgatgtttgaaccattatggaataacaaatatatttcaaacatccaagttacatcttctgaaatactaggtgttgaagatcgtggtggttattatgaatcaagtggtgcgctaaaagatatggtgcaaaaccacatgttacaaatggttgcattattggctatggaagcacctattagtttaaatagtgaagatatccgtgctgagaaagtaaaagtacttaaatcactgcgtcatttccaatctgaagatgttaaaaagaactttgttcgtggtcaatatggcgaaggctatatcgatggtaaacaagttaaagcataccgtgatgaagatcgcgttgcagatgactctaacacacctacatttgtttcaggtaaattaacaattgataactttagatgggcaggcgtaccattctatatccgtactggtaaacgtatgaaatctaaaacaattcaagttgtcgttgaatttaaagaagtaccaatgaacttatactatgaaactgataaactgttagattcaaacctattagtaatcaatattcaacctaatgaaggtgtatctttacatctaaatgctaagaaaaatacacaaggtatcgaaactgaacctgttcaattgtcttattcaatgagcgctcaagataaaatgaatactgtagatgcatatgaaaatctattattcgattgtcttaaaggtgatgccactaactttacgcactgggaagaattaaaatcaacatggaaatttgttgatgcaattcaagatgaatggaatatggttgatccagaattccctaactatgaatcaggtactaatggtccattagaaagtgatttactacttgctcgtgatggtaaccattggtgggacgatattcaataa

SEQ ID NO: 414533 - DNA, 432 bp, Staphylococcus aureus; identical to SEQ ID NO: 407983

SEQ ID NO: 414534 - DNA, 282 bp, Staphylococcus aureus
gtgacatatcatgagcgtgttttagcattaagagcagaaagtaaaagaaccgcatttgattttcgattcgaagatttatttagcaaagaagaatggctaagtatgtcgcttgcagaaagacaaaaagctgaaaaagcatttcgacacgaagttaaaaatatggacgatgtaagaatgcccttctcaagtgtccatgacgcccaagtaaaattatataatgttgtatattcttataacggcattaaacgtaattttaaacaagttgaaaatgaaggattctaa

SEQ ID NO: 414535 - DNA, 192 bp, Staphylococcus aureus; identical to SEQ ID NO: 414529

SEQ ID NO: 414536 - DNA, 795 bp, Staphylococcus aureus; identical to SEQ ID NO: 407868

SEQ ID NO: 414537 - DNA, 654 bp, Staphylococcus aureus
atgattccaactgctagagatttaaaattacctgaacatcatagctatattattagttataacggtagtaaaacgattaacatgactaatgaagaagtagaagtaagtaaatcgattggtaagcaagatttcgatgaaattgtagattattgtcgagatagaggctttttcgttcttacatatcatgatggtcaaattatttacgacagcgaacatgagtatatgaatattgaagcagaattaacaggtttaccgatgaaacgtgttgatgatatcaaagcgtatattcaaggcgatgtacccaaggtcatgggtgtagattatgtagcgaatattacagaagctagaattgatttgaatggtgtgttcaatgataatgtagatgctacgacaagtaagccattcttcttagaatttatggccaaagacgtttcaaaaggtaatgcaattaaagcgttatgtcacaaattgggatattcggtggatcaagtcattgcttttggtgatagtatgaatgataaatcaatgtttgaagtcgcaggtctagctattgctatggggaatgcatcagatgaacttaagcaatatgcaaatgaagttacgttggatcataatgaaaatggtattccacatgcgctcaaaaaattgttataa

SEQ ID NO: 414538 - DNA, 618 bp, Staphylococcus aureus; identical to SEQ ID NO: 407393

SEQ ID NO: 414539 - DNA, 348 bp, Staphylococcus aureus; identical to SEQ ID NO: 407392

SEQ ID NO: 414540 - DNA, 618 bp, Staphylococcus aureus; identical to SEQ ID NO: 406081

SEQ ID NO: 414541 - DNA, 1659 bp, Staphylococcus aureus
atgtcagactataaattgtcaccaattgtcaaatgggctggtggaaaaacacaattattagatgcgattaatgcactcgtaccaaacgattttgctatctatcatgaaccgtttttaggtggaggtgcaacattattatccaatcaacctaaaaacgctataattaacgatcttaattatgaattaatgacaacatacaatgttatcaaacatgacattacacctttaattaaagaacttaaagatatgataaaacagcacaacactaataatgctaaagatttttatatgacagtaagagagcaagaaatactcaatttaaatgatatagaaatagccgcaagattcttataccttaacaaaactggttttaatggtttatatagagtaaatagccaaggtaaatttaatgtaccttttaataaaaaagacatgataaaaaactctactgtattttctgaaacaaacttaagaaatttaaataaatattttaacgaaaacaacatcataatattaaacgaagactttaacgaagctttaaaaaaagttaaagaaaatgattttgtctttatcgatagcccgtatgacgaagcatacactagttatcaaaaaggtgggtttcatgaaaaagagcataaagaactagcggaaaggttaattgaattagataaaaaaggcgttaaatggattgtgacaaatcataatactaagttaatacaatttttgtataaccaatttgacttttatgaaattccagtaaacagattcattaattccgacgctcaaaagagaagcaacgcaactaatgaagtcttaatattaaattacaaaccaaccaagagacaactaaaagaatttgaaagagcaaagttttataaacaattaaaacctacttcttttgtactcaaagaatatgtaaaatgggaaaaattgcaagaaaatgtaagagagtatgaattacaattaaatgatttaaatgtattaatggcaagtgacgaatttgaattcaaagaaaaattcgaacgtctttattcacaaagagccgaatcgtttgatattttaccgctgttcatatcatcccgtaataaacaaattgaatattggtcaagtgatggagaggctaaaaaatatggttttgataaaaaagaaactgttttcgattttctagtcgaaagcggtttaagagaaaacttgtttatgaataatagatataaaaatgtcttagactatatattaggtctcgaagttggattgagtagtaatgataaaaagaattacactggaacatggatgatgaatcaaatagcaaatttacttaaagaaaacgatatcacattcagaaaagaagtgccttacaaggaaataatcgatgcgaatagaattaaagataaaacttttgactttgtttttaataaagacgatgttacttattgcttggaagttaacttttttaatacgtctggtagcaaaataaattccgaagcagaaagatttatagaattgaataaagaattgcaaaattatgaagatatagagtttatatgggtgactgacggaataggactcaaaaaaaatcaaacttctataaataaagctatgaaatctattagaaatttatataaccttacaacattcgatgaatttctaaaagaattataa

SEQ ID NO: 414542 - DNA, 816 bp, Staphylococcus aureus
atgacacaggaaatagcaaaatataatgttcacacaaaagcacacaaacgaaaattgattaaaagatggcttattgcaattgtcgtcttagctattatcatctgggcatttgcaggtgtaccaagtttagaacttaaaagtaaatcattagaaatcttaaaatccatattcagcggattattccatcctgacatcagctatatctatataccagatggcgaagacttattacgtggtttacttgaaacctttgcgatagccgttgtaggtactttcatcgccgcaattatctgtattccattagcatttttaggtgcaaataatatggtaaagttacgcccggtttcaggtgttagcaaatttattttaagtgttatacgtgtcttcccagaaattgtaatggcacttatatttatcaaagctgttggcccaggttcattttcaggtgtattagctttaggtatccattctgtaggtatgcttgggaaacttttagctgaagatattgaaggtctagatttcagtgctgtagaatcattaaaggccagtggtgcgaataagattaaaacactcgtatttgcagtcataccacaaattatgcctgcctttctatcactcatactttatcgctttgaactaaacttacgttcagcttctatactggggctaattggggctggtggtatcgggacaccactcatatttgccattcaaacacgttcttgggaccgtgtaggtattatattaatcggtttagtactaatggtcgcaattgtcgatttaatttccggttcaatccgaaaacgtattgtttaa

SEQ ID NO: 414543 - DNA, 960 bp, Staphylococcus aureus; identical to SEQ ID NO: 409297

SEQ ID NO: 414544 - DNA, 810 bp, Staphylococcus aureus
atgagagaaaattttaaattacgtaaaatgaaagtcggtttagtatcagttgcaattactatgttatatatcatgacaaacggacaagctgaagcatctgaaactaatcagaaggtaagtacaaatcaagaatcaaaagctgtttcgcagactgaacaaaattccaaagaaacaaaagcggcagagtcttctaaaaactttgtaaatttagatcctatcaaaccaggagctcaaaaagtaacaggtactacattaccgaatcatattattttacttaatatagatggtaaaagtgctgattcagttgaaggaggatatggtgattttataactgcaaatgacaaaggagagtttgagtatcctttaaataatcgtaaaattgtccataaccaagaaattgaggtatcatcatcaagccctgatttaggtgacgatgaagaggatgaagaagtagaagaatcttcaactgaaaaagctggtgctgaggaagaaagtacagatgctaaagctacatatacaacaccacgatatgaaaaagcgtatgaaataccgaaagaacaactaaaagaaaaagatggacaccaccaagttttcatcgaaccaattactgaaggttcaggtattattaaaggtcatacgtctgtaaaaggtaaagttgctctatctattaataataaatttattaattttgaagaaagagctaaaggtggaattagtaaagaagatactaaagctagttccgatggtgtttggatgcctattaatgaaaaaggatattttgattttgatttcaaaaaaaaatccttttga

SEQ ID NO: 414545 - DNA, 861 bp, Staphylococcus aureus
atgtctaaaattttaaaatgtatcacgttagccgtggtaatgttattaatcgtaactgcatgtggccctaatcgttcgaaagaagatattgataaagcattgaataaagataattctaaagacaagcctaaccaacttacgatgtgggtggatggcgacaagcaaatggcgttttataaaaaaattacggatcaatatactaaaaaaactggcatcaaagtaaagcttgtaaatattggtcaaaatgatcaactagaaaatatttcgctagacgctcctgcaggaaaaggtccagatatctttttcttagcacatgataatactggaagtgcctatctacaaggcttagctgctgaaatcaaattatcaaaagatgagttgaaaggtttcaataagcaagcacttaaagcgatgaattatgacaataagcaactagcattgccagctatcgttgaaacaaccgcacttttttataataaaaaattagtgaaaaatgcaccgcaaacgttagaagaagttgaagctaatgctgccaaactaactgatagtaaaaagaaacaatacggtatgttatttgatgctaaaaatttctattttaattatccgtttttattcggcaatgatgattatattttcaagaaaaatggcagtgaatatgatattcatcagctaggactaaattcaaaacatgtcgtcaagaatgctgaacgattacaaaaatggtacgacaaagggtatcttcctaaggcagcaacacatgatgtcatgattggtctttttaaagaaggaaaagtaggacaatttgtcactggaccgtggaacattaatgaatatcaagaaacgtttggtaaagatttatga

SEQ ID NO: 414546 - DNA, 888 bp, Staphylococcus aureus; identical to SEQ ID NO: 404781

SEQ ID NO: 414547 - DNA, 999 bp, Staphylococcus aureus
atgaaaaatttaagaaatagaaactttttaactttgttagacttcacacaaaaagaaatggaatttttacttaatttatctgaagatcttaaacgcgcaaaatatgcaggaatagaacaacaaaaaatgaaaggtaaaaatatcgctctactttttgaaaaagattcaacacgcactcgatgtgcatttgaaacagcggcttatgatcaaggtgcacatgtaacataccttgggccaacaggttctcaaatgggtaaaaaagagtctaccaaagatactgctcgtgttttaggtggaatgtatgatggcatagaatatcgtggattctcacaaagagtagttgaggatttggcaaaatattctggcgttcccgtatggaatggtttaacagatgaagatcatcctacacaagtacttgctgattttttaacagctaaagaagtattgaaaaaaccatataatgaaattaacttcacatatgttggagatggacgtaataacgttgcaaatgccttaatgcaaggagcagcaatcatgggcatgactttccatcttgtatgtcctaaagaactaaatccaactgatgaattattaaatcgttgtaatgatatagctgacaaaaacggtggtgaaatccttataactgacgatattgatgaaggtgtcaaaggatctgatgtaatttacacagatgtttgggtatctatgggtgaacctgatgaagtttgggaaaaacgtatcaaattattagaaccataccgtgtaactaaagaattaatgaaaaaaacaggtaatccacatacaatttttgaacattgcttaccatcattccatgatactgaaacaataatcggtaaacaaattcaagaaaaatatggtctaactgaaatggaagtaacaaatgaagtatttgaaagtgaacaatcagttgttttccaagaagcagaaaatagagcacatacaataaaagcagtcatggtagcaacattaggagagtaa

SEQ ID NO: 414548 - DNA, 930 bp, Staphylococcus aureus
atgtctaaaatcgtcgtagctttgggtggtaacgctttaggacaatcgcctaaagaacaattagatttattaaaaagtacatctaaatctctagtaagtttaatcgataaaggatacgaaattgtaattagtcatggtaatggtccacaagttggaagtattaacttaggtttaaattatgcggcggaacacaaacaaggtcctccttttcctttccctgaatgtggtgctatgagtcaagcttatattggctatcagatgcaagaaagtttacaaaacgaacttcattcaatgggcatagataaagaagttgttacgctagtaacacaagttcaagttgcaagcgatgattctgctttcaataaccctactaaaccaattggattattttatacaaaagagcaggctgataaatttacgaaagaaaaaggttatacttttgtagaagattctggacgcggctatcgtcgcgttgtcccttccccacaacctataagtatagttgagttagatagtatagaaacattaatcactcatggaacactagttatcgctgccggcggtggtggaattccagtaattaaggaaaatgaagtttatacaggtgttgatgcagttattgataaagataaaacgagtgctttattagcagcacatttacaatctgatcaattaatcatattaactgctgtggaccatgtttacattaactatggaaaagaaaaccaaagaggtctcgatgaagtgtctgtggatgaaatgaaaaaacatatctctgatggtcaatttgctaaaggaagtatgctcccaaaagttgaagctgcacttcaatttcttgaaaaaaatactaaaggcagtgttttgattacatctctagcaggattaggggacgctttagacggtaaaataggaacattaattaagaattga

SEQ ID NO: 414549 - DNA, 243 bp, Staphylococcus aureus
atgttaaatatagaagttagtattaaggatactcaagatattataaattattttattgaatgtgacgttaatgataactattatgaaagtgagcaaagaagcagtctcggaaagttagctttagaattggacaaagtaagtaatcagttaaacaatgaaaatattgaagatatgaaaaagataattgaaaaagtagcagaagcaaatagagttatcgctaaatcttctttaagaaaaaattga

SEQ ID NO: 414550 - DNA, 561 bp, Staphylococcus aureus
ttgaaagataaaatactaggtgtcgcaaaggaattatttataaaaaatggatataatgccactactactggagaaattgttaaattatcagaaagtagtaaagggaatctttattatcactttaaaacaaaagaaaatctatttttagaaattttaaatatagaagaatctaaatggcaagaacagtggaaaaaggaacaaatcaaatgtaaaactaatagagaaaaattttatttatataatgaactatctttaacaaccgaatactattatccacttcaaaacgcaataattgaattttgcactgaatattataaaactaatagcattaatgaaaaaatgaataaattagaaaacaaatatatagatgcttatcatgtaatttttaaggagggtaatttaaatggcgaatggtgtattaatgatgttaatgctgttagtaaaatagcagcaaacgctgttaatggaattgttacctttacacatgaacaaaatattaatgaaagaattaaacttatgaacaagttctctcaaatttttttaaatggacttagtaaataa

SEQ ID NO: 414551 - DNA, 1545 bp, Staphylococcus aureus
atgatttcattttttacaaaaactactgatatgatgacatcaaaaaaaagatggactgcactagtagtattagctgttagtttgtttgttgttacaatggatatgacaatattaattatggctttaccggaattagtaagagagttagagccttctggtacccaacagttatggatagttgatatatactctcttgttttagctggctttataattccattgagtgcctttgctgataaatggggaagaaaaaaagcattattaactggatttgctttatttggcctcgtttcattagctatatttttcgcagaaagtgcagagttcgtaatagctattcgatttttacttggtattgcaggtgctttaataatgccaactactctttcaatgataagagtaatttttgaaaaccctaaagaaagggccactgcattagctgtatggtcaatcgtttcatcgataggtgctgtttttggaccaattatcggaggagctttacttgatcaattttcatggcactcggcatttttaattaatgtaccgtttacgataatagcagttgtagcaggtttatttttattaccagagtctaagttatcaaaagaaaagtctcactcgtgggatattccttctacaattttatcaattgcaggcatgattggactggtatggagtatcaaagaattttcaaaagaaggactagcagatattattccatgggttgtaatagtattagcaattaccatgatagtgatatttgttaaacgtaatttatcaagttctgatccaatgttagacgtaagactttttaaaaagagatcattttcagctggtacaattgctgcatttatgacaatgtttgcaatgacatctgttttgttattagcttcacaatggttacaggttgtggaagaactttctccttttaaagctggcttatacctattacctatggcaataggagatatggtgtttgcaccaattgcacccggattagcggcgcgatttggaccgaaaatagtgttaccttccggaattggaattgcagccattggcatgtttattatgtatttctttggtcatccattatcatattctacaatggctttagcattaattttagttggagctggtacggcttcactagcagttgcatctgctctaataatgttagaaacacctacatcaaaagcaggtaatgcagctgctgttgaagagtctatgtatgaccttggaaatgtttttggtgtagcagtacttggtagcctatcttctatgctttatcgtgtatttttagatatttcatctttttcatcaaaaggtatagttggagatttagctcatgtagctgaagaatctgtagtgggcgctgtcgaagtagctaaagctacggggataaaacagcttgcaaacgaggctgtaacatcatttaatgatgcttttgtagcaactgctttagtaggtgggattatcatgattatcatttcaatagttgtctatttgttaattcccaaatcacttgatataactaaacaaaaatag

SEQ ID NO: 414552 - DNA, 561 bp, Staphylococcus aureus
atgaatagagcagatatttttaaaatatttgatgtagaacttaatataactatatttttaggagcactagtagcaactttcatctattttataagttacatgaacaatgtaaatgaattaattacattatgcttaacattagcttttcctgcatatttattaaaaattagcagatcgttcgaggttattttattagaggaaaaaataaaaaatagtaaaatcaaaatctgtgacaaagatagaattgaacgagagatactggtgaaaaagaacctaatagatgaactattgtttcctaatagagttattaaaaaatatacactgacaattttaatttacagtataggtattattattcttttactactttgtaatatgttaagttatggaattggtgaaaatgtcaattttatctggagattactagcttgttatgtaacgagtgtcacagtgattatagttgccttgattataatgataatgatatttgatcttataattggattactattaaattttcaaatatttttaaaaaataaaaagtatgatgactttttataa

SEQ ID NO: 414553 - DNA, 201 bp, Staphylococcus aureus
atggcaggatttttagataacatagatacatctgaggtaaaatatacggaaaattataaaccggtatctaaaagtacgactatgagagtggacactgatataaaaaaaagactaaatcaaatggcattagataaggatacatctataaaagctatagttgatgaagtgttaggagaatttttggaaaaaaataagtattag

SEQ ID NO: 414554 - DNA, 795 bp, Staphylococcus aureus
ttgagcataataacagttggaaattttaaaggtggtgtaggtaaaacaacagtagccacgttactttcttatattgcatctgaaaattatgataaaaaagtacttttaatagattttgatcctcagggaaatgcaactcaaattatgaaaagaacttatccggaatttgaggaagaaaagatttcatttataaacatgctaaaaaatggaaatatagatcaaagtattgtgaaattaacttccaaattatcactattaccagctgattcatctttggctaacttatccgatatcatttcaaagacagatattctaaagaaaagatatattttaaaaaatgtggttgaaaaaattaaagaaattcacgatttcgactatatatttattgatgtaccacctactattaactctgatttcactaataatgctgtttatgcaagtgattacattttaatggtatttcaaacacaacaatctgcttatgaaagtagtctttcatttgttaattttttaagggatcgaaaaaaagaatcagatttatcgtttgaattggttggcgctgttccagtattaattaaaaaaagtggacgtgtagataaacagatattagatatgtctaaatcagcattttctgaagcactctttgagaaccagatatatcaaagagaaagaataaaaaaatttgccgctgatggaataaaagataaagatatgcatgacaaaaaagttatatatatgtttaacaaagtctacgaagaattagttaatagaattagattaattgagggtgagtga

SEQ ID NO: 414555 - DNA, 936 bp, Staphylococcus aureus
atgtcaaaattcaaaaaaatttctgctagtgaatttgaaacatctcgtttttaccaactcccaaaatttttatttgaagatggtcatttttctaaaatgacaactgacgcaaaggttatgtatgctctattaaaagatcgttttgaattatccaaaatcaataactggattgatgaagaaaataatatatatctactatatacaaataaacaattatgttccattttacaatacggagaacctaaaattatcaaattgaaaaaagagctagaaaaattcaatttaattataaatgaaagacaaggactaaatagacctaacaaaatataccttttagaacctagttatgacaaggaactaacaaatcgtaagttccagaacaaacaaattattagttcaagaactaacgaaaatatagttcaagaactaacaatttgtaagtctaatgatactgatattaatgatactgagaataaagaaactgagaataatgatacgtatgatatgaatgatagtgaacatatagccaaccctaatacttctcattcgaatcatccaaatcatcaatctaatgaatttgataataatgccttaaaatatcatttacttcaagaaattcccgatcaacttcaaacctatttaaataactttgaagttgatgaaatacaaattattaaaagtgtcatacttaaagctaaatcatcatttaataatgaaaagaatacagtatacatgttagaagatattgagtttgagatgattaatgtgctcaaacgttttaaagcaacattaattcaaaaaagcgaaagtgtcgaagccatgcaaggttatttaatgcgttcaattaaaacagaactcgaagaaatgcattccttaaatatgcgacgtcaaaacgcgccacaaaaccatatattcgacacatcacactatttatga

SEQ ID NO: 414556 - DNA, 570 bp, Staphylococcus aureus
atgacgaaagataagcgttcgaataagtgggcttttttaatatatgaagaaagcacgccatctaactatcaagatattttggaacagatgcatattccttatattttaagcccgtggcacaatcaagatatagatcaatcaacgggattaatcaaaaaatcacataaacacggtgctttattctttgattctttaaaaagttattctcaagtctctgaactacttcaacaacacttaaatacaccgaggcatattgaaattattatgtctcctaagggcatgtttgattattttattcatgcctctaattcagataaaacgctttatgatatcaatgatattgaaagtggttgtggttttgacttaaaccaatttttattagatcaaggtcagtccgaagtgtttaataacattattgatatgattgaaaatcacaattttatagaatttcaagatctagtgatgtatgcgcgacaacatcatccatcttatttaaatttgattatccaacggacgtatttttttgcgaaatatttagattcaaggcgacatacgttcaatcataaatag

SEQ ID NO: 414557 - DNA, 603 bp, Staphylococcus aureus
atgaggaaaacctatttcatgcgtgtgtatgatattatcatttacttgttcctgttcgctattttgacagttatggttagtaaactctttgtcctattaaactttattgtgtctcaaattgatattatcgatacgcgaaacgtcacacactatatcacaatcatttcaaatggtgtatatcaacttacattttacttattagtcttagcattgatgttaatagttatcgatttaatgattcgtttattgaaagatcaactcacgaatcatatcaaatctgtttatcacacaatggttttacgacattatcttaaacaagatgttgacacagacacgactcaggattggcaaaataacggcaaaagtaaaacaaattctgtccagcaatactttaataaaatggttggaaaatcgctcgttgatgttcgtcaaaatgaagtccgtgtggcaattaaaattccccggaaacagcaagctcacgatatattaaaaaagattgaacctcaaattcatgaagaaattacacatatgcacccgaattattacttttcaaaacctcaacgtcatcatcgttatctatggtttgcaggccacaaacgttaa

SEQ ID NO: 414558 - DNA, 216 bp, Staphylococcus aureus
ttgattaagtttgaatattttgaggagaaagattttgatttattaataaactggataaactctcctgaacttttagtcaaatgggcaggtacagattttaattatcccctagatgaagaacaattaaaggaatatattaaagacacaaataaagaaaattctagtaaaataatttataaagttatcattgaagaaaataattcaaaaaaattatag

SEQ ID NO: 414559 - DNA, 657 bp, Staphylococcus aureus
atgaatcataatcatgaatatcattcaaacaaacccgaaattaaagcaaatgttgtatatagagatggtaatatagaaattacgttagaagatgaatttaataatgccccattattagatactatgcatgaaaaagaaatgcatttcgttttagtatctaatgacatggagaaatattaccacctacaccctcaaaaaaagcatgaaggtttatttataattaaccaacaattagagccaggaacttaccaggcttttgttgatgttacaccaaaaaaccatgtgtattccgttcatcctattgaactgcaaattggagataaaataacctctacaacatctttaaattctgataaaaattgggtaaaagttaacaaaggagttcatgtaactttaaattctataagtgctaaagaagatgaacatgtccctttaactttcaatacagaattaactccccaaccttatttaggagctttaggacatgtgattatatttgatgagcaattaactgattatattcatgttcacccagaatcacctgattctacaaccttttatgctcattttcctaaaaaagggatgtataaaatttgggcagaatttaaatttaatgatgaagtgcatagatttacttataatattaaagttgcataa

SEQ ID NO: 414560 - DNA, 210 bp, Staphylococcus aureus
ttgactaacgaagttattaatgtagaaggtatgagctgtgaccattgcaagcattcaattgaaaaagcattaaatggattagatggtgtaacatcttcagaagtaagcttggcgaatgggaatgtggaagttgaatttgatgaaaatcaagtagctttcaacgactttaaagaagctattgaagatcaaggttacgatgtaattaaataa

SEQ ID NO: 414561 - DNA, 2388 bp, Staphylococcus aureus
ttgagtgaaaatattaaaaaaacctcattaggtatcacaggcatgacatgtgcagcttgctcgaataaagtagaaaaaaatctaaataaattagatgaagttaacgctaatgtaaatccttctacagagaaagctacaattgaatataaccccaatgttacatcattagaagatattgcaaatacaattcaaaaaacaggttatggagttttaaccgaaaaagtggatctcgatgtaatgggaatgacgtgtgcagcttgttcgaataaaatcgaaaaagttttaaatcgaatctcaggtgtaaataaggctacagttaatttaaccacagaaagtgctactgtagaatacaaccctgatatgacgtctgtagatgaatttcaacaacgtattaaaaacctagggtatgaggcacaacctaaaaaagaagcatcagaaaaaagttcccaaaaagaaaaacaattaaaacgacagttaattaaattagttgtttcagctgttttagcagctccattgttaatgacaatgttcgttcatttatttggtattcaaataccacatatatttatgaacccgtggttccaatttgtattagcaacgcctgttcaatttgttattggttggcaattttatgtaggcgcttataaaaaccttcgtaatgggtcagcaaatatggatgttcttgtcgctttaggtacaagcgcagccttcttttatagtatttatgaatcgattaagtggttaattaatacaaattatgagccacacctatattttgaaacaagtgctgtattaattactttaattcttttcggaaagtatttagaagcacgtgctaaaacacaaacaacaaatgcgttaagtaaattgttgaatttacaagctaaagaagcacgtatattacgcaacggtgaagagactatggttcctttaagtgaggtaaaagaaggagactatttagttatcaaaccaggagaaaaaataccagtagatggcaaaataattaaaggtatgacttcaattgacgagtcaatgttgacaggtgaatctattcctgttgaaaaaatgcaaaatgataatgttataggatcaacaatgaataaaaatggagcaattactgttgaagcaacaaaagttggtaaagatacagctcttgcctccattgttaaagttgtcgaagaagcgcaaggttctaaagcgccaatacaaagactagcagatattatttctggatattttgtacctatcgttgtaggtatcgcgattttcacatttattatatggatttcattagttcagccgggacaatttgaaccagccttagttgctgcaatagcagtattagttatcgcttgtccttgtgcgttaggcttagctacgcctacttctataatggtgggtaccggaaaagctgctgaaaatggcattctatttaaaggtggagaacacattgaaggtacacacgctattaatacagttgttttagataaaactggcactataacaaatggcacacctgaagtcactgattttagtggagatgatcaaacattacaattgttagctagtgcagaaaaaggttctgaacacccactagctgaagctatcgtaagttatgctaaagaaaaatcattagaatttttagaagtagaccattttgaagctataccagggcgcggtataaatgcaacaattgatggtaaagaactttttgtcggaaatcgaaaactaatgagtgaaaaaggaatccaaactaatgaagctgaaacaaatctcgctcaatttgaaaaagaaggaaaaactgcaatgcttataagcgtagataacgaattgagaggggttgtcgctgtagctgatacagttaaagatactgcccaacaagctattcaaaaacttcatgaattaggtattgaagttgctatgttaactggtgataacaaacgtaccgcacaagcaatagcaaaacaagttggtatagacacgattattgcagaggttttaccagaagaaaaagcttctaaagtagcagaaattcaatctgaaggtaaaaaagtagctatggttggagatggtgtcaatgatgctccagcactagttaaagcagatattggtattgccattggtacaggtacagaagttgcaatcgaagctgctgatataactattttaggaggagaccttttattaattccaaaagcaataaaagcaagtaaatctacaattcgtaatattcgccaaaatctattttgggcgtttggttacaatgttgcaggtatccctatagcagcaattggtctgctagcaccttgggttgcgggagcagcaatggctttaagttctgtaagtgttgtcacaaacgctttacgtctaaaacgtatgaaattataa

SEQ ID NO: 414562 - DNA, 276 bp, Staphylococcus aureus
ttgaacactactactgttaaaaacaatgacgcattgctcaatagactcaaaagattagaaggacaaatgcgcggtttacaatcaatgatagcagaagatagatattgtatagatgtactagtacaaataacagcaatacaatcagccctaaaacaagtgggttttatagtaactgaagaccatatatctaattgtgtaagtgaaggtattaaaaatggcaacggagaagaaagtatcaaagaattgatggttgtattaaaacaattttcaaaatag

SEQ ID NO: 414563 - DNA, 276 bp, Staphylococcus aureus
ttggataaaaatatacaacttgagctttacacaagacctacatgctctgattgccaagaatcaaaaaggtatttaaactctcaagagattagttatagtcataaagatgtaagtcaaaatttggacttagaagaagaaatgaaaaaaatatcaggcaaccgaattgttcccttatttgttttttataaaaaaattttttggggtaaaaaaaagttgtttaaatattacgtgggatttgaaaataacaaaaaagatatattaaatatattggaataa

SEQ ID NO: 414564 - DNA, 942 bp, Staphylococcus aureus
atggaaaacgatcacaatcataatcatacacatggcgcgaacaaaaagactttattaattagttttattattattacaagttacatgattgtagaagggttaggtggtttctttactaacagtcttgcgttaatttcagatgctggtcatatgttaagtgattctatttctttaggtattgctttaattgcatttactttaggagcgaagcaagctaatacaaataaaacttttggctacaaaaggtttgaaatactagcagctgtacttaatggtattactttgatgttaatagctatctatattttttatgaagctattgagagatttaaaaacccccctgaggtagcttctacaggcatgttaattatcgccttggtaggcttgtttattaatattattgtggcttggataatgctgcgcgggagcgatgtagaagaaaacttaaatatgcgtggagcatatttgcatgtaataagcgacatgcttggatctataggtgcagttatagcagcccttctcattatattttttagatgggggtgggcggatcctttagcaagtgtgattgtagcaattttagtactacgtagcggcttttatgtaacaaaatcaagtcttcatgtattaatggagggagcaccaagcaatataaatacaaaagacattattaaaactattaaaaaattcaaagaagttaaaaatattcatgactttcatgtttggtcagtaactagcggattaaacgcgttatcttgtcatattgttgtagaagatacaatgaccattactgaaaatgagtttttacttaaacgtatagaacatgaactcaatcatcaaaatattcaacatgtcacaatacagactgaaacttctaacaataatcatagtgaaaaattgttttgtatcgtgaaagaagaagacagtcaacatcatcattaa

SEQ ID NO: 414565 - DNA, 486 bp, Staphylococcus aureus
atgaaaactgtaaaggaagtttctgaacttttagatgtctctaaacaaacaattcattatcatttaaaaagtttaccttcaaatttgaaggtaaacaaagtaggtaacaaatcattaatagatgataatacaatagattatctaaaaacaattttaaataaaaaaacgacaaaagaatcgacaaaatttgatgaaaaatcgacaaacaaaacagaatcattaaataaccaatatagcagttatatcgataaatacatagagcatttagaatcagaaattcgacaaaagaatcgacaaattgacgatttaacaattgcattaaaacaagaacaatctttgaatttaaatagccaaaatatattaagtaataccaaaaaaatagaaactgataatatagattcaaaagaagatatcattactccaaaagcatcaaaaaaaaatgaacaaaaacaatctatcttttctaaactattcaaaaaaaaataa

SEQ ID NO: 414566 - DNA, 303 bp, Staphylococcus aureus
gtgattagctatattttttactttgcaacagaaccctttttatttaaaaatctcaatattaataaaattaaagctaaaaaaggacgaaagattgaatggttagaattttcttttgaacctgagaaacgtattcattcgaaacgacaatctaatatgataagtacaggcaaaccaaaacaatatataagccgtgaaatgacgccacaatggttaaaaaataacacttatgaaccaaccacatctaagacatctgcgtatacagaagaagaacgtcaagcgtttttacaaaaaatgaaaaagtaa

SEQ ID NO: 414567 - DNA, 243 bp, Staphylococcus aureus
atgacagatagcgcgcgtaaagaatacctaaatcaattctttggatctaagagatatctgtatcaggataacgaacgagtggcacatatccatgtagtaaatggcacttattactttcacggtcatatcgtgccaggttggcaaggtgtgaaaaagacatttgatacagcggaagagcttgaaacatatataaagcaaagtgatttggaatatgaggaacagaagcaactaactttattttaa

SEQ ID NO: 414568 - DNA, 612 bp, Staphylococcus aureus; identical to SEQ ID NO: 407203

SEQ ID NO: 414569 - DNA, 1422 bp, Staphylococcus aureus
atggatgaaaataaattaggtaaaacttccttaattggtttagtcataggctctatgataggcggtggtgcattcaatatcatctcagatatgggtggccaagctggtggacttgcaataattatcggttggataataactgctattggtatgatttctcttgctttcgtatttcaaaatttaacaaatgagcgaccagatcttgatggaggaatttatagttatgctcaaacagggtttggagattttattggtttttcaagtgcttggggatattggtttgcagcatttctaggtaatgtggcttatgcaaccctattaatgtcagctgtgggtaactttttccctatatttaaaggaggtaacacacttccaagtattatcatagcatcaattttattatggggtgtacattttttaatacttagaggtgtagaaactgcagcgtttataaatagtattgttacagtagctaaattaatacctatatttctagttattatatgcatgatagttgtattcaacttcagtacttttaaatccggtttttatggtatgactagtggaagtgttggcgtttttagttggggagatacaatggcacaagtaaaaagtactatgttagtaactgtatgggtattcacagggattgaaggagccgttgtcttttctggacgtgcaaagtctaaaaaagatgtaggaactgctaccgttattggtttgatttctgtgctagtcatttatttcttaatgactgtactagcccaaggtgtcattcagcagaaccaaatttcaaaacttgctaatccatcaatggcacaagtattagaacatattgtaggtcattggggttcagtgttagttaatataggcttaattatctctgttttaggagcttggttaggatggacattactagctggtgaattaccattcattgtagctaaagatggacttttcccgaaatggtttgctaaagaaaataagaataaagctccggtcaacgctttaattattactaatatattagttcagttatttttaattagtatgttgtttacagatagtgcctatcagtttgcgttttcacttgcatcaagtgcaatcttaattccatatacactcagtgctttttaccaggttaaatatactattcaaaataaatctaaagctaatttaaaacaatggataataggaattattgcatctatttacacaatttggttggtttatgcagctggattagattatttactattaacgatgttgttatatatacctggattactcgtatacagctacgtacaaagggataataacaaacatttgacaaaattggattatacgttattcatattcatcattgtacttgcaataataggaatagttcgtttgattacaggtaatatttctgtattttaa

SEQ ID NO: 414570 - DNA, 1236 bp, Staphylococcus aureus
atggtacaaggacccattcaagtaaatagtgaaataggcaaattgaaaactgtgttgttaaaaagaccaggaaaagaattagaaaatttagtacctgatcatttaagtggtttattattcgatgatattccctacttaaaagttgcacaagaagagcatgacaaatttgctcaaactttgagagatgaaggaatcgaagtagtttatttagaaaaacttgcagcagaatctattactgagccagaagtacgcgagaacttcataaacgatatattaacagaatctaaaaagacaatattaggtcatgaaactgaaattaaagaattcttttcaaagttatctgaccaagaacttgtaaataaaatcatggctggcgtacgtaaagaagaaattcaacttgaaacaactcatttagtagaatatatggatgatagatatccattttacttagatccaatgcccaacctttattttacaagagatccccaagcttcaattggtagaggaatgacaattaacagaatgtattggagagcacgacgtagagaatctatttttatgacatatatactgaaacatcatccaagatttaaagataaagatgtaccagtatggttagatcgtaactcaccatttaatattgaaggtggagatgaattagtattatcgaaagatgttttagctattggtatatcagaacgtacatcagctcaagcaatagaaaagttagcacgtaatattttcaaagatgcaaacacaagttttaaaaaaatcgtagctattgaaatacctaatacacgtacatttatgcacctagatacagtactaactatgattgactacgataagtttacagtacatgcagcaatatttaaagaagaaaataatatgaatatatttaccatagaacaaaatgatggtaaggacgatataaaaattactcgttctagcaagttacgtgaaacacttgctgaagttttagaagtagaaaaagtggactttattccaacaggtaatggcgacgttattgatggtgcacgtgaacaatggaatgatggctcaaacacattatgtattcgaccaggggttgtggtgacatacgatcgcaactatgtatcaaaccaacttttacgcgacaaaggaattaaagtgattgaaattactggtagtgaacttgtacgtggacgcggaggcccaagatgtatgagtcagccgttatttagagaagatatttaa

SEQ ID NO: 414571 - DNA, 429 bp, Staphylococcus aureus
atgaaaaaagaaaaacgtttaaatcttatcttaactgttatacaacagaatcagtttaataaaaaacaacaaatagtggattacatggcaagacattttggagtttactatagcttgacaactatttctcgtgacttacaagaattagaaatttacaaaatccctgttgaaaataaaaagtatatttacaagaaaataaatcaaacaaatcaattaagtgcaaaaaaacaattagaaatatttagtgatgagattattgaatttataacgctaaataactatgtcttaataaaaacatctcctggctttgctcaaagtataagttattacatagatcaattacaaatgaaagaaatattaggaactattggaggtaacgatactttgatgattttgacttcttcaaatgaaatagcagaatttgtttga

SEQ ID NO: 414572 - DNA, 432 bp, Staphylococcus aureus
atgttcaaaaatatattattaccctatgatttcgaaaatgattttagtgctatccctgactatttagaaaaagtcatcgatgaagattcagttgttgtaatttatcacgttgtaacagaaaatgatcttgcaattagtgtcaaatattataataagcataaagaagatattattagagaaaaagaaaaaaaactcactccatttttacgtgaattagaaaaaagagatattcaatataaaatagatgtagattttgggcatattaaagatacaatcttagaaaaaattacttctggagatataaataatggtgaatttgatttagtaattatgagtaatcatagagtcgatttgaatattaaacatgttttaggagatgttacacataagattgctaaaagaagttctgtcccagtactaattgttaaataa

SEQ ID NO: 414573 - DNA, 1773 bp, Staphylococcus aureus; identical to SEQ ID NO: 412765

SEQ ID NO: 414574 - DNA, 1056 bp, Staphylococcus aureus
gtgaaactacaatgcataaatacatttaaactacattctaagaagcgacaattaagtaaggcccaacaaatcgacttactttcaaatttatgtaatttgttgaaatatggtttcactctgtatcaaagttttcaatttttaaatcttcaaatgacatataaaaataagcaattaggtaccaccattctaagtgaaatttcaaatggtgcaccatgcaatcaaatattatcactgataggttatagcgatactatcgtcatgcaagtatatttggcagaaagatttggcaatattatagacgttctagaagaaaccgtaaattatatgaaagtgaatagaaagtcagaacaacgattgttaaagacactgcaataccccttaatactagtttctatctttattgctatgattattatattaaacctcacagtaattccacagtttcaacaattatatacttctatgaatattcaactatcttcttttcaaaaaacattgtcttttttcattaccagcttacctactataattgtagtaatgctcataatagtatctatgttggctattattatgaaattaatttataacaatttaaatatgctcaataagataaactttgtgatgaaactaccgctaatatcaggctatttccaattatttaaaacttattttgtaactaatgaattagtgttgttttataaaaatggtattacacttcaatcaatagtagacgtttatattaaccatagtagtgatccatttagacagtttctaggtaaatacttattaacttattcagaaatgggatatggtttgcctcaaattttagaaaaactaaaatgctttaagcctcaattaattaagtttgtgctacaaggtgaaaagagagggaagctagaagtagaactaaagttatattcgcaaatattagtaaaacaaatagaagataaagcgataaaacagactcagtttttacagcctattttatttttgattttaggtttatttactgtctcttatacacatctgacgctgccgacgactccttacgtgtag

SEQ ID NO: 414575 - DNA, 417 bp, Staphylococcus aureus
atgaacaaagtccacaaacctttatatttttatttaatgcttttcttctctacaactatcataggtgcacttttattgtatttaccttttactggtaaaaagccaatatcttttttagatgccctatttatagcttcaagtgcatttacagttactggcttgtccccagttgatataggatcacagtttaatatacttggtgagatagtaatactattattaattcaaataggtggtctgggtatcgtgaccgtaaccctattgacactagtatttttaaatagaaagatatcaatgaaaaatagattcttgattatggttacatggaatattgacgaacctggtggtgttattaagctaattaaacacttggctatttatagtttagtcactgaattaattggtatgatttgttaa

SEQ ID NO: 414576 - DNA, 321 bp, Staphylococcus aureus
atgggtacgatttcaatcataattagttatttgttattagtaattggcggaatgttcacgttattaaaattacctaaagtaacaaaacgttggggtggtaaaactaaaacacatttcggtttattattaaccgcgttgagcgcatttatatatattgaaagaattatcgaatatatattggtgcccaatgtcgtagaatccaagtttgtcataatggtaagtatcattattattgcttgtacacaatttgtggcatttcaatttattatgcaatacagtagattctatatttttgaattaaacactgaagatgatgactaa

SEQ ID NO: 414577 - DNA, 321 bp, Staphylococcus aureus; identical to SEQ ID NO: 414576

SEQ ID NO: 414578 - DNA, 684 bp, Staphylococcus aureus
atgactactaaggaaaatatagacattcttcgaaagccaggtgcacaagccttaagtttagcatcattatttatgatacttttttcatgtctaactttcttttttggtttagattatgaaaggtttccaaattatttaaagataacgacaattatagaattaataattatcataattagtttacttcaatggattagatttatagatttcgaaaaggaaagcgcacagaaatataagaaaatatatgcccgatttttagttattataaatgtgctaactactatcaccgcagtatttgcaacatgtaacctttattattttgttgctgtacaaaatcattatgacctattcaattattggttgatgggtacgatttcaatcataattagttatttgttattagtaattggcggaatgttcacgttattaaaattacctaaagtaacaaaacgttggggtggtaaaactaaaacacatttcggtttattattaaccgcgttgagcgcatttatatatattgaaagaattatcgaatatatattggtgcccaatgtcgtagaatccaagtttgtcataatggtaagtatcattattattgcttgtacacaatttgtggcatttcaatttattatgcaatacagtagattctatatttttgaattaaacactgaagatgatgactaa

SEQ ID NO: 414579 - DNA, 321 bp, Staphylococcus aureus; identical to SEQ ID NO: 414576

SEQ ID NO: 414580 - DNA, 189 bp, Staphylococcus aureus; identical to SEQ ID NO: 407433

SEQ ID NO: 414581 - DNA, 147 bp, Staphylococcus aureus; identical to SEQ ID NO: 407426

SEQ ID NO: 414582 - DNA, 171 bp, Staphylococcus aureus
atgaaaaaagtaatggggatattattagcaagtacacttatcttaggtgcttgtggacatcatcaagatagtgcaaaaaaagagagcactagtcacaaaaagaaagaaaatgacaatgaagaattaaatgaagaacttaaagaatttaaaagcaaaaaaatatggatataa

SEQ ID NO: 414583 - DNA, 363 bp, Staphylococcus aureus
ttggataaagtagaagatccaaagctcaaaaataaaatagaaaattttaaattctttagtcagtatgctgattttagagatcttaaaaattataaaaatggaaatatatcaagtacagataatgtgccaagctacgatgcagaatataaaatgagtaatacggataaaaatgtaaaaaaacttagagaagtttatccgattacaaccaaaaagtcgccagtattaaaattacatatagatggcgatataaaaggaagttcagttggttataaaaatatagaatataatttttcaaaagtaaaagaccaagaaactgctgttagagattttttgaattttggaccatctgatggagttagctaa

SEQ ID NO: 414584 - DNA, 291 bp, Staphylococcus aureus
gtgcaagtatttgatgatttatggatggatttatatgatttatttgaggagttaagagatttatttaaagaagaagatttagaaccatggacatcatgcgaatttgattttacaagagaaggtgaattaaaagtttcatttgattatattgattggataaattcagaatttggtcaaataggtcgacaaaattactataagtatagaaaatttggaattttaccagaaacggaatatgaaattaataaagttaaagaaatcgagcaatatattaaagagctagaagaataa

SEQ ID NO: 414585 - DNA, 594 bp, Staphylococcus aureus
atggccttggcacaaccattattcacagttttctatggttacgatccaattgttttaggtcatgaccctaaccatgatggtagtcgcttattattctattatgcgcctgtagcaatactaatttcactattaagtgtaacggcatcaatgttacaaggtatagataaacagaaattaacagtttatgttattttagcttctgtagttatcaagttagcgttaaactatccattaattatgttattccatacacctggtgcaattttaagtactagtatcgcattattatttgcaattggatgtaatttctatattcttaaaaaatatgcgaagtttaaattcagctatagttggattcattttgcaaaaatattcttgtattcatttattatgatgctaggtgtagaattagtatttttccttgcaaatctattcttagaacctactaaacttggttacttaatcattattattttaggtgttacagtaggtattctaatttacggtacaatcacaattaaaacgcgtcttgcggacgaattcttaggtgaaattcctgaaaaattaagacgtagagttaggtttttacgatga

SEQ ID NO: 414586 - DNA, 1041 bp, Staphylococcus aureus; identical to SEQ ID NO: 406437

SEQ ID NO: 414587 - DNA, 324 bp, Staphylococcus aureus; identical to SEQ ID NO: 408983

SEQ ID NO: 414588 - DNA, 1269 bp, Staphylococcus aureus
atgtatcaaacaattattatcggaggcggacctagcggcttaatggcggcagtagctgcaagcgaacaaagtagcagtgtgttactcattgaaaaaaagaaaggtctaggtcgtaaactcaaaatatctggtggcggtagatgtaacgtaactaatcgattaccatatgctgaaattattaagaacattcctggaaatgggaaatttttatatagtcccttttcaatttttgataatgaatccatcatagatttttttgagtctaggggtgttaaattaaaagaagaagatcacgggcgtatgtttccagtttccaacaaagcacaagacgtggttgatacattagtgacaactatcgaacgccaacatgtaacgattaaagaagaagaagctgttagtagaatcgaagttaatacagaccaaactttcactgtacatactcaaaataatagttatgaaagccattcgctagtgattgctacaggtggtacaagtgtccctcaaactggttcaactggtgatggttataagttcgcacaagatttaggtcataccattactgagttattcccgatcgaagttccaattacatcagctgaacctttcatcaaatccaatcgtctaaaaggtttaagtttaaaagatgttgaattgtcagtacttaagaaaaatggtaaaaaacgcatcagtcatcaaatggatatattatttactcattttggtatcagtggtccagctgcattaagatgtagtcagtttgtttataaagaacaaaaaaatcaaaagacacagcacatttctatggcaatcgatgcatttcctgaattaaaccatgaacaattaaaacaacacatcacatcattattatcggacacaccagataaaatcattaaaaacagtttgcatggtctaattgaagagcgctacttactgttcatgctggaacaagcaggaatcgatgaaaataccacatcacatcacttatcaaatcaacaattgaacgacttagtaaatatgtttaaagggtttgtatttaaggtgaacgggacattacctatagataaggcatttgtcacaggtggtggtgtgtcacttaaagaaattcaacctaaaacaatgatgtctaaattagttccgggattatttttatgtggtgaagtattagatatacatggttatactggtggttataatattacaagtgcactcgtaacaggacatgtcgctggattatatgccggacattactcacatgcatcaatggaataa

SEQ ID NO: 414589 - DNA, 2070 bp, Staphylococcus aureus
gtgacgcctgaccatattgttagagcagctgctagagatgcagttaagcaacaatatgaagctaaaaagcgcgaaattgagcaagcggaacatgcgactgatgaagaaaaacaagttgctttaaatcaattagcgaataatgaaaaacgtgcattacaaaacatcgatcaagcaatagcgaataatgatgtgaaacgtgttgaaacaaatggcattgctacactaaaaggtgtacaacctcatattgtaattaagcctgaagcacaacaagcaataaaagcaagtgcagaaaatcaagtagaatcaataaaagatacaccacatgcaacagttgatgaattagatgaagcgaatcaattaattagcgacacactcaaacaagcgcaacaagaaatagaaaatacaaatcaagatgctgctgttactgatgttagaaatcaaacaatcaaggcaatagagcaaataaaacctaaagtaagacgtaaacgagctgcgcttgatagcattgaagaaaataataaaaatcaactcgatgcaatccgaaatacgttggatactactcaagatgaaagagatgttgctattgatactttaaataaaattgtaaatacaattaaaaatgacattgcacaaaacaaaacgaatgcagaagtggatcgaactgagactgatggcaacgacaacatcaaagtgattttacctaaagttcaagttaaaccagcagcgcgtcaatctgttggtgtaaaagccgaagctcaaaatgcactaatcgatcaaagcgatttatcaactgaagaagaaagactagctgctaaacatttagtagaacaagcacttaatcaggctattgatcagatcaatcatgcagataagactgcccaagttaatcaagatagtataaatgctcaaaatattatttcaaaaattaaaccagcgacaacagttaaagcaacagcattacaacaaattcaaaatatcgctacaaataaaattaatttaattaaagcaaataacgaagcgacagatgaagaacaaaatattgcaatagcacaagttgaaaaagagttaattaaagctaaacaacaaattgctagtgcagtgactaatgcagatgtggcatatttattgcatgatgagaaaaacgaaattcgtgaaatcgaacctgttattaacagaaaggcgtctgctcgagaacaattgacaacattattcaacgataaaaaacaagcaattgaagcgaatattcaagcaacggtagaagaaagaaatagtatattagcacagttacaaaatatttatgacactgctattggacaaattgatcaagatcgtagcaatgcacaagttgataaaacagcatcattaaatctacaaacaatacatgatttagatgtacatcctattaaaaagccagatgctgaaaaaacgattaatgatgatcttgcacgcgtcactgctttagtgcaaaattatcgaaaagtaagtaatcgtaataaggctgatgcattaaaagctataactgctttaaaattacaaatggatgaagaattaaaaacagcacgcactaatgctgatgttgatgcagttttaaaacgatttaatgttgcattaagcgatatagaagcagtaattactgaaaaagaaaatagcttactgcgaattgataacattgctcaacaaacatatgcgaaattcaaagcgatcgcaacaccagaacaattagctaaagtaaaagtattaattgatcaatatgttgcagatggcaatagaatgattgatgaagatgcgacattaaatgacatcaaacaacacacgcaattcattgttgatgaaattttagcaattaaattaccagctgaagcgacgaaagtatcaccaaaagaaattcagccagctccaaaagtttgtacgcctattaaaaaagaagagacacatgaatcgcgcaaagttgaaaaagaacttccaaatacaggttctgaaggaatggatttaccattgaaagaatttgcactgattacaggtgcggctttgttagctagaagacgtactaaaaacgaaaaagaatcataa

SEQ ID NO: 414590 - DNA, 864 bp, Staphylococcus aureus; identical to SEQ ID NO: 404840

SEQ ID NO: 414591 - DNA, 735 bp, Staphylococcus aureus; identical to SEQ ID NO: 407375

SEQ ID NO: 414592 - DNA, 735 bp, Staphylococcus aureus; identical to SEQ ID NO: 407375

SEQ ID NO: 414593 - DNA, 735 bp, Staphylococcus aureus; identical to SEQ ID NO: 407375

SEQ ID NO: 414594 - DNA, 201 bp, Staphylococcus aureus; identical to SEQ ID NO: 406357

SEQ ID NO: 414595 - DNA, 207 bp, Staphylococcus aureus
atgttagacaaagtcactcaaatagaaacaattaaatatgatcgtgatgtctcatattcttatgctgctagtcgtttatctacacattggactaatcacaatatggcttggtctgactttatgcagaagctagcacaaacagttagaactaaagaagatttaactgagtacaataaaatgtctaagtctgaccaagccatattgtga

SEQ ID NO: 414596 - DNA, 189 bp, Staphylococcus aureus; identical to SEQ ID NO: 407433

SEQ ID NO: 414597 - DNA, 147 bp, Staphylococcus aureus; identical to SEQ ID NO: 407426

SEQ ID NO: 414598 - DNA, 189 bp, Staphylococcus aureus; identical to SEQ ID NO: 407433

SEQ ID NO: 414599 - DNA, 189 bp, Staphylococcus aureus; identical to SEQ ID NO: 407433

SEQ ID NO: 414600 - DNA, 189 bp, Staphylococcus aureus; identical to SEQ ID NO: 407433

SEQ ID NO: 414601 - DNA, 189 bp, Staphylococcus aureus; identical to SEQ ID NO: 407433

SEQ ID NO: 414602 - DNA, 189 bp, Staphylococcus aureus; identical to SEQ ID NO: 407433

SEQ ID NO: 414603 - DNA, 309 bp, Staphylococcus aureus
ttgccacaacaacttcacgactatttaagtaaatttgaaattagagaaattcggattattaaaagcgtattactcaaagggaaaaagtcatttaatacttcacatgatacttattatcgtttagaagatgttgagtttgaaattgtaagtgtattgaaacgttttaaagcgatgttgctacaaaagaatgaaaccgttgaagctatgcaaggttatttaatgcaatccattaaagctgaacttgaagaaacacatgccctttatatgcgccgtaaaaacatgaaacaatataatatctttaatcaataa

SEQ ID NO: 414604 - DNA, 147 bp, Staphylococcus aureus; identical to SEQ ID NO: 407426

SEQ ID NO: 414605 - DNA, 147 bp, Staphylococcus aureus; identical to SEQ ID NO: 407426

SEQ ID NO: 414606 - DNA, 147 bp, Staphylococcus aureus; identical to SEQ ID NO: 407426

SEQ ID NO: 414607 - DNA, 147 bp, Staphylococcus aureus; identical to SEQ ID NO: 407426

SEQ ID NO: 414608 - DNA, 147 bp, Staphylococcus aureus; identical to SEQ ID NO: 407426

SEQ ID NO: 414609 - DNA, 483 bp, Staphylococcus aureus
ttgagaaatgaaatttcaaagattaaaaagagtttaaaaactgatttaaaaaatattaatcaaaaatttgaaaaactaaaaaagaaaatatcactacaaatagaaactacgggactgtctgaaaaaaaagtattaaactttaataaattaaatggtagcggaacatttctaaataaagatttattaacattatatctggtttatatgaaccttctagatagtatggaagattttggtttgccatttgctattgattcatttgtaaaaaatgagacagactcaatagcattggaaaaaatgtttggtgcaattgataaatattttttgacattaaataaccaaacatttttttcaataataaaagaaaatttaaagtttatagaaaatcctgttaatgagataaaaatagatagacctttattaaaagagaaatttttttctgatatagagaaagaactaattcaaaatttaaatattttataa

SEQ ID NO: 414610 - DNA, 180 bp, Staphylococcus aureus
atggctcaatcagaatatgaaattgatcccggaaaaataactagtaatacagaagaaactagcgcaatagctaatatcagttatgaaatagagaacgcaaatgataacaatttaaagtatgacaaaattaaagatcaaatttataaactaaaacgttataatcagtttcctaaaaactaa

SEQ ID NO: 414611 - DNA, 255 bp, Staphylococcus aureus
atggtacagtttcaaattgctaatggcatgcgtatcggtgagctacttgcaataaagagagaaaatataaactatgaagataaaacgctagatatcgatggtacaattaattggataactgaaaaaaagacgggagcattcggagtaaaggagacaactgaaagaagtaatagctatagggccatagggctcactatccaaagcatcaacatactaagaacacttatgcttggaatgataagtttattaatatag

SEQ ID NO: 414612 - DNA, 663 bp, Staphylococcus aureus
atgatctatttaccgaaggatcaggaaatacaacgaggccctgtgaatcatgaggcaccttctcatgaaaatcatgttacttcgaaaatattaagacctgctgaagtagcaaaatatttaattattacgtttttagtattgattgcaaactcagtgacattcgtctttataaatccacttattttatctaatggtcatgatatgtcattcgtttcattagcacttctagtaaatggaatcgctggcgttattggaacatcattaggtggtatattctccgataaaattacaagtaagcgttggttaatgatttctgtttctatttttatcgtcatgatgttacttatgaatttaatcttacctggttcaggtctattgttagcaggactatttatttggaatatcatgcaatggagtactaatccagcagtgcaaagcggtgtgattcaacatgttgaaggtgacacaagccaagtaatgagttggaacatgtctagtttaaacgctggtattggtgttggaggcattattggaggcttggtcatgacacatgtttctgttcaagctatcacgtatacgagtgccatcattggcgcattaggattaatcgttgttttcacattgaaaaataatcattatgctaaaacatttaaatcatcataa

SEQ ID NO: 414613 - DNA, 147 bp, Staphylococcus aureus
atgaagggggcgttaattgatgatcttgaaattcaaaatttaaggggagagcgactatcaatgatgctgcaaaacacaatagcaaagaaaaaacaggcacgtcacctgataaaggcatacgcacctgttttagtaagtattatttag

SEQ ID NO: 414614 - DNA, 1593 bp, Staphylococcus aureus
atgtcaaatttattagaagtcaacagtctgaatgtacaattcaattatgatgaaactacagttcaagcggtaaaaaacgtctctttcgaattacgaaaaaaacatatcctaggtattgttggtgaatcaggatcaggaaaaagtattaccgctaaatctattttagggctactaccagattatccggatcacacgttaacaggagaaattatttttaatgggcaatcgttaactaatttatcaacttcagcgttacaacaaattcgaggtaaggatatttcaatgatttttcaagatccactctcttcgttgaatccaagattaacgattggcaaacaaattacagaagtactatttcaacataaacgtgtatctaaatctgaagcaaaatcgatgacaatagacattttagaaaaagtaggtataaaacatgcaactcgacaatttgatgcttatccacatgaactttctggtggtatgcgtcaacgtgtcatgatagcaatggcattgattttaaagccacaaattttaatcgcagatgaaccaacaacggcattagatgccagtacacaaaatcagttactgcagttaatgaagtccctttatgagtacacagaaacgtctattatttttatcactcacgatttaggcgctgtgtatcaattttgcgacgatgtgattgtaatgaaagatggatgtgtcgttgaaagtggcacggttgaaagtatttttaaatcgccacaacatacctatacgaaacgcttaatagatgcgattcctgatattcatcaaacgcgtccgccaagaccgttaaacaatgatattttattaaaattcgatcgcgtgagcgtggattacacttcaccgagtggcagcctataccgagcagttagtgatattaacttggctattagaaaaggcgaaacattaggcattgtcggtgaatcagggtcagggaaatcgacattagctaagacggtcgtcggtctaaaggaagtgtcagaaggttttatttggtataacgaattaccattaagtttgtttaaagatgatgaattgaaatctttacgacaagagatacaaatgattttccaagatccattcgcatctattaatccaagatttaaagtcattgatgtgattaaacgaccacttatcattcatgggaaagtcaaagataatgatgacattattaaaactgtcgtatcgttgttagaaaaagttggcctagatcaaagtttcttatatcgctatccacacgaattatctggtggacaacgccagcgtgtaagtatcgctagagcacttgctgttgaacctaaagtgattgtttgcgacgaagcagtgtcagctttagacgtttcaattcaaaaagatatcatcgagttattaaaacaattacagttagacttcggcatcacttatttattcatcacacatgacatgggtgttatcaatgaaatatgtgatcgagttgcagttatgaaaaatggcgaaatcgttgaactgaataacacagaagatattatcaaacatccgcaatcagactatgcaaagcaacttatttcagaagtagcagttattgctaaataa

SEQ ID NO: 414615 - DNA, 276 bp, Staphylococcus aureus
atggaaccaagagatattcttaagcgccccgtaatcactgagaaatcttctgaagcaatggctgaagacaaatacactttcgacgttgatactcgtgttaacaaaacacaagtgaaaatggcagttgaagaaatcttcaacgtaaaagttgcaagtgttaatatcatgaattacaaacctaagaaaaaacgtatgggccgttaccaaggctatacaaacaaaagaagaaaagcgattgtaactcttaaagaaggatcaatcgacttatttaactaa

SEQ ID NO: 414616 - DNA, 123 bp, Staphylococcus aureus
atgaagataactaatataagattaaaaagtgcaaataaaaaaggtgttaaaaaactttactttcttgaaggtatagatgctatagaaaaaatagagaataattacgaaaaaaagtttttttag

SEQ ID NO: 414617 - DNA, 195 bp, Staphylococcus aureus
atgatgcaaacctataaagtaagtctttgtatcaagttcttagtatctaaatgtgattacaaaataaaaaagcattattttgtgcaaagtataaatgaggaagaagctaagaatatggcattaaaactgactcgtaaaaaactcccattcaaaactgcaagcatagaggtcgaaaaagtggaggtagtagaatga

SEQ ID NO: 414618 - DNA, 765 bp, Staphylococcus aureus
ttgtttcaaaataactttcctgataacttttatagaacattagttaatgccattataagcggaaatgaagaatatttagatcaatataaatattatcaaagggaacttgaaaattctgacggattttggaatatgcgcaggtgcattattgaaggtttaattggacagaaagttttaggcttagaatttgagcataaacgctatggtggtgctggccatttgctttattcttatgagtatggtggagtgactaaaagatttataatacaaaatggtgcgacattcgattcttttaatcctaagtgtagtaaacgtggtagtgaattaaaagaacgaaaatatatgaatgaatatattgataaaaataaggggattgaatttttaaaacaaaaccaagaagttcaaggtgaatgggattttttaaataatgatgtaacctttaattcaaataaagcagatgaatatataaatgaaacagaagaattttatataatcacttatctagttgattcaagcataggaaatattcatggaattcatgtttggatgccttcaccatatgatgaaaaagcgtacttaattaaagatttatctgaattaattccaaaaaatgattcttataacatgtttgtgtttaaagagggaacattagttaataatagtgtttattatgaagttgagtcattaggcatatcagaaattgaaaaagttgaatcatttgacatgtctgaaactgaaaataaagatgaaaaagtgaaaaagtga

SEQ ID NO: 414619 - DNA, 1173 bp, Staphylococcus aureus
atgttcaaaggagatagtttaaaatatataagaactttgcacggtatgagccgaaaagaattagctgaaaagattaaagttacagaacaaatgatatggcaatatgaagtgaaaaacgatatgcctgatatgaaaaaagtatatgatctatcacgaattctgcatgtaagaacgcgatttttctttaatgaaaaaaccgagtatttttatgataagaaaattattcaagaaacaatagcttttaggtcattaaatcagagtacttcaacaaagttattgaataaacagcacatgcacatgatgtttatagataactttaatcgctatctgactagattttttaatgttggcaatcaattgttagaattgaaaaaggggattaatgaaaaaataattgacgaaactgataaagtcgaatttattacaacattagccggctgggcaagaatgaaaataatgaatacagacggtaataataaattattattaaatcttgaaaaatatggtgttttaatattcgagaaatccattgatgctgatgctgatgcatacagtacttggactatggatgaaaaacctattatcatcttagggaaaaataaaaatattactgctagacgtaactttgacttagcacatgagctaggtcatttgttacttcataaagatgttgaatttgtacatttatctagaacagaatataaagaaaaagaaagagaagctgatttatttgcaggagcatttttattacctgaaaatgaatttaaagttgattttagtataataaaaaaagtatctaaccctgatagttatattatgttgaaagaaaaatggttagtatctgttcaagctatggccatacgtgccaaacaattaaaattattgactgaacagcaatatagatatttctggatgtctataaacaaaaaagggtataaatactgtgagccattagatgatgaaatacctattgctaggccaataaaggttaatagtattgttaatcatttattgaatagaggcttaattcaaatagatgaaatcatggacgactggttaatagacttagaccttatatgtgatttaacaggtatagacatgcaattgtttgaaagttataaggagaagtctaaaaaagaaacaaatcttcttttgtttaaagataaagaatga

SEQ ID NO: 414620 - DNA, 699 bp, Staphylococcus aureus
atgaaattaaaaaatattgctaaagcaagtttagcactagggattttaacaacagggatgattacaactactgctcagccagtaaaagcaagtgtacagaatagttcattaactgctatctctaatgatactcaaaaattgaaggaatattatacgggggatagctttgattataaaaatttaaaaggttataaagaaaaaaatattttaacgcttttttattattatcaacaaattgatgtcacattaacaggtaaagaaaaaatagatttaaaaaaggatgacgaagtatcgaatgtagacgtatttgttgttagagaaggttcaggtagacaagcaacaaattacacaatcggtggtgtgacaaaatcaaatagtaaagactatacagataacgttcaaagtgtaagcttaaaagtaaagagcgaaacgggaagaaacttaatgagtgtttcaaattctgattatagtattaataaagaagaaatttcattaaaagaacttgattttaaattaagaaagcatttaattgaaaagtatggactatataaaaaagaacctaaagacagtaaaattaaagttactatgaaagatggtgggttctacacatttgaattaaataaaaagttacaagaacaccgcatgggcgatgtaattgatggtactaaaataaaagaaattaatgttgaattaaactaa

SEQ ID NO: 414621 - DNA, 213 bp, Staphylococcus aureus
atgacagacgataatgttgatgatcatattataaagaatcacttagaaatgattgttgaccgagtggctaatgataaagagttttatatttttgactcccttatacaaggacggagttatcaagatattagttatgtcttagagtgtacagaacaatctgtaagattatggtataaaaccttattagataaaattttggaggtgatagaatga

SEQ ID NO: 414622 - DNA, 129 bp, Staphylococcus aureus
atgagcgctaaaaaagaaaatgcagaaaactatgaattagtaggagtagaagtaactgaaaatggaggctatcgagtaacaataaaaaaacctgatggaactattgtggtagttcctccaaacagataa

SEQ ID NO: 414623 - DNA, 486 bp, Staphylococcus aureus
atgtcatctgacacaaacagtttagcacatacaaaatggaattgtaagtatcatattgtctttgcacctaaatacagaagacaagtgatatatggaaaaataaaaaaagatatagggattatattgcgtcaattatgtgaaagaaaaggtgtagagataattgaagcagaggcatgtaaagatcatatccatatgttagtaagtataccacctaaacttggggtatcatcatttgttggctatttaaaaggaaaaagtagtttaatgatatttgatagacatgctaacttaaagtatagatatggaaatagaaagttttggtgtaaaggattttatgtggatacagtaggtagaaataaaaaagtgattgaaaattatattcgtaatcaattacaagaggatatcgttgcagaccaaatctcaatggaagaatatttagatcctttcactggagagaaaaatagaaaaagaaagaaaaaagagtaa

SEQ ID NO: 414624 - DNA, 852 bp, Staphylococcus aureus
atgacaaaaattattttagcagctgatgtaggcgggacgacttgtaaattaggtattttcacacctgaattagaacaattacataaatggtctattcacactgatacatctgatagtacaggttatacacttttgaaaggaatttatgattcgtttgttgaaaaagtaaatgaaaataattataatttttcaaatgtacttggcgtaggtattggtgttccaggtcctgttgactttgaaaaaggtacagtaaatggagcagtaaacttatattggccagaaaaagttaatgtacgtgagatttttgaacaattcgttgattgtccagtgtatgtagataatgatgctaacatagctgctttaggggagaaacacaaaggtgctggtgaaggtgccgatgatgttgttgccatcacacttggtacaggactaggtggaggaattatttcaaatggtgaaatcgtacatggtcataatggctctggcgcagaaataggtcattttagagcagacttcgatcaacgatttaaatgtaattgtggtcgttctggatgtattgaaacagttgcttcagcgacaggcgttgttaacttagtcaacttctactatccgaagttgacgtttagatcttctatattagaattgattaaagaaaataaggttacagcaaaagctgtttttgatgcggctaaagctggtgaccaattctgtattttcataactgaaaaggttgcaaactatattggatatttatgtagtattattagtgttacaagtaatccgaaatatatcgttctaggtggaggaatgtctactgcaggacctattttaattgaaaatattaaaacataa

SEQ ID NO: 414625 - DNA, 558 bp, Staphylococcus aureus
atgaaaaagaaaaattggatttatgcattaattgtcactttaattattataattgccatagttagtatgatattttttgttcaaacaaaatatggagatcaatcagaaaaaggatcccaaagtgtaagtaataaaaataataaaatacatatcgcaattgttaacgaggatcaaccaacgacatataacggtaaaaaggttgagctgggtcaagcatttattaaaaggttagcaaatgagaaaaactataaatttgaaacagtaacaagaaacgttgctgagtctggtttgaaaaatggcggataccaagtcatgattgttatcccagaaaacttttcaaaattggcaatgcaattagacgctaaaacaccatcgaaaatatcactacagtataaaacagctgtaggacaaaaagaagaagtagctaaaaacacagaaaaagttgtaagtaatgtacttaacgactttaacaaaaacttggtcgaaatttatttaacaagcatcattgataatttacataatgcacaaaaaaaatgttggcgctattatgacgcgtga

SEQ ID NO: 414626 - DNA, 345 bp, Staphylococcus aureus
atgatagatgtaaatcaaccagaacattttgatgaattaaatgaagataagaaatgtgcattaatggaattttgtaattcgctagataaaataaagtcttttaatacaaggcattcttcttacggtttgaaacatgtatttgaagcagaatatcgtgaagagttagaaaatacatttgaaggtagctatataactaatggtcagtttaaaggtgcaatgttaaaagctggttttgatgttaaaaataaaactcaattgaactggcattttaatttgagtgagcgaagtataaagaatctaggggatagtaaaatttataaaagtataaaaggagcacgtatttaa

SEQ ID NO: 414627 - DNA, 2253 bp, Staphylococcus aureus
atggcgattaaagaaaaagataaaatattagaagtcaattcgctagagatacccgatgaattaattgaattgccacaatgggtactatggcgagctgaatggaacgagaagcaacagcaatattcaaaaataccatatagctatgctggatataaagcaagctccacgaacagtgatacatggacaatatttgatgcgattaattctatatatgaacaaaatgataggtatgacggtataggcttcgtaataagcgaacatgataactatattgtgttagatatcgataatgcaattgatgaaagtagccaaattatctcaaatttagctttagatatgactaagatgacatattgtgagaagtctcctagtggtactggcttacactgcttttttaagggtgagttacctaaagaacgtaagaaaaagcgtagtgacctagatatcgaattatatgataatgctaggtttatgacgatgacaggtgagtcaattgggcaaagggaaataagtgatgaccaatcactgttaaataatctagtggaacgttattttaaacaagaagaactacctgaaacgtttatcggaaataatatcactaataaaagtaatctagatgatgaagatgtaattaatattatgttgaaatcaaaacaaaaagataaaatcagtaacttattgcagggcaattatgagccttatttcgatagtccgagtgaagctgttcagagtctgttgcactatttagctttctacactagtaaagataaggaacaaatggaacgtatatttttgaattataacaatttaacggacaaatggggttctaaacgtggcaataccacatgggggcaattggaactggataaggccataaataatcaaagtgaagtatatgttaaacctggtaaagaaaacccatctaaacttataaaaaaaggctcctggtggttctaccctaatgatgatactaataggaaacctaaattcaatcacactattatggccaaatttatttgccaggaatatcacattgttagatatccagatgctgatagcgatatttatatttataatactcaaactgggatttatgaactagataaaacaggccgtaaattacgaaaaattattaggagtttagataatttaaaagataattctgttaaagaggttagaaactatattgttgatatgtgtgatgttagaagtgtagttaataatgaatatgtggctgtaaaaaatggtctcgtacattatcacacaaagatatttaggacatttacaccagatatttttgtcattgataaattgtcgactgcatataatcctaatgcttatgatgagtttgtagataccacaatacaaaaagtgtcgtgcaatcatgaaacaaccattatgaatatttatgagatgtttgcacaagtattatatccgaaaattttgattgataaaattatctatttactaggaacggttgcagataatggaaaatcaacagtacaacatatgataaaagccacatttgatagtggggggcgaatatcatcagtgagtcctcaaaggctagcgaacaatcattttgctgggtctagtatctatggaaaaatggctaatatggttgatgatctgccgaatattgaaattgaagatgctggaaatattaaaacggctatcacaggtggttatttagagattgaacaaaagggtaaggccagtcaatcagtacgtatgcaaacgccatttattattgctagtaatcactatcctaaattcaaagaaagtggcgaacaaattaataagcgattgcatattatcccgttcaactacagttttaaagacgatcaagaacgtttaagtgttactgaaagtgctaacaagatttataacaaaagcgccaaagagtacgttttaaaattagcgattgatacattggctgacatgctacaacgagatggctcatatatcacacctaatgaacgatctgataaaagtgctgagttattctcagataacaataatcctttaagtgagtatcttgaaaatagaaatattgatttcttcttgaataatccaggtgcagaaacatacaaagattacaaagtatggtgtcacagtaattttattagaaagcccgttaataaagatgattttatcacgctattagaaaattattatgatattgagtggaaacgttctgttaaatatacagaaaataatgttagatggggatttaaaaaactaaaaaggtag

SEQ ID NO: 414628 - DNA, 249 bp, Staphylococcus aureus
atgcctagatttaatagtaatgttacttctaaaaaaagaaaaaagaacgttcacgttgaaatagttaataaagattttttaccaactagaaatgaatttgaaactgataaagtagaaatagagttaagaaatgctgaagtaaaaaaagttgttttttttaatgaagaagtaaagtattcaaaacaaaataatgatctgaaatttactaatttcatttctgattttacacaacaaaaattaatgctataa

SEQ ID NO: 414629 - DNA, 1770 bp, Staphylococcus aureus
atgtctaaaactcaacatgaagtaaaccaaaatattgaccctttaaaaatggctgaatcacttgaacctgaacaactaaatgaaaaaactttaaatgacatgcgttcaggatcagaagtgctagtagaagctctacttaaagaaaatgtggattatttattcggttatcctggtggtgccgtactacctttatacgacacattttatgatggtaaaatcaaacatattttagcaagacacgaacaaggtgctgttcatgctgcagaaggttatgcacgtgtatctggtaaaacaggcgtcgttgtagttacaagcggtccaggtgcaactaatgtaatgacaggtattacggatgcacattgcgactctttaccactagttgtattcactggacaagttgctacaccaggcattggtaaagatgcattccaagaagcggatattctatctatgacttcaccaattacaaaacaaaattatcaagtgaaacgtgttgaagatatccctaaaatcgtacacgaagctttccatgtagctaattctggacgcaaaggtcctgtagtgattgattttccaaaagatatgggtgttttagctacaaatgtggatttatgcgacgaaatcaatattccaggttatgaagttgttacagaaccagaaaataaagacattgacactttcatctcacttttaaaagaagcgaaaaagcctgtcgtattagccggcgcaggtattaatcaatcaaaatcaaatcaattattaacacagtttgttaataaacatcaaatcccaacagttactactttactaggtctaggtgctgtaccttatgaggatacactatttttaggtatgggaggtatgcatggttcttatgctagtaacatggcattaactgagtgtgatttactcattaatttaggtagccgcttcgatgatagattagcaagcaaacctgatgcctttgcacctaacgccaaaattgtacatgtagatattgatccttcagaaatcaataaagttattcatgtagatttaggtattattgcagactgtaaaagatttttagaatgtttaaatgataaaaatgttaagactatagaacacagtgactgggttaaacattgtcaaaataataagcagaaacatccatttaaacttggtgaagaagatcaagtattttgtaagccacaacaaacaatcgaatatatcggcaaaattacaaatggtgaagcaattgttactacagacgtgggacaacatcaaatgtgggcagctcaattttatccatttaaaaatcacggacaatgggttacaagcggtggtttaggaacaatgggattcggtattccttcgtcaattggtgccaaattagctaatcctgataaaacagtcgtatgcttcgtcggtgacggtggtttccaaatgacaaaccaagaaatggcactattacccgaatatggtttagatgtcaaaatcgtactaatcaataatggaacattaggtatggttaaacaatggcaagataagttctttaatcaacgcttctcacactcagtatttaatggtcaacctgattttatgaaaatggcagaagcatatggcgtcaaaggtttcttaatcgataagccagaacaactggaagaacaattagatacagcgtttgcttatcaagggccagctttaattgaggttcgtatttcccctactgaagctgtaaacccaatggttccaagtggcaaatcaaatcatgaaatggagggcttataa

SEQ ID NO: 414630 - DNA, 462 bp, Staphylococcus aureus
atgaagatagcaattataggtgcaggcatcggtggattaacagctgctgcactattacaagaacaaggtcatactattaaagtctttgaaaaaaatgagtcagttaaagaaattggcgctgggattggtatcggagataatgtgcttaaaaaactaggtaatcatgacttagctaaaggtattaaaaatgctgggcaaatcttatctacaatgacagtgttagatgacaaagatcgcccgctaactactgttaaattaaaaagtaatacattgaatgtgacgttaccacgccaaactttaattgacattattaaatcttatgtaaaagatgatgcaatatttacaaatcatgaagtcacgcatatagataatgagacagataaagttaccatacatttcgcggaacaagagagtgaagcatttgatttatgtattggtgctggtatgtcaacaattttttag

SEQ ID NO: 414631 - DNA, 453 bp, Staphylococcus aureus
atgtcatctgacacaaacagtttagcacatacaaaatggaattgtaagtatcatattgtctttgcacctaaatacagaagacaagtgatatatggaaaaataaaaaaagatatagggattatattgcgtcaattatgtgaaagaaaaggtgtagagataattgaagcagaggcatgtaaagatcatatccatatgttagttagtataccacccaaacttggggtatcatcatttgttggctatttaaaagggaaaagtagtttaatgatatttgatagacatgctaacttaaagtatagatatggaaatagaaagttttggtgtaaaggattttatgtggatacagtaggtagaaataaaaaagtgattgaaaattatattcgtaatcaattacaagaggatatcgttgcagactggtatgtcaacatttttttagacagttttcatgtgtag

SEQ ID NO: 414632 - DNA, 1407 bp, Staphylococcus aureus
atgggattagctgcaatcggggcttctctgatagggagtttttgggaaggaacccttttgatacttattttttccggcgctcattttcttgaagattacgctgaaggaaaaagtaaaagagaaattactaagctactcgaaatgaacccaacgacagctaaattaatcctacctgatggaaacacaaaaattgttgatgtcagtgaattaaaagttggagatcaactccaagtgctgaacggtgatcaagttccaattgatgggattattttatccggtactacctcaattgatgaatcttctattaatggagaaagtataccgaaagagaagtctaagggtgacgaagtttttggaagtacgattaatggaacaggtacttttactatggaagtcactaaggaaaacaaggatactgtattctctaaaattttacaattagttagtcaaaaccaagataatcaaacaaaagctgccagtatcattcaaaaattcgagcctaaatatgttaatatagttttaatcgcaataccattagtaatgttacttgctccttttctatttgattggacatggtcgcaaagtgtatacaggggattagtgcttttagtcgcagcttcaccgtgtgctttggcagcagctactgtatctgtaacattgtctacaacatctaacctagctaaaaaaggcgtgctttcaaaaggaagtacttacctatcacaattagcggatatagatgcaattgccttcgataaaacaggaacccttacgaacggagaacctaaagtaacaaattactatttcactcattctgtgaacgaagaaaatattattgatattatagtcgcccttgaaaaggaatccaatcacccactcgctaatgctattttagaaaaatttgaagttaaaaataaaatagacatcgaagttactaatcaaattggaaaaggtctgacaggagattataatggaaaaaattatcgtattggtaagcctacttcttttgaaagtgcttctgaagagtatacccagttcaatcatgattgggcatcagaaggaaagacggttgtatacgtagcagaaaatgaagaagttattgggattatagctctaatggatattccgaatgagcatgctaaagaaacaattaattactttaagaaacttggtatccacacgactttaattactggtgattcggaaatgacgggaaaagctgtaggcgaacaattgggaatagacgaagttatcgctaatgtaatgcctgaagataaatccagaattatagaagaacaaaaagaaaaatttggagttactgccatggttggagatggtgtgaacgatgcaccggcccttgttaatgctgatgttggtatagctatgggggcggtactgatgtggcagtag

SEQ ID NO: 414633 - DNA, 249 bp, Staphylococcus aureus
gtggcagtagaagtatctgatttggttttaatgcagaacaatttatctaaattagtacagtctcataaaatttcctcaaatatgggtcgtgttattaggcaaaatattattttttcaatggcagttgttgcctttttagttgtcgttagtttgttaggattaactgatattacaatcagtgtaattgttcatgaaggaagtactttagttgttatactaaatggacttcgattattaagatctaaataa

SEQ ID NO: 414634 - DNA, 1236 bp, Staphylococcus aureus; identical to SEQ ID NO: 409865

SEQ ID NO: 414635 - DNA, 429 bp, Staphylococcus aureus
atgacacaaatattaataattggatatacaagccttgttattttatctggaaatgttgcagcgacagacttgggaatcacttcggaaatcaaaatgataacaactgttaaaacagctgatgcaataccaacgctaatcccccaacgtaaagccataattgtaacaagtgttggtaataaaatattcgcgacattattcccaattagaatcgttgtaataaactcgcttggtttttcaagtaactttacaatgccttttgcttttttatcacctttatcagcttcagttttaaattttgttttattggcagccgttaatgccgtctcgcttcctgaaaagaaaaacgaaataaatatcaatataattatggcaatgatcacgcgtgtagtctccttattgtcatatcttatttttattgtagttacttaa

SEQ ID NO: 414636 - DNA, 1272 bp, Staphylococcus aureus
atgaaatcagattatcaaattaattcaggtaatataacaagtcattctgaagaaacaagtgcagtgtcaaaaattggctatgaaattgaaaatgccaataataataatttgggggtagaaaaaatcaggaggcaaattgtaaagttacaaaaaaaggacagtttccctaaaaatttaaaatatgtcgatagttatacagacccaaaaacaggtacgactacaagtgcctttttaaataaagacacaggcaaagttactttaggtatgacaggtactaatgtaaacaaagatgcaagtgaaacgctaaaggattttggggccgatgtcaatattggccttcatatagtcacagataaagatccacattataaaaatacccaagactttatcaaaaatatcaaaaaagactatgatattgatattattaccggacattcgctgggcggtagagatgcgatgattttaggtatgagtaatgatattaaacatatcgttgtgtataatccagcgccattagcgatcaaagatgtgagtggtctttatgccgatgaagatgaacttaaaaaattgattgaaaagtacgatggtcacattgtaaggttcgtgtctgatgaagacgaattagatgcagttgtccgcaatcatttatatgaaactgctggggaaaaaatagtacttaaaaatggagaaggccattcaatgagtggttttttaataagcggaacacaggctataatcttagccgaattaaacaaagttaaaggctatcaagacgaaaataataaatcattaaaatccgttcgtaaacaaacgaggcatagattacataaagtagagacgttaagagcgaattggattcaaacaacgggtggatcactctcttcctcccaacaacaattattagaagctttaacagcactaaccattgccgaaggcttaaatcaattagtgaatgaagaaagccaacatttgaaaaaaatgtatcacgcgatggcacataaatttggagacaactggaaaaaaacgcaagaagttggaaatgaaattggtgaaaaattaacctctgaagaggttatagatgaattaagaaaaggtggcgcgtatgaaagtaaacttgaaacagatcccaaaagaaaaattgatgataagataaagaaattaaatgatgtttataaaaattgtaatggctatatcgcaaaaattaaacagagtatcgaagcaattgtttctaatgaccaaatgttagcgagccagattgatgggatgatgtaa

SEQ ID NO: 414637 - DNA, 819 bp, Staphylococcus aureus
atgaaacgtttggaaaataaagttgcagtcgtaacaggagcaagtacaggtatcggacaagcttctgcaatcgctttagctcaagaaggtgcgtatgtattggcggtagacatagctgaagcggtatcggagactgtcgataaaattaaaagtaatggtgacaatgcgaaggcgtataatgtggatatttcagatgaacaacaagtggtagactttgtgtctgacataaaggaacagtttggaagaatcgatgtgttgtttaataatgccggtgtggatgatgcgtctggtagaattcatgagtatccaatagatgtgtatgacaagattatgaatgtagatatgcgtgggacatttttaatgacgaaaatgatgttacctttaatgatgaatcaaggtggctctattgttaatacgtcttcattttcaggacaggcagcagatttgtatcgctcaggatataatgctgcgaaaggcgcagtgattaattttacaaaatcaatcgcaattgagtatggtcgtgatggcattcgatccaatgcaattgcaccaggtacaattgaaaccccgttagtagataaactgacaggtacgagtgaggatgatgcaggtaaaacatttagagaaaatcaaaaatggatgactccgctgggacgtttaggtaaaccagaagaagtaggcaagctcgttgtctttttagcatctgatgacagttcatttattactggtgaaacaattcgcattgacggtggtgttatggcttacacatggcctggcgagatgttgagtgatgattcgtggaagcggacattggaataa

SEQ ID NO: 414638 - DNA, 366 bp, Staphylococcus aureus
atgttaaaagaaaaagaaagttttagattgctatatcaagctataagagagattgcagataaaattggagataatcagttagaaactaattccgttagtttattattattggactttgattttgaacatgaagtatttgatgaattgtatcttgcgattttaaaatatttaaatacagtaagtatagagaacataagtcatagtgaacttttgaatttaatagaaaatacgattccagaagatcgagagattaacacgtttgtaaaaaataaaataataattggctttgctaataattatttccctgaattacaagtattagcaaacgaaataaaatctgatatggctagttcattaaaacaatga

SEQ ID NO: 414639 - DNA, 1341 bp, Staphylococcus aureus
atgaaaaatacatttaatccattacaaagattacatttctatgcagcaatatttattgctccactgttaatcactttaaccatttcgggcattggttacttgttctttccagaagttgaaaataatatttataagaataagttttttggtgacagtgatgtaaaaacgcatcaaacattaaatgatgcagtacatcaagttgaacaacaatatgaaggattctttgtaagtaaagttagcatacttgatgaaccatataacaaacgaattacactgagtgatatggcaggaaatcaacgttacgtctttctagatcgtaacaatcaatttgttgcagatcaaaatgcgaaacatacgtattctaatgtgatgcgaagtatacatagttctttgtttactgaaaatactattattaattatttagtagagttaaccgcatgttggacgatattcatgattttatctggtacttatttactcattaagaagcatttaatttctaacaaaagtaaggcacttcgttggcaaaagtggcacgcaatgattggagttatcattgcaattccagtatttgtattagtcataactggattgccatggtctggttttatgggtagtaaaattgccggtatgatggacacaaacggtgaccttggtcaaggtgaattagcgattaatccacctaaatcagatttgaacgaattaccttgggctacacgtaaaaataaacagccagcttcatccgaaaaaggttcaagtggtcatcatggtaatgcagcaatgcctcaaaccaaattagattatcaaatatctattgataaggtcgttgaacaggcgcaaaaatctggtattaaaaagccgttttcaatcgtatatccaagtgatagaaatggtgcctttattgtatctaatactagtaattcaggtgttactgggctagatgtatcaccttacaaggaacaaacactttatttcgatcaatatagcggtaaaaagttaggtacgattaaatatgatgactacggtattattgctaaatggtttacatggggcattccgcttcacgaaggtcatttattcggcattttaaataaaatcattaatttatttgtatgtatcgctttattagtagccattggcatggggtttgtctcttggataaagcgtacaaaaaatactgcagtaaaagtaccacatcgcgtaaaaaaaccagcatctatatcactcataatatgtttaattgtattaggattattaatgccattatttggattatcacttatccttgtatttataattgaattaatattatatattaaagatcgtcgtgctaaacaataa

SEQ ID NO: 414640 - DNA, 531 bp, Staphylococcus aureus
atgcctaaagcagatgatgatacatcaagttattcaacaagtgagaaaaatgggattacattaatgttattaattggtaagtttttagagaaattcggttctcgtagagatgttcaaacgactatatttattgatgagggttgggcttttagtgcttcaagacaaggtaaaaaagttggtaagcgtataaaaagaacgggacgttctgagaataattcacttgtatttattacacaatcggtaaaagataaagcagatgatgatggtggtaactttggttgtcattttgcatttgatgaaaaagatgaacgtgaggatattttaaaatctttaggcttagaatattcaaaagaatctcctgaaaatatggagatgttgaaagatttaaagaaaggtcaatgtatattcagtgatttttatggacgtgttggaaaaatggttgtacattgtccatttgaggaaatgactgaagcatttagaacacaagaagattctgcaagctctaaagctgaagaaaaatttgcgatgtaa

SEQ ID NO: 414641 - DNA, 831 bp, Staphylococcus aureus
atgactgaaacttggaattttattaatacaggaagtaaagacccatattataatatggcaatggatgaagcgttattaaattttgtctctagaggtgaaattgatccagttatacgtttttacacatggaatcctgcaacattatcaatagggtatttccaaaggttacaaaaggaaattgatatagataaggttaaagagaaaggttttggtctcgtaaggcgtcaaactggtggccgtggggtgctacatgataaagagttaacttacagtgtgattgtgcctgaatcgcatccgaatatgccttctacagttacagaagcgtacagagtgatttcacaaggattattagaaggatttaaaaacttaggatttgatacttattttgcggtacctaaaacgcctgaagagcgtcaaaaattaaaacaacctcgaagttcagtgtgttttgatgcaccaagttggtatgagctagttgttgaaggccgtaagattgctgggagtgctcaaacgagacaaaagggcgtaatcctccaacacggttcgattttacaagatattgatattgatgaactgtttgatatgtttatttataaaaatgaaagattaaaattaaaaatgaaagaggcattcgttgaaaaagcagttgccatcaatgatatttcagataaacacattactattagtcaaatggaagaagctttcgagaaaggttttaagaaaggtttaaatatagaattaaagccacttgaattaacagaagctcaattggcagaagtggaagaattaactgaaaaatatcgttcagatgaatggatgtttagaaagtag

SEQ ID NO: 414642 - DNA, 387 bp, Staphylococcus aureus; identical to SEQ ID NO: 413903

SEQ ID NO: 414643 - DNA, 831 bp, Staphylococcus aureus
atgttaactaatccaaacactttaggtattttcgaaaaaaatattatggaaatccgtgaaatcgtccataatgctggtggtctattatattatgatggtgcgaatttaaacgctattatggacaaagttcgcccaggagatatgggatttgatgctgttcatttaaacttgcataaaacatttactggtccacatggtggtggcggtcctggttcaggtccagtcggtgtagtaaaagaactagcaagttacttaccaaagccaatggttattaaagatggcaacaaatttaaatatgataatgacattaaaaattctatcggacgtgtaaaaccattttatggtaactttggtatttacttaagagcttatacgtatattagaactatgggagcaactggacttaaagaggtttctgaagcagcggttcttaatgcgaattatattaaagcacgtttatctgaacactttgaaataccttataaacaatattgtaaacacgagtttgtgttaagtggtgtgcgtcaaaaagaatttggtgtacgtactttagacatggctaagcgattattagatttcggtgtacatccaccaacaatctacttcccattaaatgttgaagaaggtatgatgattgaaccgactgagacagagtctaaagaaacacttgattattttatcgatacattaattagtattgctgaagaagctaaaaatgatcctgataaagtgttagaagcaccacatacaactgtgattgatcgattagacgaagctacagctgctcgtaaaccaatattaaaatttgaaaatcttaaacaggaaaaataa

SEQ ID NO: 414644 - DNA, 294 bp, Staphylococcus aureus
atgttagttagtataccacccaaacttggggtatcatcatttgttggctatttaaaagggaaaagtagtttaatgatatttgatagacatgctaacttaaagtatagatatggaaatagaaagttttggtgtaaaggattttatgtggatacagtaggtagaaataaaaaagtgattgaaaattatattcgtaatcaattacaagaggatatcgttgcagaccaaatctcaatggaagaatatttagatcctttcactggagagaaaaataaaaaaagaaagaaaaaagagtaa

SEQ ID NO: 414645 - DNA, 240 bp, Staphylococcus aureus; identical to SEQ ID NO: 409857

SEQ ID NO: 414646 - DNA, 255 bp, Staphylococcus aureus; identical to SEQ ID NO: 407390

SEQ ID NO: 414647 - DNA, 147 bp, Staphylococcus aureus; identical to SEQ ID NO: 414010

SEQ ID NO: 414648 - DNA, 153 bp, Staphylococcus aureus
gtgtataagaaagcgcgagcatttgatgaaatacttgatggaatgacaaatgctattcaacattcagttaaagaaggtattgaacttgatgaagcagtaggaattatggcaggtcaagttatctataaatatgaggaggaacaaggaaaatga

SEQ ID NO: 414649 - DNA, 555 bp, Staphylococcus aureus
atggttgatttagcaagtagttggatagtattttttcttccaatgatcaattggtttatccctaaaaattacgtcaaaattagcaaggaagaatttgatgtcttaaacatttttaaaccagttagaaataatgctttttggcctgttacaggcgctttagttttacttgtaaccttgtcgaaaaaatatatttatttgctcaatacccatttagacaaaaaaacagtaataatcatatgttttgtcatatttctatgtgtaataacatgctttttatacttgaaccaaaaactaaaactacatatttgggacaaaaataaaggtgaaaacgaaaaaatcatattaatacctacgttaaaaaatatatttatatctttgtttgcttatatattttttggcagcttttcaattttatctctaaatatattattaacaatggattctcaaaatataataggatttcttggttggattgtaacgacgtcatgtttcttttttgttaacaggtcatcaataatcggtggaaatgttcgtgtcatacttaaaaagcattag

SEQ ID NO: 414650 - DNA, 477 bp, Staphylococcus aureus; identical to SEQ ID NO: 407374

SEQ ID NO: 414651 - DNA, 477 bp, Staphylococcus aureus; identical to SEQ ID NO: 407374

SEQ ID NO: 414652 - DNA, 477 bp, Staphylococcus aureus; identical to SEQ ID NO: 407374

SEQ ID NO: 414653 - DNA, 477 bp, Staphylococcus aureus
atgaaagaaagatatggaacagtctataaaggctctcagaggctcatagacgaagaaagtggagaagtcatagaggtagacaagttataccgtaaacaaacgtctggtaacttcgtaaaggcatatatagtgcaattaataagtatgttagatatgattggcggaaaaaaacttaaaatcgttaactatatcctagataatgtccacttaagtaacaatacaatgatagctacaacaagagaaatagcaaaagctacaggaacaagtctacaaacagtaataacaacacttaaaatcttagaagaaggaaatattataaaaagaaaaactggagtattaatgttaaaccctgaactactaatgagaggcgacgaccaaaagcaaaaatacctcttactcgaatttgggaactttgagcaagaggcaaatgaaaaacaagaaaatgcattatctgattattattctttcaaggactag

SEQ ID NO: 414654 - DNA, 357 bp, Staphylococcus aureus; identical to SEQ ID NO: 408993

SEQ ID NO: 414655 - DNA, 306 bp, Staphylococcus aureus
atgaaagaaagatatggaacagtctataaaggctctcagaggctcatagacgaagaaagtggagaagtcatagaggtagacaagttataccgtaaacaaacgtctggtaacttcgtaaaggcatatatagtgcaattaataagtatgttagatatgattggcggaaaaaaacttaaaatcgttaacgatatcctagataatgtccacttaagtaacaatacaatgatagctacaacaagagaaatagcaaaagctacaggaacaagtctacaaacagtaataacactgtctcttatacacatctga

SEQ ID NO: 414656 - DNA, 420 bp, Staphylococcus aureus
atgtcgaaaaagaaaattttaatattaactagtattatgttaatcatattaattagtgttgcaggtatctatttaaaagtgaaatatgacgaaaaagaaaaacaaaaatcaatttattataaagaacaacaagagcgcattacactttatctcaagcataataccaaagagccaaacacaatcaaaactgtacatttcactaactttgaaacaagtcctatgggtagtgctgtgattgaaggctacatcaatgaaaacaaaaaagctgattttactgcttatgctacaccagaacataattatcaatttggtggtgctatgatagaaagtcaaaaattaagcgagttactaaagccagcacaggaattaaaatcgcctgacgaaatcaaagaagaattagataaaaaagaaggccactag

SEQ ID NO: 414657 - DNA, 1119 bp, Staphylococcus aureus
atgattaatcaagtatatcaattagttgcacctagacaatttgaagttacgtataacaacgtagatatttacagtgactatgtcattgtacgtcctttatatatgtcaatttgtgctgccgatcaaagatattatactggtagccgtgatgagaatgtcttatctcagaaattgccaatgtctttaattcatgaaggtgttggtgaggtcgtatttgacagtaaaggtgtgtttaataaaggtacaaaagtagttatggtaccgaatacgccgacagaaaaagacgatgtcattgctgaaaactatttaaaatcgagctacttcagatcaagtggacatgatgggtttatgcaagattttgtgttgctaaatcatgatagagctgtaccactacctgatgatattgatttaagtattatttcatatacagagcttgtaacagtaagtttgcatgctattcgtcgttttgaaaagaaatctatttcaaataaaaatacatttggtatttggggtgatggtaacttaggttacattacagccattttattacgtaaattatatccagagtctaaaatatatgtctttggtaaaacagattataaattgagtcacttctcatttgttgatgatgtcttctttattaataaaatacctgaaggcttaacatttgatcatgcatttgagtgtgtgggtggtcgcggtagtcaatcagccataaatcaaatgatcgattacatttcaccagaaggaagcattgcactgttaggtgtaagtgagttcccagtagaagttaatacacgtctagtattggaaaaaggactaacgttgattggtagtagtcgaagtggttcaaaagatttccaagatgttgtagacttatacattcaatacccagatattgtagataaattagcgttgttaaaaggccaagaatttgaaattgcaacaattaatgatcttacagaagcttttgaagcagacctgtctacatcttggaaatcttttgaaccacttcgactactaccaatcaacgttagtcctttttccaatactagacgtgtattaacttctattgggaacgtgttcagttattcgttgaaggacatagtgaaaacctag

SEQ ID NO: 414658 - DNA, 408 bp, Staphylococcus aureus
atgagtttggtttatttattaattgctatacttgtgattatggcgatgatacttctaatgtctaaacgtagagcattggctaaatatgccgggtacatagcgttggttgcacctgtaatttcatctatctattttttgattcaaataccatcagtagctaaactgcaatatctttctacctctattccatggattaagacattagatattaatttagatttacgtttagatggtttaagtttaatgttttctcttattatttcacttattggaattgcagtattcttctatgcaactcaatatttatcctctcgaaaagacaatttaccaaggttttatttttatttaacgttatttatgttcagtatgattggtattgtattatcagacaatacgatattgatgtaa

SEQ ID NO: 414659 - DNA, 330 bp, Staphylococcus aureus
gtgatttcttctttcgattcacctttactaataatttctccagttaatggattttttagtgttggtgtcgttattgtcttctcacctttttgtccttctcttgttactttttctgtccctggtgctaaatcaggattaaatttacgttctttctcgaatggaatttcttctttttctacaatcgagtctccttttacaggtccatattttgttacgctatcgaccggtggtctaactacgtctcctgtttctggattcttaattcctggtttacctggaacttcttctttctctcctgttggtaacttcggatcaaattcgtctcgatga

SEQ ID NO: 414660 - DNA, 690 bp, Staphylococcus aureus
atggcaatgctaggttcatatatgcagatgattgaacccaagttcgtagttacagcagtaatgttaaatatttttagtgcgcttatcatcgccagtgtaatcaatccctataaatctgatgatactgatgttgaaattgataacttaacgaaatccacagaaactaaaacattgaatggaaaaacaggaaaacctaagaaagttgcctttttccaaatgattggtgatagtgcgatggatgggtttaaaatcgctgttgtagtagccgtaatgttgttagcatttatttcattaatggaagcaattaatatcatgtttggtagtgttggtttgaactttaaacagcttattggctatgtgtttgcaccaatcgcattcttaatggggattccatggagcgaagctgttccagctggctctttaatggcgactaaattaattacaaatgagtttgtagcaatgcttgattttaaaaatgtcctgggtgatgtatcagctcgaacacaaggtatcatttcagtttacttagtaagcttcgctaattttggtacggttggtatcatcgtaggttcaattaaaggcattagtgataaacaaggagaaaaagttgcatcctttgcaatgaggttgctacttggttcaactctagcttcaatcatttcaggatcaatcattggcttagtattgtaa

SEQ ID NO: 414661 - DNA, 366 bp, Staphylococcus aureus
atggaatgggtatttttttctgcttacattgttatattcattgcatgtgcatatgtgatatatagacgaattgaagaagtgagcgaggaagttgatgaattacagcgtgacataaaaaagaatgaaaaattattggaaaattataagaaagaaaacagaccaatcgaatatatcgttgagttaaaaaacggtgtgtatttacaagaaaaatatacatcgtcgtttgcggaaaggacaacgcttattacaactagtaatgtttttgaagctaaatcatatgacaatttattttcagctaaaatagatgctgaatttatgcgtggtcgtgtattaaaatataaaccgaatttagaggtggttgaatag

SEQ ID NO: 414662 - DNA, 153 bp, Staphylococcus aureus
atggtaccagaagaaaaaggttctattactttgtcaaaagaagctgctatcatatttgcaaccgcaaaattcaaaccatttaagaacagaattaaaaataacccactaaaaacaaatccatttcttaaattacatgaaaacaaaaaatcttaa

SEQ ID NO: 414663 - DNA, 171 bp, Staphylococcus aureus
atgaaaaatttaatcctaagtgttcaacatcttttagctatgtacgcaggtgccatcttagttccaatcattgttggtacaagtttgaagtttacacctgaacaaatcgcttacttagttacagtatatttatgtgtggggttgccacatttttacaagccaataaagtaa

SEQ ID NO: 414664 - DNA, 186 bp, Staphylococcus aureus
atgcaacaacaagcatatataaacgcaacgattgatataaggatgcctacggaagttgaatatcagcattttgatgatgtggataaagaaaaagaatcgctggcagattacttatataacaatcctaacgaaatactagagtatgacaatttaaaaattagaaatgtaaatgtagaggtggaataa

SEQ ID NO: 414665 - DNA, 2658 bp, Staphylococcus aureus; identical to SEQ ID NO: 414251

SEQ ID NO: 414666 - DNA, 864 bp, Staphylococcus aureus
atgacaatgatggatatgaattttaaatattgtcataaaatcatgaagaaacattcaaaaagcttttcttacgcttttgacttgttaccagaagatcaaagaaaagcggtttgggcaatttatgctgtgtgtcgtaaaattgatgacagtatagatgtttatggcgatattcaatttttaaatcaaataaaagaagatatacaatctattgaaaaatacccatatgaacatcatcactttcaaagtgatcgtagaatcatgatggcgcttcagcatgttgcacaacataaaaatatcgcctttcaatctttttataatctcattgatactgtatataaagatcaacattttacaatgtttgaaacggacgctgaattattcggatattgttatggtgttgctggtacagtaggtgaagtattgacgccgattttaagtgatcatgaaacacatcagacatacgatgtcgcaagaagacttggtgaatcgttgcaattgattaatatattaagagatgtcggtgaagattttgacaatgaacgggtatattttagtaagcaacgattaaagcaatatgaagttgatattgctgaagtgtaccaaaatggtgttaataatcattatattgacttatgggaatattatgcagctatcgcagaaaaagattttcaagatgttatggatcaaatcaaagtatttagtattgaagcacaaccaatcatagaattagcagcacgtatatatattgaaatactggacgaagtgagacaggctaactatacattacatgaacgtgtttttgtggataagcggaaaaaggcaaagttgtttcatgaaataaatagtaaatatcatagaatatag

SEQ ID NO: 414667 - DNA, 240 bp, Staphylococcus aureus
atgattacgcatgatatgcatttattgtctgagtatagttcaagaacagttgtattatcaaaaggacaagtcgttgctgataccacgccagtattgatattaaatgataaaaaaatctgtgagattgcatcattgagacaaacatcgctatttgaaatggccgaatatatagggattagcgagccacagaaattagtacaattatttattaaccatgataggaaggtgagacgccaatga

SEQ ID NO: 414668 - DNA, 183 bp, Staphylococcus aureus; identical to SEQ ID NO: 411580

SEQ ID NO: 414669 - DNA, 894 bp, Staphylococcus aureus
ttgttaaaagatgacacgattgatgttatccatgtttgtacgccaaatgactcgcattgtgaaattactgtagcagggttgcatgccggtaagcatgtgatgtgtgaaaaaccaatggctaaaacgacagcagaagctcaaaaaatgatagatacagctaaatcaacaggtaaaaaattaacaataggttatcaaaatcgcttcagaccagatagtcaatttttacatcaagcagcgcaacgtggcgacttaggagacatttacttcggaaaggcacatgccattcgtcgtcgtgcagtaccgacatggggtgtctttctaaacgaagaagcccaaggtggaggacctttaatcgatattggtacgcacgcattagatttaacgttatggatgatggataattatgaaccagaatcagtgatgggttcaacattccataaattaaataagcagcatgatgcggcaaacgcttggggttcatggaatccagatgaatttacagttgaagactctgcgtttggctttattaaaatgaagaacggagcgacgatcattttagaatccgcttgggcgattaattctttagaagtggatgaggcaaaatgttcattatcaggaacgaaagcaggtgctgatatgaaagatggtctacgtattcatggtgaagatatgggcacactttataccaaacacgttgaattggaaaacaaaggcgtcgacttttatgaaggtaatgaagtggatgaagctgaagaagaagcaaaagcttggattgatgcagttgtaaatgatactgaaccagttgtgaaaccggaacaagcaatggtagttacaaaaattcttgaagcgatttatcagtctgcaaaatcaggcaaagcaatttactttgaataa

SEQ ID NO: 414670 - DNA, 183 bp, Staphylococcus aureus; identical to SEQ ID NO: 411580

SEQ ID NO: 414671 - DNA, 183 bp, Staphylococcus aureus; identical to SEQ ID NO: 411580

SEQ ID NO: 414672 - DNA, 183 bp, Staphylococcus aureus; identical to SEQ ID NO: 411580

SEQ ID NO: 414673 - DNA, 183 bp, Staphylococcus aureus; identical to SEQ ID NO: 411580

SEQ ID NO: 414674 - DNA, 543 bp, Staphylococcus aureus; identical to SEQ ID NO: 408578

SEQ ID NO: 414675 - DNA, 543 bp, Staphylococcus aureus; identical to SEQ ID NO: 408578

SEQ ID NO: 414676 - DNA, 252 bp, Staphylococcus aureus
atgatgaataaccgcgaacaaattgaacagtccgttataagtgctagtgcgtataacggcaatgacacagagggattactaaaagagattgaggacgtgtataagaaagcgcaagcgtttgatgaaatacttaagggtttacctaatgctatgcaagatgcactcaaagaagatattgatcttgatgaagcaataggaattatgacgagtcaagttgtctataaatatgaggaggaacaggaaaatgactaa

SEQ ID NO: 414677 - DNA, 183 bp, Staphylococcus aureus; identical to SEQ ID NO: 411580

SEQ ID NO: 414678 - DNA, 183 bp, Staphylococcus aureus; identical to SEQ ID NO: 411580

SEQ ID NO: 414679 - DNA, 183 bp, Staphylococcus aureus; identical to SEQ ID NO: 411580

SEQ ID NO: 414680 - DNA, 267 bp, Staphylococcus aureus; identical to SEQ ID NO: 414071

SEQ ID NO: 414681 - DNA, 402 bp, Staphylococcus aureus
ttggaaacgtttaaaaattggaagaagaaaccaggtaagccgttagatgttcagttagatgaattagctgacatgttggcgttcgggttaagtattacaaaccaacaagagactgatgagatattaattaatactatcgtagacgcaattatgaaagataacaaaccacatggtgaatttgattttgcagatttcaaaataacgaaaattatgattgcaggtattggcgatacagtgttgcgtagcgatactacatcaagagcttatacgttagcgctaccttttggtttagcagttcaatactattcaatcgaccaactcattgacgcatacaaaaagaaaatgaaaaggaaccacgaaagacaagatggaacagcagacgcaggaaaaggatacgtgtaa

SEQ ID NO: 414682 - DNA, 147 bp, Staphylococcus aureus; identical to SEQ ID NO: 414010

SEQ ID NO: 414683 - DNA, 147 bp, Staphylococcus aureus; identical to SEQ ID NO: 414010

SEQ ID NO: 414684 - DNA, 147 bp, Staphylococcus aureus; identical to SEQ ID NO: 414010

SEQ ID NO: 414685 - DNA, 147 bp, Staphylococcus aureus
atgcaatacaatactactagatatatagacgaaaatcaagataataaaacattaaaagatatgatgaaaaatgggaaacagcgcccatggagagaaaagaaaatagataatttaaggttctgttgcaaagttagaaatatagtataa

SEQ ID NO: 414686 - DNA, 147 bp, Staphylococcus aureus
atgcaatacaatactactagatatatagacggaaatcaagataacgaaacactcaaagatgttacaaaaagtgggaaacaacgtccgtggagagaaaagaaaatagataatttaaggttctgttgcaaagttagaaatatagtataa

SEQ ID NO: 414687 - DNA, 480 bp, Staphylococcus aureus
atggctgtacaattagtattaaactttattatcgcagtgttttggttgtttgtaacaaatagttacacaacaaataactttgtgttaggtttcatctttggcctagttcttgtttacctcttacacagagtgttaccaggtagattttatgtcatcacgctatatcgtattattaaattagttattattttcttaatcgaactgattaaagctaattttgatgttttgaaaattattattaaaccttcgattaaaaatgaaccaggattctttgtttatcacacagatttaaaaaaagattggcaaattgtcttgctgtctaatttaattacattaacacctggtactgtagtgcttggtgtaagtgatgatcgtacaaaaatttatattcatgccatagatttttcaactaaagagcaagaagtagaaagtattaaaacatcattagagaaaattgtaagagaggtgggcgaaatataa

SEQ ID NO: 414688 - DNA, 168 bp, Staphylococcus aureus
ttgccacttattgccaaaggttacgggaataaagaaattgcagagaaattatttgtatctgtgaaaacagtagaagcacataagacgcatattatgacaaagcttggcttaaagagtaaacctgagctagttgaatatgcattgaaaaagaaattattagagttttag

SEQ ID NO: 414689 - DNA, 483 bp, Staphylococcus aureus
ttgaaaatagtcattgccgatgatcacgctgttgtccgtacggggttctctatgattttaaattatcaaaatgatatggaagttgttgcaacggctgcagatggcgtcgaagcttaccaaaaagtaatggaatataaacctgatgtgttactaatggatttaagtatgccaccaggtgagtcaggtcttatcgctacgagtaaaattgctgacagttttcctgaaactaaaatactaatattaacaatgtttgatgatgaggagtatttgttccatgtgttgcgtaatggtgcgaaaggttacatattgaaaaatgcacctgatgaacaattattgttagctattcgaactgtatataaaggtgaaacatatgtagatatgaaacttacaacatctttagtgaatgaatttgtatctaattcaaatcaggacactgcaaacacaacagatccttttaaaatcttatcaaaacgagaactataa

SEQ ID NO: 414690 - DNA, 1260 bp, Staphylococcus aureus
atgaaatttacagagttaactgttaccgaatttgacaactttgtacaaaatccatcattggaaagtcattatttccaagtaaaagaaaatatagttacccgtgagaatgatggctttgaagtagttttattaggtattaaagacgacaataacaaagtaattgcagcaagccttttctctaaaattcctactatgggaagttatgtttactattcgaatcgtggtccagtaatggatttttcagatttaggattagttgattattatttaaaagagttagataaatatttacagcaacatcaatgtttatatgttaaattagatccgtattggttatatcatctatatgataaagatatcgtgccatttgaaggtcgcgagaaaaatgatgccttagtaaacttgtttaaatcacatggttacgagcatcatggctttacaactgagtatgatacatcgagccaagtacgatggatgggcgtattaaaccttgaaggtaaaacacccgaaacattgaaaaagacatttgatagtcaacgtaaacgtaatattaataaagcgataaactatggtgttaaagtcagattccttgaacgtgatgagttcaatcttttcttagatttatatcgtgaaactgaagagcgtgctggatttgtgtcaaaaacagatgattatttttataactttattgacacatatggagataaagtattagtaccattagcatatattgaccttgatgaatatgtgttaaagttgcaacaggaattgaatgacaaagaaaatcgtcgtgatcaaatgatggcgaaagaaaacaaatcagataaacaaatgaagaaaattgcagaattagataagcaaattgatcatgatcagcatgaattattgaatgcaagtgaattgagcaaaacggacggcccaattctaaaccttgcttctggcgtttattttgcaaatgcatatgaagtgaattatttctctggtggttcatcagaaaaatataatcaatttatgggaccatacatgatgcattggtttatgattaactattgcttcgataatggctatgatcgttataatttctatggtttatcaggtgattttacggaaaacagtgaagattatggcgtataccgctttaaacgtggatttaatgtacaaatcgaagaattaataggggatttctataaaccaattcataaagtgaaatattggttgttcacaacattggataaattacgtaaaaaattaaagaaatag

SEQ ID NO: 414691 - DNA, 879 bp, Staphylococcus aureus
atgttaaaaaataaaaatattgcactgttatttgaaaaagattctacaagaacgcgatgtgcatttgaagttgcagcgcatgatcaaggtgcaaatgtaacttatttaggcccaactggatcacaaatgggtaaaaaagaaacaactaaagatactgcacgtgtgcttggtggaatgtatgatggcattgaataccgtggtttttcacaaagaacagtagaaactttagctgaatattcaggcgtaccagtgtggaatggtttaactgatgaagatcatcctactcaagttcttgctgatttcttaacagcaaaagaagtcttaaaaaaagattatgcagatattaactttacatatgttggagatggtcgtaataacgttgcaaatgcattaatgcaaggtgctgccattatgggtatgaacttccatttagtttgtccaaaagaattaaatccaacagatgaattattaaatcgctgtaaaaatattgccgctgaaaatggtggcaacatattaatcacagatgatattgaccaaggtgtaaaagtttcggatgtaatttacactgatgtttgggtatcaatgggtgaacctgatgaagtatggaaagaacgacttgaattattgaaaccatatcaagtaaataaagaaatgatggataaaactggtaatccaaatgttatttttgagcattgcttaccatctttccataatgctgatacgaaaattggtcaacaaatttttgaaaaatatggtattcgagaaatggaagttacagatgaagtattcgaaagtaaagcttcagttgtattccaagaagctgagaacagaatgcatacaatcaaagcagtcatggttgctacattgggtgaattttaa

SEQ ID NO: 414692 - DNA, 183 bp, Staphylococcus aureus
atgatgcaaacctataaagtatgtctttgtatcaagttctttgcatctaaatgtgattataaattaaagaaacattatttcgtgaaaagtacgaatgaggaaaaagccacgaacatggtattaaaactgattcgtaaaaagctcccgttcgaaacggaacaaatgagttctacgaatttttag

SEQ ID NO: 414693 - DNA, 618 bp, Staphylococcus aureus
ttgcatgatatcacgtcaggtgaaattttcattcaaggtaaatcaatcactaaagcccatggtaaagcattattagaaatgcgccgaaatataggcatgattttccaacattttaatttagttaaacggtcaagtgtattacgaaatgtactaagtggacgtgtaggttatcaccctacttggaaaatggtattaggtttatttccaaaagaagacaaaattaaagcaatggatgcactagaacgggtcaacatcttagataaatataatcaacgctctgatgaattatcaggtggccaacaacaacgtatatctattgcacgtgcgctatgccaagaatccgaaattattcttgcagatgaaccagttgcttcattagacccattaacaacgaaacaggttatggatgatttaagaaaaatcaaccaagaattaggcatcacaattttaattaatttacattttgttgacttagcaaaagaatatggcacacgcatcattggtttacgtgatggtgaagttgtctatgatggtcctgcatctgaagcaacagatgacgtatttagtaaaatatatggacgtacaattaaagaagatgaaaagctaggagtgaactaa

SEQ ID NO: 414694 - DNA, 1140 bp, Staphylococcus aureus
atgaatcaagcagtcatagttgcagctaaacgaactgcatttgggaaatatggtggcactttaaaacatttagagccagaacaattgctcaaacctttattccaacattttaaagagaagtatccagaggtaatatctaaaatagatgatgtagttttaggtaatgttgttgggaatggtggcaatattgcaagaaaagcattgcttgaagcggggctcaaagattcaatacctggcgtcacaatcgatcggcaatgtgggtctggacttgaaagtgttcaatatgcatgtcgcatgattcaagccggagctggcaaggtatatattgcaggcggtgttgaaagtacaagtcgagcaccttggaaaatcaaacgaccgcattctgtgtacgaaaccgcattacctgagttttatgagcgtgcatcatttgcacctgaaatgagcgacccatcaatgattcaaggtgctgaaaatgtagccaagatgtatggtgtttcaagagaattacaagatgaatttgcttaccgaagtcatcaactgacagcggaaaatgtaaagaatggaaatatttctcaggaaatattacctataaccgttaaaggagaactattcaacactgatgaaagtctaaaatcacatattccgaaagataactttggccgatttaagcccgtaatcaaaggtgggaccgttaccgctgcgaatagttgtatgaaaaatgatggtgcagttctattgcttattatggaaaaagatatggcatacgaattaggtttcgatcatggtttattatttaaagatggtgttacggtaggtgttgattctaatttacctggcattggtccagtaccagccatttccaacttactaaaaagaaatcaattaacgatagaaaatattgaagtcattgaaattaacgaagcgttcagtgcacaggtggttgcctgccaacaagctttaaatatttcaaatacgcaattaaatatatggggtggtgcattagcatcaggtcatccatacggtgcaagcggtgcccaattagtgacgcgattattttatatgtttgacaaagagagtatgattgcatctatggggattgggggaggtctaggaaatgcagcattatttactcgattctaa

SEQ ID NO: 414695 - DNA, 672 bp, Staphylococcus aureus; identical to SEQ ID NO: 414492

SEQ ID NO: 414696 - DNA, 759 bp, Staphylococcus aureus
atgtttaaggtagttatttgtgatgatgagcgaattattcgagaaggtttaaagcaaatcattccttggggagactatcatttcaatacaatatacactgctaaagatggtgttgaagcattatcactaattcaacaacatcagccagaattagtaattactgatattcgtatgccacgtaaaaatggcgtcgatttactcaatgatattgcgcatctagattgtaatgtcatcatattatcgagttacgatgactttgaatatatgaaagccggcattcaacatcatgttcttgattatttattaaaaccagtagaccatgcacaattagaagttattttaggaagacttgtccgtaccttattagagcaacaatcacagaacggccgtagcttagcaccttgtcatgatgccttccaaccattattaaaagtagaatacgatgattattatgtaaatcagattgttgatcaaattaagcaatcttatcaaacgaaagtgactgtttcagatttaattcaacatatcgatgttagtgaatcgtatgcgatgcgaacatttaaagatcatgttggtattacaattgtcgattatttaaatcgctatcgtattttacaatctctacaattgttagatcgacattataagcactatgaaattgcagacaaagtaggcttttcagagtataaaatgtttagctatcattttaaaaaatatttacaaatgtcgccaagtgattattgtaagcaagcaaaatag

SEQ ID NO: 414697 - DNA, 402 bp, Staphylococcus aureus; identical to SEQ ID NO: 408532

SEQ ID NO: 414698 - DNA, 1560 bp, Staphylococcus aureus
atggaatcatttagtgtgaattgttttaatttagattcttacttaacaatttataatatggataataatgatatgatgagctcatttcttaaaattacagatgattattatagaagattaaaaaatgtaaaaattagtaaagagaacgatgatttattttgtctttcagaattgttaagtgaaaaattatcggtaaaacaaaaatctggatattttttaggatataaaattaatagtaaaattgatgaagagtttgatttattaagatttagtgaagaaaatattcttaatattgaactaaaaaatagtatgccgaaaggtggcatagagtccattgaggaccaattaagaaggcataaatttatattatcaattcttaataaaagagtaatttcttatacattcatttccgatgacaagaaattctataaaatagataataatgacaattttatagaaagtacagttgatgatttggtagaatcaatctctgagaattacctgcaaaataatgaattgttagatatagatgttaataaatttataatatcaccttattctgaagatgatgagtttctaaatcatgaatattatttaagccaaaatcagaaacaaataaaaaatgaaataaagaactgtacacaaaataaaatatttgtgagaggccatgctggaacagggaagtcacttttattgtttgatttagctaaagaatttcataatcagggtaaaaaagttttattgcttttttgtgggcaattatctaataaatatgatttaactgacaagtttggatttaaaataagtgaaatatcttcttatagaagatgtttagaagatgaaaatataaataataaagaacttgatgaagctgacataatatttattgacgaggcacaacgtatatacgataaacaatatagaaatttattaaaaaagtttcctgaaaaaaagattttttttgcttatgatccaaagcaaatattagctaaaagtgagaaatatagatttgaaattctattaaaggaatacaataatgacaaacatttgaataaatttgttgagcttaagcaaaaaatcagaactaataatgagatgatagcatttattgatagaatattagatttatcagctagaggtcataaaaattataattacaagaatataaatttaacttacttttcaacgaaagaagatgcaatagagttcatcagaaaattggaagaagaacattatcagtgtatagagctgacacaatatttgactagaagtacaagtgttttaaaaagaaaatatatttataatgcttcattagatgtacataaagttatagggagagagtttgagaaagttgtagttataatagatcaacattttttttacgataatgaagggaaattgaattccgactacatggagtattatccatatttggaacctgaaggtatttatcaagcactgacaagagtgaaaaaacaacttcatatagtaattataaataatcctaatgtctatatagaaattcaaaagattatgacacgcaaatttgataaaacatag

SEQ ID NO: 414699 - DNA, 801 bp, Staphylococcus aureus
atgcctttagaaacacctacaaagtatgactcccttttaaagaaaaaggtttctttaaaaacgagttttaccttcatgttaatcattgtgcttatcatttggagcttcatttatacggggtttaattttggagatttaatgataggaatacctcaaataggtgatctattcaaacaaatgattccacctgatttcgagtatttacaacaaattacaacgccaatgttagatactattcgaatggctatcgtaagtacagtattaggtagcatcgtttcaataccaattgcgttattatgtgctagcaatatcgttcatcaaaagtggatttcaataccctcgcgttttattttaaatatagttcgtactataccggatttgctattagcagcaatatttgtggctgtatttggaatcggtcaaattccagggatattagcactgtttattttaactatctgtattattggaaaattattatatgaatcattggaaacgatagatccaggtccaatggaagcaatgacggctgttggcgctaataaaataaaatggattgttttcggtgttgtaccacaagccatatcgtcatttatgtcatacgtattatatgcatttgaagtaaatatacgtgcttcagctgtgcttggattagtcggcgctggcggtattggattgttttatgatcaaacacttggtttatttcaatatccaaaaacagcaacgattattttatttactttagttattgtcgtcgtcattgattacatcagtacgaaagtgagggcacatctcgcatga

SEQ ID NO: 414700 - DNA, 957 bp, Staphylococcus aureus
atgaaaaattttaagtgtttatttgtattaatgttagcagtcattgtttttgcagcagcatgtggaaattcaagttctttagataatcaaaagaacgctagtaatgattcggattctaaatcaggaggatacaaacctaaagaattaacagtacaatttgtaccttcgcaaaatgctggaacattagaggctaaagcaaaaccattagaaaaattactatctaaagaattagggattccagttaaagtgtctgtatcaactaactacaatacaattgttgaagctatgaagtctaaaaaagttgatgttggtttcttaccaccaacggcatacacattagcacatgatcaaaaagcagctgatttattattacaagcacaacgttttggtgtaaaagaagatggttcagcaagtaaagaacttgtagatagttataaatcagaaattcttgttaaaaaagactcaaaaattaaaagcctgaaagatttaaaaggtaagaaaattgccttacaagatgtaacatcaactgctggatatacattcccacttgcgatgttaaaaaacgaagcaggtattaatgcaactaaagatatgaaaattgtgaatgttaaaggtcatgaccaagcagttatctcattattaaatggagatgtagatgctgcggctgtatttaacgatgcacgtaatactgtgaaaaaagaccaaccaaatgtatttaaagacacacgaattttaaaattaacacaagctattcctaatgacacaatttctgtaagaccagatatggataaagatttccaagaaaaattgaaaaaagcttttatagacattgctaaatcaaaagaaggtcacaaaattattagcgaagtttattcacatgaaggatacacagaaacgaaagattcaaatttcgacattgtaagagagtacgaaaaattagttaaagatatgaaataa

SEQ ID NO: 414701 - DNA, 1080 bp, Staphylococcus aureus
atgaggatagcgattcttggcgctactaacattaagcatatgtcattattatcacattatttaaaccacattgatttgaatatcaatgaggtggacattatatacactgacaaatatgatatcgaagaacatatccaaggcatcaataattactataaatataaagtagatattaaagaagattggacatttatcaaaaaagctattgcttactatcgatttaggccatacgctatgaaaattcttaaagaaaatcgttatgattttgtcatagtatggggaagttatacaggacacttatttaaaagttttttagaaaaacactataaaaataaattcattttaaatataagggactacttttttgaaaataataaacttattaagtatagaatgaaaaaaatcgttgatgctagcagggtgacaacattatcttcagaaggttttcttaaatttttacctaaatctgaaaaatatagaattatttatagttataacatgagtattattagagaaagtaatgtaaccgatgggtttaaaaaaagatggccaattaatataggttttattggtaatgttagatttaatgagataaatcaaaaattgataaaggaactggcaaatgattcaaggttccatatgcaatattttggaacagggtcggaaaaattagaagtctttgctcgagaaaattttattaataatattacattttctggcggctttgacttgaaagaaacaccgaaatatttaaatgaaattgatatacttaataatttgtttggtaatcaaaatattgctttagatactgctttatccataagaatgtattatgcgttgtttttaaacaaacctattattacaacagacgatacattcaccgctacagaagctaataaattcggactgggttttagtattaatccagaaaatttaaaaggtattggtgatgaattgatggattggtataacaatttggatgtaatggacattaatcataaaagagaagcttatagaaacgatgtaattgaaaataataaacagttctatcaagagataggcaggatatttaatgaataa

SEQ ID NO: 414702 - DNA, 570 bp, Staphylococcus aureus
gtgaagaaaatcattagtatcgcaattatagttttagcgttggtattaagtggttgtggtgtccctacgaaatcagaagtggctcaaaagtcatcgaaagttgaagtgaaaggcgagcgaccaacaatacatttcctaggacaagcaagttatgaaaatgatatgaatatcgttaaagatcaattggaaaatgcaggatttaacgtgaagatgaatatccaaccagattatggtagctatcgtacacaacgtcaagccggcaattatgatatccaaattgatgactggatgacagtgtttggtgacccgaactatgctatgacggcattatttagttctacaggatcaaatagtttattgaaagataaacatgtagaccagttgttaaataaagcttctactcaaaatgaagcagatgttaaacaaacatataagcaaattgaagatgaagttgtatttgataaagggtatatggcgcctttatatggatcaaaaaagaatttagtatatgacaataaagtgttagataaaaatagtgttggattgccaaattcacgtgcattaatatga

SEQ ID NO: 414703 - DNA, 501 bp, Staphylococcus aureus
atgactttcgaagaaaaactaagtcaaatgtacaacgagattgcgaataagattagcagtatgataccggtagagtgggaaaaagtatatacaattgcttatgtagatgatcaaggtggagaggtcatttttaattatacaaaacctggaagtgaagatttgaattattacacggatatatctagagattataatatttcagaagaaatatttgatgatttatggatgaatctttattacttgtttatgaatttgagggatttatttaaaaaagaaggtcttgaaccatggacatcatgtgaatttgattttacaagagagggtaatttgaaagtatcgtttgattatatagattggattaaattaggttttggtccatcaggaaaggaaaactactatatgtataaaaagtttggtgttataccagaaacggaatatgaaattaataaagttaaagaaatcgagcaatttattaaagagcaagatgaagctgaactatag

SEQ ID NO: 414704 - DNA, 381 bp, Staphylococcus aureus
atgattaatattactactttgattagagatacgattgttaaggagagcgttacagatgaagcaaatgtatttaactatacaatagatgaccattttcacgaaaaaactgacaaacctattgttcggatatacccattaccatttaaccctgacgcatacgctgatgataatgaattttcaagagaatatcattaccaaattgatgtttggtgctctcaagatgaaccgaatgaacaagcagaaagaattgtcgattcgctcaaagcaatgaattttcaatgttattacagagaaccgttatacgaaagtgacgtcatgtcattcagacatattataagagcaaaaggctcgattttatcaatgaaattggaggaaaattaa

SEQ ID NO: 414705 - DNA, 126 bp, Staphylococcus aureus
atgactaaacaaatattaagactattattcttactagcgatgtatgagctaggtaagtatgtaacggctaatgatgatgtagaggcgccgagtgattacgtctttcgagcggaggtaagtgagtga

SEQ ID NO: 414706 - DNA, 252 bp, Staphylococcus aureus
atgaataaccgcgaacaaattgaacaatcaattatcagtgctagtgcctataacggtaatgacacagagggattactaaaagaggttgaagacgtgtataagaaagcgcaagcgtttgatgaaatacttgatggaatgacaaatgctattcaacattcagttaaagaaggtgttgaacttgatgaagcagtagggattatggcaggtcaagttgtctataaatatgaggaggaacaggaaaatgagtattag

SEQ ID NO: 414707 - DNA, 31875 bp, Staphylococcus aureus
gtgaattatcatgataaaattcaaaagtttagtattcgtaaatatacagttggtacattttcaactgtcattgcgacattggtatttttaggattcaatacatcacaagcacatgctgctgaaacaaatcaaccagcaagcgtggttaaacagaaacaacaaagtaataatgaacagactgagaatcgagaatctcaagtacaaaattctcaaaattcacaaaatggtcaatcattatctgctactcatgaaaatgagcaaccaaatattagtcaagctaatttagtagatcaaaaagtagcgcaatcatctactactaatgatgaacaaccagcatctcaaaatgtaaatacaaagaaagattcggcaacggctgcgacaacacaaccagataaagaacaaagtaagcataaacaaaacgaaagtcaatctgctaataaaaatggaaacgacaatagagcggctcatgtagaaaatcatgaagcaaatgtagtaacagcttcagattcatctgataatggtaacgtacaacatgaccgaaatgaattacaagcattttttgatgcaaattatcatgattatcgctttattgaccgtgaaaatgcagattctggcacatttaactatgtaaaaggcatttttgataagattaatacgttattaggcagtaatgatccaataaacaataaagacttgcaacttgcatacaaagaattggaacaagctgttgctttaattcgtacaatgcctcaacgtcaacagactagccgacgttcaaatagaattcaaacgcgttcggttgagtcaagagctgcagagcctagatcagtatcagactatcaaaatgcaaattcatcatattatgttgaaaatgctaatgatggttcgggctatcctgttggtacatatatcaatgcttctagtaaaggggcgccatataatttaccaactacaccatggaatacattgaaggcctctgactcaaaggaaattgctcttatgacagcgaaacaaactggagacgggtaccaatgggttattaagtttaataaaggacatgctccacatcaaaatatgatcttttggtttgcattaccagcagaccaagtgccagtaggaagaactgactttgtaacagttaattcagatggaacaaatgtacaatggagtcatggagcaggagcaggtgcaaataaaccacttcaacaaatgtgggaatatggagtaaatgatcctcatcgttcacatgactttaaaataagaaatagaagtggccaagtaatatatgactggccaactgtccatatttattctttagaagatttatctagagcgagtgattattttagtgaagctggagcgacacctgctactaaagcttttggtagacaaaattttgaatatattaatggtcaaaaacctgctgaatcaccgggtgttcctaaagtttatactttcatcggtcaaggtgatgcaagttatacaatttcatttaaaacacaaggtccaactgttaataaattgtactatgcagcaggtgggcgtgctttagagtacaatcaattatttatgtacagtcaactatacgtcgaatcaacgcaagaccatcaacaacgtcttaatggtttaagacaagtggttaatcgtacatatcgcataggtacaactaaacgtgtagaagtgagtcaaggaaatgtacaaacgaaaaaggtattagaaagtacaaacctaaatatagatgattttgttgatgatcctttaagttatgttaagacgccgagtaataaagtgttaggattttattcgaataatgcaaatactaatgcttttagaccgggtggagcccaacaattaaatgaatatcaattaagtcaattatttactgatcaaaaattacaagaagcagcaagaactagaaacccaataagattaatgattggtttcgactatcctgatgcttatggtaatagtgaaactttagttcctgttaacttaacggtattacctgaaatccaacataatattaaattctttaaaaatgacgatactcaaaatattgctgaaaaaccattttcaaaacaagctgggcatccagttttctatgtatatgcaggtaaccaagggaatgcttccgtgaatttaggtggtagcgtaacatctattcaaccattacgtattaatttaacaagtaatgagaattttacagataaagattggcaaattacaggtattccgcgtacattacacattgaaaactcgacaaatagacctaataatgccagagaacgcaatattgaacttgttggtaacttattaccaggggattactttggaacgatacgttttggacgtaaagaacaattattcgaaattcgtgttaaaccacatacaccaacaattacaacgacagctgagcaattaagaggtacagcattacaaaaagtacctgttaatatttcgggaataccgttggatccatctgcattggtttatttagttgcaccaacaaatcaaactacgaatggtggtagtgaggcagatcaaataccatctggttatacgatacttgcgactggtacacctgatggggtccataacacaattactatacaaccaaaagattatgttgtattcataccaccagtaggtaaacaaattagagcagtagtttattataataaagtagttgcatctaatatgagtaatgctgttactattttgccagatgacattccaccaacaatcaataatcctgttggaataaatgccaaatattatcgtggtgatgaagttagctttactatgggggtttcagatagacattctggattaaaaagtacaactattacgacattgccaagtggttggacatcaaatttaactaaatccgacaacaaaaacggctcattagctattacaggtagagtctctatgaatcaggcatttaacagtgatattacatttaaagtatcagcgacagacaatgtcaataatacgacaaatgatagtcaatctaaacatgtgtcaattcatgtaggtaaaattagtgaagatgctcatccgattgtattaggaaatactgagaaagttgtagtagtcaatccgactgctgtatctaatgatgaaaagcaaagcataattactgcctttatgaataaaaaccaaaatataagaggatatttagcatcaactgatccagtaactgtcgataataatggtaatgtcacattacattaccgtgatggctcatcaacaacgcttgatgctacaaatgtgatgacatacgaaccagttgtgaaatctgaatatcaaactgccaatgcagctaaaacagcaacggtaacgattgctaaaggacaatcatttaatattggtgatattaaacaatattttactttaagtaatggacaagctattccaagtggcacatttacaaatattacatctgatagaactattccaactgcacaagaagttagtcaaatgaatgcaggcacgcagttatatcacatagttgcttcaaatgcatatcataaagacactgaagatttctatattagtttaaaaatcgttgatgtgaaacaacctgaaggcgatcaacgtgtctatcgtacgtcaacatatgatttaactactgatgaaatctcaaaagtaaaacaagcttttattaatgcaaatagagatgtaattacacttgccgaaggtgatatttcagttacaaatacacctaatggtgctaatgtaagtactattacagtaaatattaataaaggtcgattaacgaaatcattcgcgtcaaacctagctaatatgaatttcttgcgttgggttaatttcccacaagattatacagtgacatggacgaatgcaaaaattgcaaacagaccaacagatggtggtttatcatggtctgatgaccataaatctttaatttatcgttatgatgctacattaggtactcaaattacgacgaatgacattttaacaatgttaaaagcaacaactacagtgcctggattgcgaaataacattactggtaatgaaaaatcacaagcagaagctggcggaagacctaactttagaacgactggttattcacaatcaaatgcgacaactgatggtcaacgtcaatttacgttgaatggtcaagtgattcaagtgttagacatcatcaacccttcaaacggttatggtgggcaacctgttacaaattcaaatactcgtgtaaaccatagtaattcaactgttgttaacgtaaacgaaccggcagctaatggtgctggcgcatttacaattgaccacgttgtaaaaagtaattctacacataatgcaagtgatgcagtttataaagcacagttatacttaacgccatatggtccaaaacaatatgttgaacatttaaatcaaaatacaggaaatactactgacgctattaacatttattttgtaccaagtgatttagtgaatccaacaatttcagtaggtaattacactaatcatcaagtgttctcaggtgaaacatttacaaatacgattacagcgaatgataactttggtgtgcaatctgtaactgtaccaaatacatcacaaattacaggtactgttgataataaccatcaacatgtttctgcaacggcaccaaatgtgacatcagcaactagtaagacaatcaatttattagcaactgatacaagtggtaatacagctacaacttcattcaatgtaacagtgaaacctttgcgtgataaatatcgagttggtacttcatcaacggctgctaatcctgtgagaattgccaatatttcgaataatgcgacagtatcacaagctgatcaaacggcaattattaattcattaacgtttactgaaacagtaccaaatagaagttatgcaagagcaagtgcgaatgaaatcactagtaaaacagttagtaatgtcagtcgtactggaaataatgccaatgtcacagtaactgttacttatcaagatggaacaacatcaacagtgactgtacctgtaaagcatgtcattccagaaatcgttgcacattcgcattacactgtacaaggccaagacttcccagcaggtaatggttctagtgcatcagattactttaagttatctaatggtagtgccattccagatgcgacgattacttgggtaagtggtcaagcgccaaataaagataatacacgtattggtgaagatataacagtaactgcacatatcttaattgatggtgaaacaacgccgattacgaaaacagcaacatataaagtagtaagtacagtaccgaagcatgtctttgagacgaatagaggcgctgtgttcccaggcgtatctgatgtgtatgatgcgaaacaatatgttaaaccagttaatgattcttggacacaaaatgcgcaacgtatgaatttccaatttacaaattcatatggaccaagtaaagatgtggttggtatttcaacaagggatattcgagttgcttatgataatcaccaaacgcaaattatcaagattttagcaaaagttaaaccagatccaccgcgaattgatggcaactctgtgacttataaagcaggtcttactaaccaacaaattaaaattaataatgtgttaagtagttcatctattaaattatttaaagcagataatacgccattaacgattacaaacacgacttatggtagtggtaatactgcagttgtaacggtaagtgatgcgttaccaaatggtgtgattaaggcaaggtcttctatcacaatgaataatgtgacgtacactactcaagatgaacatggtcgagcgatagatgtaacaagaaatgaatctgttgattcaaatgacagtgcaacagtaacagtgacaccacaattacaagcaactactgaaggcgctgtatttattaaaggtggcgacggttttgatttcggacacgtagaaagatttattcaaaacccgccacatggggcaacggttgcatggcatgatagtccagatacatggaagaatacagtcggtaacactcataaaactgcggttgtaacattacctagtggtcaaggtacgcgtaatgttgaagttccagtcaaagtttatccagttgctaatgctaaggcgccatcacgtgatgtgaaaggtcaaaatttgacacatggtacaaacgctattgattacattacatttgatccaaatactaatacgaatggtattacagcagcatgggcaaatagacaacaaccaaataaccagcaagcaggcgttcaacatttaaatgtcgatgtcacatatccaggtatttcagctgctaaacgagttcctgtaactgtgaacgtatatcaatttgaattccctcaaactacttatacaacaacagttggtggcactttagcaagtggtacgcaagcatcaggatatgcacatatgcaaaacgctaatggtttaccaacagatggatttacgtataaatggaataatgcagcaactggtacaaacgatgcaaactgggcagctatgaataaacctaatatggctaaagtcgttaacgcaaaatatgacgtcatctataacggacatacttttgcaacatctttaccagcgaaatttgtagtaaaagatgtgcaaccagcgaaaccaactgtgactgaaacagcggcaggagcgattacaattgcacctggagcaaaccaaacagtgaatacacatgccggtaacgtaacgacgtatgctgataaattagttattaaacgtaacggcagtgtcgtgacaacatttacacgtcgcaataatacaagtccatgggtgaaagaagcatctgcagcaactgtagcaggtattgctggaactaataatggtattactgttgcagcaggtactttcaatcctgctgatacaattcaagttgttgcaacacaaggtagtggtgaaacaatcagtgatgagcaacgtagtgatgatttcacagttgtcgcaccacaaccgaaccaagcgactactaagatttggcaaaatggtcatattgatatcacgcctaataatccatcaggacatttaattaatccaacacaagcaatggatattgcttacactgaaaaagtgggtaatggtgcagaacatagtaagacaattaatgttgttcgtggtcagaataatcaatggacaattgcgaataagcctgactatgtaacgttagatgcacaaactggtaaagtgacgttcaatgccaatactataaaaccaaattcatcaatcacaattactccgaaagcaggtacaggtcactcagtaagtagtaatccaagtacattaactgcaccggcagcacatactgtcaacacaactgaaattgtgaaagattatggttcaaatgtaacagcagctgaaattaacaatgcagttcaagttgctaataaacgtactgcaacgattaaaaatggcacagcaatgcctactaatttagctggtggtagcacaacgacgattcctgtgacagtaacttacaatgatggtagtactgaagaagtacaagagtccattttcacaaaagcggataaacgtgagttaatcacagctaaaaatcatttagatgatccagtaagcactgaaggtaaaaagccaggtacaattacgcagtacaataatgcaatgcataatgcgcaacaacaaatcaatactgcgaaaacagaagcacaacaagtgattaataatgagcgtgcaacaccacaacaagtttctgacgcactaactaaagttcgtgcagcacaaactaagattgatcaagctaaagcattacttcaaaataaagaagataatagccaattagtaacgtctaaaaataacttacaaagttctgtgaaccaagtaccatcaactgctggtatgacgcaacaaagtattgataactataatgcgaagaagcgtgaagcagaaactgaaataactgcagctcaacgtgttattgacaatggcgatgcaactgcacaacaaatttcagatgaaaaacatcgtgttgataacgcattaacagcattaaaccaagcgaaacatgatttaactgcagatacacatgccttagagcaagcagtgcaacaattgaatcgcacaggtacaacgactggtaagaagccggcaagtattactgcttacaataattcgattcgtgcacttcaaagtgacttaacaagtgctaaaaatagcgctaatgctatcattcagaagccaataagaacagtgcaagaggtacaatctgcgttaacaaatgtaaatcgtgtcaatgagcgattaacgcaagcaattaatcaattagtacctttagctgataatagtgctttaagaactgctaagacgaaacttgatgaagaaatcaataaatcagtaactactgatggtatgacacaatcatcaatccaagcatatgaaaatgctaaacgtgcaggtcaaacagaatcaacaaatgcacaaaatgttattaacaatggtgacgcgacagaccaacaaattgccgcagaaaaaacaaaagtagaagaaaaatataatagcttaaaacaagcaatttctggattaacaccagacttggcaccattacaaactgcaaaaactcagttgcaaaatgatattgatcagccaacgagtacgactggtatgacaagcgcatctgttgctgcatttaatgacaaactttcagcagctagaactaaaattcaagaaattgatcgcgtactggcttctcatccagatgttgcaacgattcgtcaaaacgtgacagcagcgaatgccgctaaatcagcacttgatcaagcacgtaatggcttaacagtcgataaagcgcctttagaaaatgcgaaagctcaattacaacaaagtattgatacgcaaacaagtacaactggtatgacgcaagactctgtaaatgcatacaatgcgaagttaacggctgcacgtaataagattcaacaaatcaatcaagtattagcaggttcaccaacagtagatcaaattaatacaaatacgtctgcagcaaatcaagctaaatctgatttggatcatgcacgtcaagctttaacaccagataaagcatcgcttcaaactgcgaaaacgcaattagaacaaagcattaatcaaccaacggatacaacaggtatgacgaccgcttcgttaaatgcgtacaaccaaaaattacaagcagcgcgtcaaaagttaactgaaattaatcaagtgttgaatggcaacccaactgtccaaaatatcaatgataaagtggcagaagcaaaccaagctaaggatcaattaaatacagcacgtcaaggtttaacattagatagacagccagcgttaacaacattacatggtgcatctaacttaaaccaagcacaacaaaataatttcacgcaacaaattaatgctgctcaaaatcatgctgcgcttgaaacaattaagtctaacattacggctttaaatactgcgatgacgaaattaaaagacagtgttgcggataataatacaattaaatcaggtcaaaattacactgacgcaacaccagctaataaacaagcgtatgataatgcagttaatgcggctaaaggtgtcattggagaaacgactaatccaacgatggatgttaacacagtgaaccaaaaagcagcatctgttaaatcgacgaaagatgctttagatggtcaacaaaacttacaacgtgcgaaaacagaagcaacaaatgcgattacgcatgcaagtgatttaaaccaagcacaaaagaatgcattaacacaacaagtgaatagtgcacaaaacgtgcaagcagtaaatgatattaaacaaacgactcaaagcttaaatactgctatgacaggtttaaaacgtggcgttgctaatcataaccaagtcgtacaaagtgataattatgtcaacgcagatactaataagaaaaatgattacaacaatgcatacaaccatgcaaatgacattattaatggtaatgcacaacatccagttataacaccaagtgatgttaacaatgctttatcaaatgtcacaagtaaagaacaagcattgaatggtaatacaaagttaaatgctgcgaaacaagaagcgaatactgcattaggtcatttaaacaatttaaataatgcacaacgtcaaaacttacaatcgcaaattaatggtgcgcatcaaattgatgcagttaatacaattaagcaaaatgcaacaaacttgaatagtgcaatgggtaacttaagacaagctgttgcagataaagatcaagtgaaacgtacagaagattatgcggatgcagatacagctaaacaaaatgcatataacagtgcagtttcaagtgccgaaacaatcattaatcaaacaacaaatccaacgatgtctgttgatgatgttaatcgtgcaacttcagctgttacttctaataaaaatgcattaaatggtgatgaaaaattagcacaatctaaaacagatgctgcaagagcaattgatgcattaccgcatttaaataatgcacaaaaagcagatgttaaatctaaaattaatgctgcatcaaatattgctggcgtaaatactgttaaacaacaaggtacagatttaaatacagcgatgggtaacttgcaaggtgcaatcaatgacgaacaaacgacattaaatagtcaaaattatcaagatgcgacaccaagtaagaaaacagcatacacaaatgcggtacaagctgcgaaagatattttaaataaatcaaatggtcaaaataaaacgaaagatcaagttactgaagcgatgaatcaagtgaattctgctaaaaataacttagatggtacgcgtttattagatcaagcgaagcaaacagcgaaacagcagttaaataatatgacgcatttaacaactgcacaaaaaacgaatttaacaaaccaaattaatagtggtactactgtcgctggtgttcatacggttcaatcaaatgccaatacattagatcaagccatgaatacgttaagacaaagtattgccaacaaagatgcgactaaagcaagtgaagattacgtagatgctaataatgataagcaaacagcatataacaacgcagtagctgctgctgaaacgattattaatgcaaatagtaatccagaaatgaatccaagtacgattacacaaaaagcagagcaagtgaatagttctaaaacggcacttaacggtgatgaaaacttagctacggcaaaacaaaatgcgaaaacgtacttaaacacattaacgagtattacagatgctcaaaagaacaatttgattagtcaaattagtagtgcgacaagagttagtggtgttgatactgtaaaacaaaatgcacaacatctagatcaagctatggctagcttgcaaagtggtattaacaacgaatctcaagttaaatcatctgagaaatatcgtgatgctgatacaaataaacaacaagagtatgataatgctattactgcagcgaaagcgattttaaataaacaacatggtccaaacactgcgcaaaatgcagttgaagcagcattgcaacgtgtgaatactgcgaaagatgcattgaatggcgatgcaaaattaattgcagctcaaaacgcagcgaaacaacatttaggtactttaacgcatatcactacagctcaacgtaatgatttaacaaatcaaatttcacaagctacaaacttagctggtgttgaatctgttaaacaaagtgcaaatagtttagatggcgcaatgggtaacttacaaacggctatcaacgataagtcaggaacattagcgagccaaaacttcttggatgctgatgagcaaaaacgtaatgcatacaatcaagctgtatcagcagccgaaaccattttaaataaacaaactggaccgaatacagcgaaaacagcagtcgaacaagcacttaataatgttaataatgcgaaacatgcattaaatggtacgcaaaacttaaacaatgcgaaacaagcagcgattacagcaatcaatggcgcatctgatttaaatcaacatcaaaaagatgcattaaaagcacaagctaatggtgctcaacgcgtatctaatgcacaagatgtacagcacaatgcgactgaactgaacacgtcaatgggcacattaaaacatgccatcgcagataagacgaatacgttagcaagcagtaaatatgttaatgccgatagcactaaacaaaatgcttacacaactaaagttaccaatgctgaacatattattagcggtacgccaacggttgttacgacaccttcagaagtaacagctgcagctaatcaagtaaacagcgcgaaacaagaattaaatggtgacgaaagattaaatgaagcaaaacaaaacgccaatactgctattgatgtattaacacaattaaatacacctcaaaaagctaaattaaaagaacaagtgggacaagccaatagattagaagacgtacaaactgttcaaacaaatggacaagcattgaacaatgcaatgaaaggcttaagagatagtattgctaacgaaacaacagtcaaagcaagtcaaaactatacagacgcaagtccgaataaccaatcaacatataatagcgctgtgtcaaatgcgaaaggtatcattaatcaaactaacaatccgactatggatactagtgcgattacccaagctacaacacaagtgaataatgctaaaaatggtttaaacggtgctgaaaacttaagaaatgcacaaaacactgctaagcaaaacttaaatacgttatcacacttaacaaataaccaaaaatctgccatctcatcacaaattgaccgtgcaggtcatgtgagtgaggtaacagctgctaaaaatgcagcaactgagttaaacacgcaaatgggcaacttggaacaagctatccatgatcaaaacacagttaaacaaggtgttaacttcactgatgcagataaagctaaacgtgatgcgtatacaaatgcggtaagcagagcagaagcaattctgaataaaacgcaaggtgcaaatacgtctaaacaagatgttgaagcggctattcaaaatgttacaagtgctaaaaatgcattgaatggtgatcaaaacgttacaaatgcgaagaatgcagctaaaaatgcattaaataacttaacgtcaattaataatgcacaaaaacgtgacttaacaactaaaattgatcaagcaacaacagtagctggtgttgaagcggtatctaatacaggtacacaattgaatacagcgatggctaacttgcaaaatggtattaatgataaagcgaatactttagcgagcgaaaactatcatgatgctgattcagataagaaaactgcttatactcaagccgttacgaacgcagaaaatattttaaataaaaatagtggatcaaatttagataaagctgccgttgaaaacgcgttatcacaagttgctaatgcgaaaggtgccttaaatggtaaccataatttagagcaagctaaatcaaatgcaaacactactataaacggacttcaacatttaacaactgcacaaaaagataaattgaaacaacaagtgcaacaagcacaaaatgttgcaggtgtagataatgttaaatcaagtgccaacacattaaatggtgctatgggtacattgagaaatagtattcaagataatgcggctacgaaaaatggccaaaactatcttgatgctacagaaagtaacaaaacaaactataacaatgctgttgatagtgctaatggtgtcattaatgcaacaagcaatccaaatatggatgctcatgcaattaaccaaatcgctacacaagtgacatcaacgaaaaatgcattagatggtacacataatttaacgcaagcgaaacaaacagcaacaaatgccatcgatggtgctactaacttaaataaagcgcaaaaagatgcgttaaaagcacaagtgacaagtgcgcaacgtgttgcaaatgtaacaagtatccaacaaactgcaaatgaacttaatacagctatgggtcaattacaacatggtattgatgatgaaaatgcaacaaaacaaactcaaaaatatcgtgatgcagaacaaagtaagaaaactgcttatgatcaagctgtagctgctgcgaaagcaattttaaataaacaaactggatcaaattcagataaagcagcagttgaccgtgcattacaacaagtaacaagtacgaaagatgcattgaatggtgatgctaaactggcagaagcgaaagcggcagctaaacaaaacttaggcactttaaaccatattacgaatgcacaacgtactgacttagaaggccaaatcaatcaagcgacgactgttgatggcgttaatactgtaaaaacaaatgccaatacattagacggcgcaatgaatagcttacaaggtgcaatcaatgataaagatgcgacattaagaaatcaaaattatcttgatgcagatgaatcaaaacgaaatgcatatacgcaagctgtcacagcggctgaaggcattttaaataaacaaactggtggtaacacatctaaagcagacgttgataatgcattaaatgcagttacaagagcgaaagcggctttaaatggtgctgaaaacttaagaaatgcgaaaacttcagcaacaaatacgattaatggtttacgacacttaacacaattacaaaaagacaacttgaagcatcaagttgaacaagcgcaaaatgtagcaggtgtaaatggtgttaaagataaaggtaataccttaaatactgccatgggtgcattacgtacaagtatccaaaatgataatacgacgaaaacaagtcaaaattatcttgatgcatctgatagcaacaaaaataattacaatactgctgtaaataatgcaaatggtgttattaatgcaacgaacaatccaaatatggatgctaatgcgattaatgacatggcaaatcaagtcaatacaacaaaagcagcgttaaatggtgcacaaaacttagctcaagctaaaacaaatgcgacgaacacaattaacaacgcacatgacttaaaccaaaaacaaaaagatgcattaaaaacacaagttaacaatgcacaacgtgtatctgatgcgaataacgttcaacatacagttactgaattgaacggcgcgatgacagcacttaaagcaactattgcggataaagaaagaacaaaagcaagcggtaattatgtcaatgctgatcaagaaaaacgtcaagcttatgattcaaaagtgacgaacgctgaaaatatcattaatggtacaccaaatgcgacattaacagtcaatgacgtaaatagtgcggcatcacaagtcaatgcggctaaaacagcattaaatggtgataacaacttacgtgtagcgaaagagcatgccaacaatacaattgacggcttagcacaattgaataatgtacaaaaagcaaaattaaaagaacaagttcaaagtgcaactacattagatggtgttcaaactgttaaaaatagttctcaaacgttgaatacagcgatgaaaggcttaagagatagtattgcgaatgaagcaacaattaaagcaggtcaaaactacactgacgcaagtccaaataatcgtaacgagtacgacagcgcagttactgcagcaaaagcaatcattaatcaaacatcgaacccaacgatggaaccaaatactattacgcaagcaacatcacaagtgacaactaaagaacatgcattaaatggtgcgcaaaacttagctcaagctaagacaactgcgaaaaacaacttaaataacttaacatcaattaacaatgcacaaaaagatgcgttaacgcgtagcattgatggtgcaacaacagtagctggtgtaaatcaagaaactgtcaaagcaacagaattaaataacgcaatgcatagtttacaaaacggtatcaatgatgagacacaaacaaaacaaactcagaaatacctagatgcagagccaagtaagaaatcagcttatgatcaagctgtaaatgcagcgaaagcaattttaacaaaagctagtggtcaaaatgtagacaaagcagcagttgaacaagcattacaaaatgtaaacagtacgaagacggcgttgaacggtgatgcgaaattaaatgaagctaaagccgctgcgaaacaaacgttaggtatattaacacacattaataatgcacaacgtacagcgttagataatgaaattacacaagcaacaaatgttgaaggtgttaatacagttaaagccaaagcgcaacaattagatggtgctatgggtcaattagaaacatcaattcgtgataaagacacgacgttacaaagtcaaaattatcaagatgctgatgatgctaaacgaactgcttattctcaagcagtaaatgcagcagctacaattttaaataaaacagctggcggtaatacacctaaagcagatgttgaaagagcaatgcaagctgttacgcaagcaaatactgcattaaacggtattcaaaacttagaacgtgcgaaacaagctgctaacacagcgattacaaatgcttcggacttaaatacaaaacaaaaagaagcattaaaagcacaagtaacaagtgcaggacgcgtatctgcagcaaatggtgttgaacatactgcgactgaattaaatacagcgatgacagctataaaacgtgccattgctgataaagttgagacaaaagctagtggtaactatgtcaatgctgatgcgaataaacgccaagcatatgatgaaaaagtgacagctgcagaacatatcgttagtggtacatcaacaccaacgttaacaccgtcagatgttacaaatgcagcaacacaagtaacgaatgcgaagacgcagttaaacggtaatcataatttagaagtagcgaaacaaaatgctaacactgcaattgatggtttaacttctttaaatggtccgcaaaaagcaaaacttaaagaacaagtgggtcaagcgacgacgttgccaaatgttcaaactgttcgtgataatgcacaaacattaaacactgcaatgaaaggtctacgagatagcattgcgaatgaagcaacgattaaagcagatcaaaactacacagatgcaagtcaaaacaaacaaaatgactacaacaatgcagtcactgcagcaaaagcaatcattggtcaaacaactagtccatcaatgaatgcacaagaaattaatcaagcgaaagaccaagtgacagctaaacaacaagcgttaaacggtcaagaaaacttaagaactgcgcaaacaaatgcgaagcaacatttgaatggcttaagtgacttaactgacgctcaaaaagatgcagtgaaacgtcaaatcgaaggtgcaacgcatgttaatgaagtaacacaagcacaaaataatgcggatgcattaaatacagctatgacgaacttgaaaaatggtattcaagatcaaaatacgattaagcaaggtgttaacttcactgatgcagatgaagcgaaacgtaatgcatatacaaatgcagtgacgcaagctgaacaaattttaaataaagcacaaggtccaaatactgcaaaagacaatgttgaatctgcgttacaaaatgtacaacgtgctaaaaacgaattgaacggtaatcaaaatgttgcgaacgctaagtcaactgcgaaaaatgcattgaataatctaacatcaattaacaatgcacaaaaagaagcgttgaaaacacaaattgaaggtgcgtcaacagttgcaggtgtaaatcaagtgtctacaacggcatctgaattaaatactgcaatgagcaacttacaaagcggtattaatgatgaagcagctacaaaagcagctcagaaatatactgatgcagatagagataaacaaactgcatacaatgacgctgtaacagcagctaaaacattattagataaaacagctggttcaaatgacaataaagcagcagttgaacaagcattacaacgtgtgaatactgctaaaacagcattaaatggtgacgcgcgattaaatgaagcgaagaacacagctaaacaacaattagcgacaatgtcacatttaactaatgctcaaaaagcaaacttaacagaacaaattgaacgcggtacgactgttgctggtgttcaaggtattcaagctaatgccggtactttagatcaagcaatgaatcaattaagacaaagtattgcttctaaagatacgactaaatcaagcgaagattatcaagacgcgaatgcaaatctacaaaatgcatacaatgatgcggtaactaatgctgaaggtattattagtgcaacgaataaccctgaaatgaatcctgatacaattaaccaaaaagcgagccaagtgaacagtgcgaagtctgcattgaacggtgatgaaaaattagcagcagcaaaacaaactgcgaaatcagatatcggtcgtttgacagacttgaacaatgcacaacgaactgcggcaaatgctgaagtggatcaagcaccaaatcttgcagctgtcacagcggctaaaaataaagcaacatcgttaaacacagcgatgggtaatttgaaacatgcacttgctgaaaaggataatacgaaacgtagtgtcaattacaaagatgcggatcaaccaaaacaacaagcgtatgatactgcggttacacaagcagaagcaattactaatgctaatggcagcaacgcgaatgaaacacaagttcaagcagcactaaaccaattgaatcaagctaaaaatgacttgaatggtgataataaagttgctcaagcaaaagagtcagcgaaacgtgcattagcttcatatagtaacttgaataatgcgcaatcaactgcagcaactagtcaaattgacaatgcaacgacagtagcaggtgtaactgctgcacaaaatactgctaatgaattaaatacagcaatgggtcaacttcaaaatggtattaatgaccaaaacactgttaaacaacaagtgaactttacagatgctgaccaaggtaagaaagatgcttacacaaatgctgttacgaatgctcaaggtattttagataaatcaaacggtcaaaatatgacaaaagcacaagttgaagctgcattaaatcaagtaacgactgctaagaatgctttaaacggtgatgcaaatgtaagacaagcaaaatcagatgcgaaagcaaacttaggtacattaacacacttaaataatgcacaaaaacaagatttaacatcacaaatcgaaggtgcaacaacagtcaacggtgtaaatagtgttaaaacgaaagcacaagacttagatggtgcaatgcaacgattagagacagcaatcgcaaataaagatcaaactaaagcgagcgaaaactacatcgacgcagatccaactaagaaaacagcatttgataatgccatcatacaagctgaatcttacttaaataaagatcatggtgcgaataaagataagcaagctgttgaacaagcaattcaaagtgtaacgtctactgaaaatgctttgaacggtgacgcaaacttacaacgcgctaaaactgaagctacacaagctatcgataacttgacacatttgaatacgccacaaaaaacagcattaaaacaacaagtgaacgctgcgcaacgtgtatcaggtgtaactgatctgaaaaatagtgctacatcacttaataatgcgatggatcaattaaaacaagcaattgctgatcatgacacaattgttgctggtggtaattacactaacgcgagtcctgataagcaaggtgcttatactgatgcatataatgctgcgaaaaacattgtaaatggttcacctaatgtgattacaaatgcagcagatgttacagcagtaacacaacgtgttaataatgctgaaacaggtttaaacggtgatacaaacttagcaactgcgaagcaacaagctaaagatacattacgtcaaatgacacatttatctgatgcacaaaaacaaagtattactggtcaaattgatagcgcgacacaagtaactggcgtccaaagtgtgaaagacaacgcgacaaatcttgataatgcaatgaatcaacttcgaaatagtattgcgaataaagatgaagttaaagcaagtcaaccatatgttgatgcagatacggataaacaaaatgcatacaacacagctgttacaagtgctgaaaatatcattaatgcaacgagtcagccgacacttgatccatctgcagtaacacaagcagctaatcaagtgaacactaacaaaactgcgcttaatggtgtacaaaacttagcgaataaaaagcaagaaacgactgctaacatcaaccgattaagtcatttaaataatgctcaaaagcaagatttaaatacgcaagtgacaaatgcaccaaatattagcacagtaaatcaagtgaaaactaaagctgaacaattagatcaagcaatggaacgtttaatcaacggaatccaagacaaagatcaagtgaaacaaagtgttaactttacagatgcagatccagaaaaacaaacagcatacaacaatgcggtaactgctgttgaaaatattattaatcaagcaaatggtacaaatgcgaaccaatcacaagttgaagcagcactttcaactgtaacaactactaaacaagcgttgaatggtgatagaaaagtaacagatgctaaaaacaatgcaaaccaaacattatctacattagataacttaaacaatgcacaaaaaggtgctgttactggaaacatcaatcaagcgcacactgtagctgaagtaacgcaagccattcaaacagctcaggaactgaatacagcgatgggtaacttgaaaaatagcttgaatgataaagacactacacttggcagtcaaaactttgcagatgcagatccagagaagaaaaatgcatacaatgaagcggttcataatgctgaaaatattttaaataaatctacaggtacgaacgtgcctaaagatcaagttgaagcagctatgaatcaagtgaatgctacaaaagcagcgcttaatggtactcaaaaccttgaaaaagctaaacaacacgcaaatacagcaattgacggtttaagccatttaacaaatgcacaaaaagaggcattaaaacaattggtacaacaatcgactactgttgcagaagcacaaggtaatgagcaaaaagcaaacaatgttgatgcagcaatggacaaattacgtcaaagtattgcagataatgcgacaacaaaacaaaaccaaaattatactgatgcaagtcagaataaaaaggatgcgtacaataatgctgtcacaactgcacaaggtattattgatcaaactacaagtccaactttagatccgactgttatcaatcaagctgctggacaagtaagcacaactaaaaatgcattaaatggtaatgaaaacctagaggcagcgaaacaacaagcgtcacaatcattaggttcattagataacttaaataatgcgcaaaaacaaacagttactgatcaaattaatggcgcgcatactgttgatgaagcaaatcaaattaagcaaaatgcgcaaaacttaaatacagcgatgggtaacttgaaacaagcgatagctgacaaagatgctacgaaagcgacagttaacttcactgatgcagatcaagcaaaacaacaagcatataacactgctgttacaaatgctgaaaatatcatttcaaaagctaatggcggcaatgcaacacaagctgaagttgaacaagcaatcaaacaagttaatgctgcaaaacaagcattaaatggtaatgccaacgttcaacatgcgaaagatgaagcaacagcattaattaataactctaatgatcttaaccaagcacagaaagatgcattaaaacaacaagtacaaaatgcaactactgtagctggtgtaaacaatgttaaacaaacagcacaagagttaaacaatgcgatgacacaattaaaacaaggcattgcagataaagaacaaacgaaagctgatggtaactttgtcaatgcagatcctgacaagcaaaatgcatataaacaagcagtagcgaaagctgaagcattaattagtggtacgcctgatgttgtcgttacacctagcgaaattactgcagcgttaaataaagttacgcaagctaaaaatgatttaaatggtaatacgaacttagcaacggcgaaacaaaatgttcaacatgctatcgatcaattgccaaacttgaatcaagcgcaacgtgatgaatacaacaaacaaattacgcaagcaactcttgtaccaaacgtcaatgctattcaacaagcggcgacaacgcttaatgacgcgatgacacaattgaaacaaggtattgcgaataaagcacaaattaaaggtagcgagaactatcacgatgctgatactgacaagcaaacagcatatgataatgcagtaacaaaagcagaagaattgttaaaacaaacaacaaatccaacaatggatccaaatacaattcaacaagcattaactaaagtgaatgacacaaatcaagcacttaacggtaatcaaaaattagctgatgccaaacaagatgctaagacaacacttggtacactagatcatttaaatgatgctcaaaaacaagcgctaacaactcaagttgaacaagcaccagatattgcaacagttaataatgttaagcaaaatgctcaaaatctgaataatgctatgactaacttaaacaatgcattacaagataaaactgagacattaaatagcattaactttactgatgcagatcaagctaagaaagatgcttatactaatgcggtttcacatgcagaaggtattttatctaaagcaaatggcagcaatgcaagtcaaactgaagtggaacaagcgatgcaacgtgtgaacgaagcgaaacaagcattgaatggtaatgacaatgtacaacgtgcaaaagatgcagcgaaacaagtgattacaaatgcaaatgatttaaatcaagcgcaaaaagatgcattaaaacaacaagtcgatgctgcgcaaactgttgcaaatgtaaacacgattaagcaaacagcacaagatttaaatcaagcaatgacacaattgaaacaaggtattgcagataaagaccaaactaaagcaaatggtaactttgtcaatgctgatactgataagcaaaatgcatataacaatgcggtagcacatgctgaacaaatcattagtggtacaccaaatgcaaacgtggatccacaacaagtggctcaagcgttacaacaagtgaatcaagctaagggtgatttaaacggtaaccataacttacaagttgctaaagacaatgcaaatacagccattgatcagttaccaaacttaaatcaaccacaaaaaacagcattaaaagaccaagtgtcgcatgcagaacttgttacaggtgttaatgctattaagcaaaatgctgatgcgttaaataatgcaatgggtacattgaaacaacaaattcaagcgaacagtcaagtaccacagtcagttgactttacacaagcggatcaagacaaacaacaagcatataacaatgcggctaaccaagcacaacaaatcgcaaatggcataccaacacctgtattgacgcctgatacagtaacacaagcagtgacaactatgaatcaagcgaaagatgcattaaacggtgatgaaaaattagcacaagcgaaacaagaagctttagcaaatcttgatacgttacgcgacttaaatcaaccacaacgtgatgcattaagaaaccaaatcaatcaagcacaagcgttagctacagttgaacaaactaaacaaaatgcacaaaatgtgaatacagcaatgggtaacttgaaacaaggtattgcaaacaaagatactgtcaaagcaagtgagaactatcatgatgctgatgccgataagcaaacagcatatacaaatgcagtgtctcaagcggaaggtattatcaatcaatcgacaaatccaacgcttaacccagatgaaataacacgtgcattaactcaagtgactgatgctaaaaatggcttaaacggtgaagctaaattggcaactgaaaagcaaaatgctaaagatgccgtaagtgggatgacgcatttaaacgatgctcaaaaacaagcattaaaaggtcaaatcgatcaatcgcctgaaattgctacagtgaaccaagttaaacaaacagcaacgagcctagatcatgcaatggatcaattatcacaagctattaatgataaagctcaaacattagcggacggtaattacttaaatgcagatcctgacaaacaaaatgcgtataaacaggcagtagcaaaagctgaagcattattgaataaacaaagtggtactaatgaagtacaagcacaagttgaaagcatcactaatgaagtgaacgcagcgaaacaagcattaaatggtaatgacaatttggcaaatgcaaaacaacatgcaaaacaacaattggcgaacttaacacacttaaatgatgcacaaaaacaatcatttgaaagtcaaattacacaagcgccacttgttacagatgtcactacgattaatcaaaaagcacaaacgttagatcatgcgatggaattattaagaaatagtgttgcggataatcaaacgacattagcgtctgaagattatcatgatgcaactacgcaaagacaaaatgactataaccaagctgtaacagctgctaataatatcatttatcaaactacatcgcctacgatgaatccagatgatgttaatggtgcaacgacacaagtgaataatacgaaagttgcattagatggtgatgaaaaccttgcagtagctaaacaacaagcaaacaacagacttgatcaattagatcatttgaataatgcgcaaaagcaacagttacaatcacaaattacgcaatcatctgatattgctgcagttaatggtcacaaacaaacagcagaatctttaaatactgcgatgggtaacttaattaatgcgattgcagatcatcaagccgttgaacaacgtgataacttcatcaatgctgatactgataaacaaactgcttataatacagcggtaaatgaagcagcagcaatgattaacaaacaaactggtcaaaatgcgaaccaaacagaagtagaacaagctattactaaagttcaaacaacacttcaagcgttaaatggagatcataatttacaagttgctaaaacaaatgcgacgcaagcaattgatgctttaacaagcttaaatgatcctcaaaaaacagcattaaaagaccaagttacagctgcaactttagtaactgcagttcatcaaattgaacaaaatgcgaatacgcttaaccaagcaatgcatggtttaagacagagcattcaagataacgcagcaactaaagcaaatagcaaatatatcaacgaagatcaaccagagcaacaaaactatgatcaagctgttcaagccgcaaataatattatcaatgaacaaactgcaacattagataataatgcgattaatcaagcagcggcaactgtgaatacaacgaaagcagcattacatggtgatgtgaaattacaaaatgataaagatcatgctaaacaaacggttagtcaattagcacatctaaacaatgcacaaaaacatatggaagatacgttaattgatagcgaaacaactagaacagcagttaagcaagatttgactgaagcaccagcattagatcaacttatggatgcattgcaacaaagtattgctgacaaagatgcaacacgtatgagcagtgcatatgtcaatgcagaaccgaataaaaaacaagcctatgatgaagcagttcaaaatgctgagtctatcattgcaggattaaataatccaactatcaataaaggtaatgtatcaagtgcgactcaagcagtaacatcatctaaaaatgcattagatggtgttgaacgattagctcaagataagcaaactgctggaaattctctaaatcatttagatcaattaacaccagctcaacaacaagcgctagaaaatcaaattaataatgcaacaactcgtgataaagtggctgaaatcattgcacaagcgcaagcattaaatgaagcgatgaaagcattaaaagaaagtattaaggatcaaccacaaactgaagcaagtagtaaatttattaacgaggatcaagcgcaaaaagatgcttatacgcaagcagtacaacacgcgaaagatttgattaacaaaacaactgatcctacattagctaaatcaatcattgatcaagcgacacaggcagtgactgatgctaaaaacaatttacatggtgatcaaaaactagctcaagataagcaacgtgcaacagaaacgttaaataacttgtctaacttgaatacaccacaacgtcaagcacttgaaaatcaaatcaataatgcagcaactcgtggcgaagtagcacaaaaattaactgaagcagaagcacttaaccaagcaatggaagctttacgtaatagcattcaagatcaacagcaaacggaagcgggtagcaagtttatcaatgaagataaaccacaaaaagatgcttaccaagcagcagttcaaaatgcaaaagatttaattaatcaaactaacaatccaacgcttgataaagcacaagttgaacaattgacacaagctgttaaccaagctaaagataacctacacggtgatcaaaaacttgcagacgataaacaacatgcggttactgatttaaatcaattaaatggtttaaataatccacagcgtcaagcacttgtaagtcaaataaacaatgcagcaactcgtggcgaagtagcacaaaaattagctgaagcaaaagcacttgatcaagcaatgcaagcattacgtaatagtattcaagatcaacaacaaacagaatctggtagcaagtttattaatgaagataaaccgcaaaaagatgcttaccaagcagcagttcaaaatgcacaagatttaattaaccaaacaggtaatccaacactcgacaaatcacaagtagaacaattaacacaagcagtaacaactgcaaaagataatctacatggtgatcaaaaactagctcgtgatcaacaacaagcagtaacgactgttaatgcattaccaaacttaaatcatgcacaacaacaagcattaactgatgcaattaatgcagcgcctacaagaacagaggttgcacaacatgttcaaactgctactgaacttgatcacgcaatggaaatattgaaaaataaagttgatcaagtgaatacagataaggctcaaccaaattacactgaagcgtcaactgataaaaaagaagcagtagaccaagcgttacaagctgcagaaagcattacagaccctactaatggttcaaatgcaaataaagatgctgtagaacaagcgttaactaagcttcaagaaaaagaaaatgagttaaatggtaatgagagagtcgctgaagctaaaacacaagcgaaacaaactattgaccaattaacacatttaaatgctgatcaaattgcaactgctaaacaaaacattgatcaagcgacgaaacttcaaccaattgctgaattagtagatcaagcaacgcaattgaatcaatctatggatcaattacaacaagcagttaatgaacatgctaacgttgagcaaactgtagattacacacaagcagattcagataagcaaaatgcttataaacaagctattgctgatgctgaaaatgtattgaaacaaaatgcgaataagcaacaagtggatcaagcacttcaaaatattttaaatgcaaaacaagcattaaatggtgatgaacgtgtagcacttgctaaaacaaatggtaaacatgacatcgaccaattgaatgcattaaacaatgctcaacaagatggatttaaaggtcgcatcgatcaatcaaacgatttaaatcaaatccaacaaattgtagatgaggctaaggcacttaatcgtgcaatggatcaattatcacaagaaatcactggcaatgaaggacgcacgaaaggtagcacgaactatgtcaatgcagatacacaagtcaaacaagtatatgatgaagcggttgataaagcgaaacaagcacttgataaatcgtctgggcaaaacttaactgcagaacaagttatcaaattaaatgatgcagtcactgcagctaagaaagcattaaatggtgaagaaagacttaataatcgtaaagctgaagcattacaaagattggatcaattaacacatctaaacaatgctcaaagacaattagcaatccaacaaattaataatgctgaaacgctaaataaagcatctcgagcaattaatagagcaactaaattagataatgcaatgggtgcagtacaacaatatattgacgaacagcaccttggtgttatcagcagcacaaattacatcaatgcagatgacaatttgaaagcaaattatgataatgcaattgcgaatgcagcacatgagttagataaagtgcaaggtaatgcaattgcaaaagctgaagcagagcaattgaaacaaaatattatcgatgctcaaaatgcattaaatggagaccaaaaccttgcaaatgccaaagataaagcaaatgcgtttgttaattcgttaaatggattaaatcaacagcaacaagatcttgcacataaagcaattaacaatgccggtactgtatcagatgtaacagatattgttaataatcaaattgacttaaatgatgcaatggaaacattgaaacatttagttgacaatgaaattccaaatgcagagcaaactgtcaattaccaaaacgctgacgataatgctaaaacaaacttcgatgatgccaaacgtctagcaaatacattgctaaatagtgataacacaaatgtgaatgatattaacggcgcaattcaaacagtcaatgatgcaatccataatcttaatggtgatcaacgactacaagatgctaaagacaaggcaattcaatctattaatcaagctttagctaataagctaaaagaaatcgaagcttcaaatgcgacggatcaagacaagcttattgcgaaaaataaagcagaagaattggcaaacagcatcatcaacaacattaataaagcaacaagtaatcaggctgtatctcaagttcaaacagcaggcaaccacgcgattgaacaagtgcatgccaatgaaataccaaaagcaaaaattgatgccaataaagacgttgataagcaagtacaagcattaattgacgaaattgatcgaaatccaaatctaacagataaggaaaaacaagcacttaaagatcgtattaatcaaatacttcaacaaggtcataacgacattaacaatgcgctgactaaagaagaaattgaacaagctaaagcacaacttgcgcaagcattacaagacatcaaagatttagtgaaagctaaagaagatgcgaaacaagatgttgacaagcaagttcaagcattaattgacgaaatcgatcaaaatccaaatctaacagataaggaaaaacaagcacttaaagatcgtattaatcaaatacttcaacaaggtcataacgacattaacaatgcgatgacaaaagaagcaattgaacaagcaaaagaacgtttagcgcaagcattacaagaaattaaaaatttagtgaaagctaaagaaaatgcgaaacaagatgttgataaacgtgtacaagctttaattgatgaaatcgatcgaaatccaaatctaacagataaggaaaaacaagcgcttaaagatcgaattaaccaaatacttcaacaaggtcataacgacattaacaatgcgatgactaaagaagaaattgaacaagccaaagcacaacttgcacaagcattacaagacatcaaagatttagtgaaagctaaagaagatgcgaaaaatgcaataaaagccttagctaatgcgaagcgtgatcaaatcaattcaaatccagatttaacacctgagcaaaaagcaaaagcgctcaaagaaattgacgaagctgaaaaacgagcactacaaaacgttgagaatgctcaaactatagatcaattaaatcgaggattaaacttaggtttagatgacattagaaatacacatgtatgggaggttgatgaacaacctgctgtaaatgaaatttttgaagcaacacctgagcaaatcctagttaatggtgaactcattgtacatcgtgatgacatcattacagaacaagatattcttgcacacataaacttaattgatcagctttcagcagaagttattgatacaccatcaactgcaacgatttctgatagcttaacagcaaaagttgaagttacattgcttgatggatcaaaagtgattgttaatgttcctgtaaaagttgtagaaaaagaattgtcagtagtcaaacaacaggcaattgaatcaatcgaaaatgcggcacaacaaaagattaatgaaatcaataatagtgtgacattaacactggaacaaaaagaagctgcaattgcagaagttaataagcttaaacaacaagcaattgatcatattaacaatgcacctgatgttcattcagttgaagaaattcaacaacaagaacaagcgcatattgaacaatttaatccagaacaatttacgattgaacaagcaaaatcaaatgcaattaaatcgattgaagatgcaattcaacatatgattgatgaaatcaaagctcgtactgatctaacagataaagagaagcaagaagctattgctaagttaaatcaattaaaagaacaagcaattcaagcgattcaacgtgcgcaaagcatcgatgaaataactgagcaattggaacaatttaaagctcaaatgaaagcagctaatccaacagcaaaagaactagctaaacgcaagcaagaagctattagtagaattaaagacttttcaaatgaaaaaataaatagtattcgaaatagtgaaattggcacaactgatgaaaaacaagcagcaatgaatcaaattaacgaaattgtgcttgaaacaattagagatattaataatgcgcatacattacagcaagttgaggctgcattgaacaatggtattgctcgaatttcagcagtacaaattgtaatatctgatcgtgctaaacaatcgtcaagtactggaaatgaatctaatagccatttaacaattggttatggaactgcaaatcatccatttaacagttcgactattggacataaaaagaaaattgatgaagatgatgacattgatccacttcatatgcgtcactttagtaataatttcggtaatgttattaaaaacgctattggtgtggtgggtatctctggcttactagctagtttctggttcttcattgccaaacgtcgtcgtaaagaagatgaagaggaagaattagaaataagagataataataaagattcaataaaagagactttagacgatacaaaacatttaccacttttatttgcgaaacgtcgcagaaaagaagatgaagaagatgttactgttgaagaaaaagattcgctaaataatggcgagtcactcgataaagttaaacatacgccgttcttcttaccaaaacgtcgtcgtaaagaagatgaagaagatgtggaagttacaaatgaaaacacagatgaaaaagtgttgaaagataacgaacattcaccactcttattcgcaaaacgacgcaaagataaagaggaagatgttgaaacaacaactagtattgaatctaaagatgaggacgttcctttattattggctaaaaagaaaaatcaaaaagataaccaatccaaagacaaaaagtcagcatcaaaaaatacttctaaaaaggtagcagctaaaaagaagaaaaagaaatctaagaaaaataaaaaataa

SEQ ID NO: 414708 - DNA, 1041 bp, Staphylococcus aureus
atgacaaccaacacagttacattacaaacagcacatattgtaagtttaggagatatcgaagaagctaaagcaagcattaaaccatttattcgtcgaacacctctaattaaatcaatgtatttaagccaaagtataactaaagggaatgtatttctaaaattagaaaatatgcaattcacaggatcttttaaatttagaggcgctagcaataaaattaatcacttaacagatgaacaaaaagaaaaaggcattatcgcagcatctgctgggaaccatgcacaaggtgttgctttaacagctaaattattaggcattgatgcaacgattgtaatgcctgaaacagcaccacaagcgaaacaacaagcaacaaaaggctatggggcaaaggttattttaaaaggtaaaaactttaacgaaactagactttatatggaagaattagcgaaagaaaatggcatgacaatcgttcatccatatgacgataagtttgtaatggcaggccaaggaacaattggtttagaaattttagatgatatttggaatgtgaatacagtcatcgtaccagttggcggtggaggattaattgcaggtattgccaccgcattaaaatcatttaacccttcaattcatattatcggtgttcaatctgagaatgttcatggtatggctgagtctttctataagagagatttaactgaacatcgagtggatagcacaatagcagatggttgtgatgtaaaagttcctggtgaacaaacatatgaagtagttaaacatttagtagatgagtttattcttgttactgaagaagagattgaacatgctatgaaagatttaatgcagcgtgccaaaattattactgaaggtgcaggcgcattaccaacagctgcaattttaagtggaaaaataaacaataaatggcttgaagataaaaatgttgttgctttagtttcaggcgggaatgttgacttaactagagtttcaggtgtcattgaacatggactgaatattgcagatacaagcaagggtgtggtaggttaa

SEQ ID NO: 414709 - DNA, 1119 bp, Staphylococcus aureus
atgttagttgcagtagtcaaagaattaaaacaaggtgaaggacgtgtagcttgcacacccgaaaatgtgcgtaagttaacggatgcaggacataaagtaattgttgaaaaaaatgctggcattggttcaggattttctaacgatatgtatgaaaaagaaggcgctaagatcgtaactcatgaacaagcatgggaagctgatcttgttatcaaagtaaaagaacctcatgaaagcgaatatcaatatttcaaaaagaatcaaattatctggggatttttacatttagcatcttcaaaagaaatagtagaaaaaatgcaagaagttggtgtaactgcgattagtggtgaaaccattataaaaaatggaaaagcagaattattagcgccaatgagtgctatagcaggtcaacgctcagcaattatgggagcttactactctgaagcacaacatggtggtcaaggtactttagtgactggtgtacatgaaaatgtggatatacctggtagtacatatgtgattttcggtggtggagtagcagcaacaaatgcagcaaatgttgccttgggactaaatgctaaagtaatcattatcgagttaaacgatgaccgcattaaatatcttgaagatatgtattcagaaaaagatgtcacagtagtcaaatcaacaccagaaaatttagcagaacaaattaaaaaagcagatgtatttatttctacaattttaattcctggtgcgaaaccgccaaaattggttactcgtgagatggttaaatcaatgaaaaaaggttcagtattaatcgatatagctattgaccaaggtggaactattgaaacaattagaccaactacaatttctgatccagtgtatgaagaagaaggtgtgattcattatggtgtaccaaaccaaccaggagcagtcccaagaacttcaacaatggcattagcacaaggaaatattgattatatattagaaatttgtgacaaaggcttagaacaagcaattaaagataatgaagccttaagtactggtgtaaacatttaccaaggacaagtgacaaatcaaggattagcttcatcacatgacctagattataaagaaatattaaatgttatcgaatag

SEQ ID NO: 414710 - DNA, 879 bp, Staphylococcus aureus
atgcctaataaaatattacttgtagatggtatggcgctattatttagacatttctatgctacaagtcttcataaacaatttatgtacaattcacaaggtgtacctacaaatggaatacaaggatttgtgcgtcatatcttttcggcaatacatgaaatacgccctacacatgtagctgtatgttgggatatgggacaatcaacttttagaaatgatatgtttgatggttataagcaaaatcgttctgcaccaccagaagaattgataccacaatttgattatgttaaagaaatttcagagcaatttggctttgtaaatattggcgttaaaaactatgaagcggatgatgttataggtacattagcacaacaatattcaactgataacgatgtctatattattacgggcgacaaagatttactgcaatgtattaatgacaatgttgaagtttggctaattaaaaaaggttttaacatttataatagatatacattacatcgttttaacaaagaatatgcccttgaaccacaacaactaatcgatattaaagcgtttatgggtgatacagcagatggatatgcgggtgttaaaggtattggagagaaaacggctattaagttaattcagcaatatcaaagcgttgaaaatgtggttgaaaacattgatgcattatcagctggtcaacgtaataagataaatgacaatttagatgaactatatttatcgaagcgacttgctgaaattcacacacaagtaccaattgatagtgaatcgctttttgagaaaatgtcatttgcaacaacacttaatcatattttatcaatttgtaacgaacatgaattacatgtttcaggaaaatatatttcatcccatttttaa

SEQ ID NO: 414711 - DNA, 3441 bp, Staphylococcus aureus
atgattaataaagaacaattagatcttttatataaattaaaaaaagaagttgaaaagtcgcgaaatgaagcacttttacatacaattaaccaagtaattaagaaagtatatttgcagcaatatacatgttcgttcgttggacatttttctgcaggtaaatcgacactgataaatttattaattgaacaagatatcttaccaagttcacctgtaccaacgacaagtaatactgctattgtgtcagtttcagacaatcacgatattattgctaatttgccgaatcaaacgtatgccaaattatctaattatgatgaagtaagggaaatgaatcgccaaaatgtcgacgttgaatctgtagaaattaattttcaatcagctaaatttgaaaatgggtttacgttgcaagatacaccaggtgttgattcaaatgttgcatcacatcagtcaataacagaacaatatatgtatacaagtaatatgatattttatacggttgactataaccacgttcaatctgaacttaactttaagtttatgaagcatataaatgatgttggaatacctgttgtgtttatcattaatcaaattgacaagcatcaagacgatgaattgtcattctctacgtttaaatcacgagttgaaaaatcaattgcagattggggcattaaattagaacgcaccttttatgtatctaaatttgatcaccctgaaaatgaacttgaagtattatcaagttatctaatttcattagatcaacatagagggacaatagaggattatacatcaagaacggttgaatacattaccgaagctcagctagattacattcagtctgaaattcaggaagtactagaagatttaggtatcgaagaagcggagtttgaacaagcatttttaaatagtcaacaacatcaagcaattagtgaagaggcacaacttttaaataatccagatgaattaatggcatttttaaagaataagcgtaaaaatattttagaaaatgcatacattatgccgcataatatgagagaaatgttacgaagttatttggaaagtatgtctcaagactttaatgttggtgggttttttaataaaaagaagaaaaagctacaaattcaacaacagcgattattaacagcgacagatgcgttacaagaacatgttaatcaacaaattcgtcaaccaatgcgagaagatatgtcatttgtaacgcgttttatcaataaaaaagaagcttcagataaagtattaaatcagcattatgacgttaagccggaaatgattgaagatttatatcaaccacaaacatcaatcagcaatacttatgtacttacattttcagacgaagtggttaaagccattaagaaatatgttgaacaacaatcaacaccaatttttaaagaaataatagaaaatgtgcaggcagatgaattaccaacagaagaaagtgatgatttaaaagaatatcaacgttatacagaattaaatgagctgcgtcagtcattgacgactaagaattatcgtcactactatattcatttagatgaatctctagataaattaataggtcgacaagagacaacatatcaagtggctactgataatgctcaggataatcgtgataatcagcagctaaatcaaaatacagctacaacaaatatgtctatagatattcaaaaagcgcttgatataatttcggatgtgcctttgttcaagcgtacaaagcaagatatccacgaaacattaacacgtatagataataaattaataaaaataggtgtatttggaacatttagtgcgggtaaaagtagtttgataaatgcattattaggcgagcatattttagtgagttctccaaatcctactacagcagctactacagaaatatcttatggagacgagagttatataacgctaaaatcacaatcgcaattattagatgaaattaatgcagtagttgaataccaagatatatctttttcaactatagaagaatttattaattgggatttagaaaagttaaaatcacatttaaataaaaatcaactcgcttttattcaggcagttgaaaaacattataaattgtatgtcaatatgttggaaaatggagaaaaacatgccattaatcaacaggaattgaaaaagtggagtgcagaagatgaatatgcaacatttgttaagacagtacacattgcattaatgcatgattggttaaaaggtaaaataattgttgattcattagggctacactcaaataaccaaaggcatacaaatgaaaccgaacaaattttaacttcttcagacttaatattgtatgtaagttattttaatcattcatttactgataatgacaaagcgtttatagaacacatgaaagatatgaaccagttgaatgaaaaccaagcatttaaaatggtaattaatgctgctgatttagcagaaagtcaagatgatcttgaagcagttgaaacatatgtatcagatgcattaagacaagtacacttacaatcagacatttttgctgtatcaagtcgaaatgcattgcaagctgaagataagggcattgatcaattaaaacaaagcatacaacaatttgttgatgttgaatctaaatcaattttagaacaacaaatgattcatcagcttcaacaaatggatcgttcttatgtagagatgattacagaatttgaaacaaataaagctgatatttcacgtcgccaacaaaggttaacagattataaagataaacagcgtttacaacatcaattaattgatgcgacgctacaacatacagacaacgaagttgaagaacaagtttatcatttaaatgcacgtttaaaattacaactacttgacgatgttaaatcagtgtttaattctcaaatgacgcaaaatagtgattttaatgaagaaaagaaagtgtctacgaaagtatacttagatcaaattcatcaacgattgtttttagagcaatctttaattacagaacgtataaaaaaatactttaataagcaactcattgagcaaattgcaccaatcgttcaacaattagcagatttacatgtcattgttaatcctcagtttaactttgaatcagctaatatagagcaaccattattgcacatcgatttcaatgatatgctaaatgcattgcctaaacaattaacaaaacgtaaaattttgaatccaaatgggcaaagagatatacatgaatcaatttgtcaaagtacgttaggattattacaaccacaaatgggattattgaggcaacagcttgaattatatgtaaagcaaatggctgtagaagctgaatcgcaatttgaaagttttgaagctaatattcaaacgcaaataaacgatttattagcatttgatttagatacaacacttatcaatcaattgaaagataaacatcaacaactgaaaactattttatattaa

SEQ ID NO: 414712 - DNA, 1341 bp, Staphylococcus aureus
atgaaaaatacatttaatccattacaaagattacatttctatgcagcaatatttattgctccactgttaatcactttaaccatttcgggcattggttacttgttctttccagaagttgaaaataatatttataagaatgagttttttggtgacagtgatgtaaaaacgcatcaaacattaaatgatgcagtacatcaagttgaacaacaatatgaaggattctttgtaagtaaagttagcatacttgatgaaccatataacaaacgaattacactgagtgatatggtaggaaatcaacgttacgtctttctagatcataacaatcaatttgttgcagatcaaaatgcgaaacatacgtattctaatgtgatgcgaagtatacatagttctttgtttactgaaaatactattattaattatttagtagagttaaccgcatgttggacgatattcatgattttatctggtacttatttactcattaagaagcatttaatttctaacaaaagtaaggcacttcgttggcaaaagtggcacgcaatgattggagttatcattgcaattccagtatttgtattagttttaactggattgccatggtctggttttatgggcagtaaaattgccggtatgatggacacaaacggtgaccttggtcaaggtgaattagcgattaatccacctaaatcagatttgaacgaattaccttgggctacacgtaaaaataaacagccagcttcatccgaaaaaggttcaagtggtcatcatggtaatgcagcaatgcctcaaaccaaattagattatcaaatatctattgataaggtcgttgaacaggcgcaaaaatctggtattaaaaagccgttttcaatcgtatatccaagtgataaaaatggtgcctttattgtatctaatactagtaattcaggtgttactgggctagatgtatcaccttacaaggaacaaacactttatttcgatcaatatagcggtaaaaagctaggtacgattaaatatgatgactacggtattattgctaaatggtttacatggggcattccgcttcacgaaggtcatttattcggcattttaaataaaatcattaatttatttgtatgtatcgctttattagtagccattggcatggggtttgtctcttggataaagcgtacaaaaaatactgcagtaaaagtaccacatcgcgtaaaaaaaccagcatctatatcactcataatatgtttaattgtattaggattattaatgccattatttggattatcacttatccttgtatttataattgaattaatattatatattaaagatcgtcgtgctaaacaataa

SEQ ID NO: 414713 - DNA, 333 bp, Staphylococcus aureus
atgggtaaaaaaatgggtctaggtttatctattgcattgattgttattggtattgccgttgtatgtttaatgattttttctagtcaaaaaacgacttattttggttatatgaatagtaatacaaatgcagaaaaagttgtcagtgaaaaagatggattagtcaaacataatatcaaagtagaaccatctaatgatttcaagccgaaaaaaggagactttgtaaaattagtttctaaagatgatgggaagacattttataaacaagagattgttaaacatgatgacgtcccacacggtttaatgatgaaaattcacgacatgcatatgaattaa

SEQ ID NO: 414714 - DNA, 1146 bp, Staphylococcus aureus
atgtttcaattacttgcagtttgtccgatgggattagaagctgttgttgctagggaaattcaagaattaggctatgaaacaaatgttgaaaatggtcgtatattttttgaaggagacgcaagtgcaattgtaaaggcaaatttatggttgcgcacagcagaccgaatcaaaattgttgttggacgttttaacgcaacaacgtttgacgaattattcgaacaaaccaaagcgctcccttgggaatctataattgataaagaaggtaacttcccagttcaaggtagaagcgttaaatcaacactacatagtgtgccagattgtcaggcgataactaagaaagctattgttgaacgattacgtcgcgcatataacgaaaaaggttggttaaatgaatcaggtgccaaataccctgttgaagttgccattttaaaagataatgtattattgactatagacacatcaggttctggtttgaacagacgtggatatagattagcacaaggtgaagcaccaattaaagaaacgttggcagcaagtttaatccgtcttgcaaactggaaaggtgatacacctttaattgatccattttgcggttcgggtacaatagctatagaagcttgtttaattgctcaaaatatcgcacctggttttaatcgcgagttcgtatcagagcaatggaacatcatgccagcaaatatttatgatgattaccgtgatgaagcggataagatggctgattatgataaagaaatcgaagtatatgcttctgatattgatccagaaatggtagagattgctaagcgtaacgctgaagaagttgggttgtctgatattattaaatttagtgtaaaagatgtcaatacattaacaattgatacagaagaaccggtggcgttaattggaaatcctccatatggtgaacgtattggtgatcgtgaagaagttgaagaaatgtaccgttatattggtaaactaatgaaacaacatccatttttatctacatacattttaacaagtaataaagaatttgaatatttagtagatcgtaaagcaacaaagcgacgtaagttatttaatggatatatagaatgtacttattatcaatactggggtaaaaagacagaacgtaaaactattgaaaactaa

SEQ ID NO: 414715 - DNA, 345 bp, Staphylococcus aureus; identical to SEQ ID NO: 406430

SEQ ID NO: 414716 - DNA, 564 bp, Staphylococcus aureus
atggttaaaacagtttatgtaacaggttacaaatcattcgaattaaacatttttaaagatgacgcacctgaagtacattatttaaaacaatttataaaacataaaattgaacaactgttggatgaaggattagaatgggtgttaatacaagggcaaatgggtatagaattatggactgcagaagttgttattgaattacaacgaacatatgattcgttaaagtttgctgtaattacaccgttccaaggacatacagaaaagtggaatgaacataatcaaagtaagtatgccaacataattaagcatgcagattatgttgatagtatttttcatacgtcgtatcagggtccttttcaatttaaacaagcagatcaatttatgcttgaacattcggatcaaacattgctcatttatgatgaggaacaagaggcaagtcctaagttcttcaagcagatgttagttgattttatggataaaacaaactatacttgtgatattgtgacgttcgatgaattaacagcattcatcaatgacttacagtggtctgaagatcaaagtttctaa

SEQ ID NO: 414717 - DNA, 402 bp, Staphylococcus aureus
atgacgaatacagtatattgtgataaattaaaaaatgtaggaggcgtcctcatgaatgatgtagtcgaatcactaatttatgaagttaacaacatgcaacaaaattttgaaaatgtgaaatcacaacaacaagatcatgatttttaccaaactgtaaagccatatactgaacatattgatagcatgctcaatgagatcaaattacatcgtgaatttattatagaagtaccttatatgaattcaaggaaatttgagctactgattgctaacattgaacaactttctgtcgaatgtcattttaagcgaacaagtcgaaagttatttatagaaaagcttaaaagtgttcaatatgatttacaaaatatattagatggcgtaacaaaagagggtactcatggttaa

SEQ ID NO: 414718 - DNA, 627 bp, Staphylococcus aureus; identical to SEQ ID NO: 406427

SEQ ID NO: 414719 - DNA, 2184 bp, Staphylococcus aureus
atgacggaaaacaaaggatcttctcagcctaagaaaaatggtaataatggtgggaaatccaactcaaaaaagaatagaaatgtgaagagaacgattattaagattattggcttcatgattattgcatttttcgttgttcttttactaggtatcttattgtttgcttattatgcttggaaagcacctgcttttaccgaagctaaattacaagatccgattcctgcaaagatatatgacaagaacggagaacttgttaaaacattagataatggccaaagacatgagcatgtaaatttaaaagacgtgccgaaatcaatgaaagacgcagtacttgcaactgaagacaatcgtttctacgaacatggcgcacttgattataaacgtttattcggtgcaattggtaagaacttgactggtggatttggttctgaaggtgcctcaacattaacacaacaagttgttaaagatgcatttttatcacaacataaatctattggacgtaaagctcaagaagcatacttatcatatcgtttagaacaagagtatagtaaagatgatatcttccaagtatatctaaataaaatttactattctgatggcgtaacaggtattaaagctgctgctaagtattactttaataaagatttaaaagatttaaacttagcggaagaagcttatttagccggtttacctcaggttccaaacaactataatatttatgatcatccaaaagctgctgaagatcgtaaaaacactgttttatacttaatgcattatcataaacgcattacagataaacagtgggaagatgctaagaaaatcgatttaaaagcgaacttagtaaatcgtactgctgaagaacgtcaaaacattgatacaaatcaagattctgagtataattcatacgttaactttgtaaaatctgaattaatgaataataaagcattcaaagatgaaaatttaggtaatgtattacaaagtggtattaaaatttatacaaacatggataaagatgttcaaaaaacattacaaaatgatgttgataatggtagcttctacaagaataaagaccaacaagttggtgcaacgattcttgatagtaaaactggtggtttagttgctatatctggtggacgtgatttcaaagacgtcgttaacagaaaccaagcaacagatcctcaccctactggttcatctttaaaacctttcttagcgtatggacctgccattgaaaatatgaaatgggcaacaaaccatgcgattcaagatgaatcttcatatcaagttgatggttctacatttagaaactatgatacgaagagtcacggtactgtatctatttatgatgctttacgacaaagtttcaatataccagctttaaaagcttggcaatcagttaagcaaaatgctggtaatgatgcacctaagaaattcgctgccaaacttggcttaaactacgaaggcgatattggtccatctgaagtacttggtggttctgcttcagaattctcaccaacacaattagcatcagcatttgctgcaatcgctaacggtggtacttataacaacgcgcattcaattcaaaaagtagttactcgtgatggtgaaacaatcgaatacgatcatactagccataaagcgatgagtgattacactgcatacatgttagctgagatgctaaaaggtacatttaaaccatatggttctgcatatggccatggtgtatctggagtaaatatgggtgctaagacaggtactggtacttacggtgctgaaacttattcacaatataatttacctgataatgcagcgaaagacgtgtggattaacggctttacacctcaatacactatgtcagtgtggatgggcttcagtaaagttaaacaatatggtgaaaactcatttgtgggacatagccaacaagaatatccacagttcttatatgaaaatgtgatgtcaaaaatttcatctagagatggcgaagactttaaacgtcctagctcagtaagtggtagtatcccatcaatcaatgtttctggtagtcaagataacaacactacaaatcgtagtacacacggtggtagtgacacatcagcaaacagcagtggtactgcacaatcaaataacaatactagatctcaacaatctagaaacagcggtggattaacaggtatattcaactaa

SEQ ID NO: 414720 - DNA, 342 bp, Staphylococcus aureus
atgacaaatattacaaaagaggtatttgataatttagaacaagagattgatgtatttgccaaaaataagacattaggttctagtgaagcaaagccctacttggatgaataccatagtaaaattattgattattttaagcaggttaatgacataactggcaatattgattttgataaattaaatcaatatcctgttgtgccaatgaattttaaagaaagatatgattatatgattgaacgtaaatatcattttatgggctatcgacaaatgaagacctttaaaactgaattgattaaaatgaatgctagttatcaaacaaggttaaagaataagcaggtatag

SEQ ID NO: 414721 - DNA, 660 bp, Staphylococcus aureus
atggtaagtaagaaaaaagcattagaaatgattgatgttatagcaaatatgtttccggatgcagaatgtgaattaaaacatgataatccgttcgaattaactattgctgtattattgtcagcgcaatgtacagacgttctagtaaatagagtaacaactgagctgtttaaaaaatacaaaacgcctgaagattatttggcagtcagtgatgaagaacttatgaatgatattcgttctatcggtttgtatcgtaacaaagctaagaatattaagaaactttgtcaatctttgattgatcaatttaatggagaaataccacaaacacataaggaattagaaagtttagcaggtgtaggacgtaaaactgctaatgtagtcatgagtgtagcatttgatgaaccttcattagctgttgatacgcatgtagaacgtgtttctaaacgcttaggtattaatcgttggaaagataatgtgagacaggtagaagaccgtttatgttctgtcatacctagagatagatggaataggagccatcatcaactcattttctttggaagataccactgtttagcccgaaaacctaaatgcgatatttgtccactattagaagattgtagagaaggacaaaaacgttataaagctagtttgaaagaagcgtga

SEQ ID NO: 414722 - DNA, 687 bp, Staphylococcus aureus
atggataaatatcaattaaaagcaagacctgtagtgatacgaagagaattattagaccattacagtgacttaggtttagatgagcaagatttagtcattttgcttaaattgatttatgcttccgaaacatcaaataaacagccttcaattgaattacttcagaagggctcaactatgcaaccacgagatattacaatggttattcaaaatttgatacaacgtgaattgctagaattacaagttcaaaaagatgaagaaggtagatttaccgaatatatgaatctagatccttttttcgaaaaattaagtcatatattgaagcaacaaagtatggaaacgaaagagcaaaatagtaaagaaaaatttaaacaattatttagagttttagaggatacatttgcaaggccgttatctccatatgaaatagaaacgttaaatcaatggattgatgttgataaacacgatagtgaaattatacaagcggcattagacgaggcgaatagtttgaataaacttagctttaaatatatggatcgtattttacttaattggaagaaaaacaatgtcaaaacaattgacgattctagaaaaataagagaaaaatttaataaaccgaaaatgacgcacacagttaaaacggtacctaaatttgattggttaaacggggagaaccttgatggtaagtaa

SEQ ID NO: 414723 - DNA, 1293 bp, Staphylococcus aureus
atgaaaacaacgattaaacaagcgaaagatcatttaaaccaagacgttacaattggtgcttggctaacaaataaacgttcaagtggtaaaatcgcctttttacaattacgtgatggaacaggctttatgcaaggcgtagtagttaaatcagaagttgatgaagaggtattcaaacttgcgaaagaaattactcaagaatcatctctatacgttacaggcacaattacagaagataatcgttctgacttaggatacgaaatgcaagtgaaatcaattgaagttatttcagaagcgcatgactatccgattacacctaaaaatcatggtacagaattcttaatggatcaccgtcatttatggttacgttctaaaaaacaacatgctgtaatgaaaattagaaatgaagttattcgtgcaacgtatgaatttttcaacaaagatggatttacaaaggttgatccaccaattttgacagcaagtgcgccagaaggtacaagtgaattattccatactaaatactttgatcaagatgcgtttttatctcaaagtggtcagttatacttagaagctgcagctatggcacacggaaaagtattttcatttggtccaactttcagagctgaaaaatcaaaaacacgtagacacttgatcgagttctggatgattgaaggggaaatggctttcacaaatcatgctgaaagtttagaaattcaagaacaatatgtaacacatgttgtaaaatcagttttagaaaattgtaaactagagttgaaaattttagagcgtgatacatcaaaacttgaaaaagttgcgacaccattccctagaatttcatatgatgatgcaattgaattcttaaaagcagaaggctttgatgatattgaatggggcgaagattttggtgcgccacatgaaacagccattgctaatcattatgatttaccggtgtttattactaattatccaactaaaattaagcctttctatatgcaaccaaatcctgaaaatgaagaaactgtattatgtgcagacttaattgcacctgaaggatacggtgaaattattggtggatctgaacgtgtggatgacttagaattgttagaacaacgcgttaaagaacatggattagacgaagaagcatatagttactacttagacttacgtcgttatggtagtgtgccacactgtggatttggtttaggtttagagcgtacagtagcatggatttctggtgttgaacacgttcgtgaaactgcgccattcccaagattattaaaccgtttatatccataa

SEQ ID NO: 414724 - DNA, 2694 bp, Staphylococcus aureus
atgggtatggcaacctatgccgttgtggatttggaaacaacaggcaaccaattagattttgacgatatcattcaaattggtataacgtttgtgcgcaataaccaaattattgatacatatcattctatgattagaacaaatttagagattccgccgttcattcaagcgttaacatccattgaagaaaatatgctacaacaagcgccatattttaatcaagttgcacaagaaatctacgataagataaaagattgcatttttgtcgctcataatgtagattttgatttaaattttattaaaaaggcatttaaagattgtaatattcaatatcgtcccaaaaaagttatagatacactagaaatctttaaaatagcttttcctacagataaaagttatcaattaagtgaattagcagaggcacatggtattaccttagcaaatgcccatcgagctgacgaagatgccgctactactgctaaattgatgatattagcttttgaaaaatttgaaaagttaccgttagatactttgaagcaattatattatttaagtaaacagttgaaatacgatttgtatgatattttctttgagatggttaggcaatatgatgcaaagccattggataaatcgtacgaaaagttcgaacagattatctatcgtaagcaagttgattttaaaaagccgacaacaaattataatggcagcttgaagtctttatatagcaaagctgtagatcaacttggcttaacatatcgaccgcaacaattatatttagcggaaactatattagatcagctcatgcatagtgaaaaagcaatgattgaagcatcactaggcagtggtaaatcattagcatatttacttgcggccttgatgtataatattgaaactgggaagcatgtcatgatttctaccaatactaaattactgcaaagtcaattgttagaaaaagatattccagcaatgaatgaagcgttaaattttaaaattaatgcactattgattaaaagtaaaagtgattacatttcattgggacttattagtcaaattttaaaagatgacacaagtaattacgaagtgaatatcttgaaaatgcaattgttgatttggattacagagacgccgtccggagatatacaggaattaaatttaaaaggtggtcaaaagatgtattttgaccagaaaattgaaacatatgtaccggcacgtcacgatgttcattattataattttattaagcgaaatgcacagaacattcaaattggtattacaaatcatgcacatttaattcattctgatgttgaaaattcaatatatcaattgtttgatgattgtatagtggatgaagcacatcgcttaccagactatgccttaaatcaagtgacaaatgagttgagttatgctgatattaaatatcagcttggtttgattggtaaaaacgaaaatgaaaaattgttaaaggcaatcgatcaactggaaaagcagcgaattttggaaaaattagatattgcaccaattgatatttttggcttgaaggctagtatgaatgagattcatgagttaaatgagcaattgttctcgacgatatttacgattatcaatgattctgatgtttatgatgatgatattcatcgcttccataatgtatttacttttgaaacaaaagacattttgaaggatttacatgcaattatcgataagttaaataaaacgctagaaatattcaatggcattagtcataaaacagttaaatcattacggaaacagttgttgtatttaaaagataaatttaaaaatatcgaacaaagtttaaaagctggacatactagtttcatttcgattaaaaatttatctcaaaaatcaacaatacgtttatatgtgaaagattacgctgtaaaagatgtattaacgaaacaagtattggaaaaatttaaatcactcatttttatatctggtactttaaaatttaatcattcgtttgaagcttttaaacagttattcaacaaagatgttcactttaatacatttgaagttaacacgtcgttacaaagtgcaaaaaatacaagtgtatttataccgagtgatgtagcatcttatcaatataaaaatatagatgagtatgtagcatcgattgtaagctatattattgaatatacgactataacgtcatcaaaatgtttagtcttatttacgagttataaaatgatgcatatggtacaagatatgctaaatgaattgccagaatttgaagattatgttgtattaacacaacagcagaaccaaaattataaaatagtacaacagtttaataattttgataaggccgtactgcttggtacgtcaacattttttgaaggctttgattttcaagcaaatggtattaaatgtgtgatgatagcgaagttaccgtttatgaacaagcataatgcaaaatattggcttatggattctgaattcacttcaactttcaaggaatatgtattacctgatgcagttacacgttttagacaaggacttggaagattaattagaaatgaaaatgatcgcggcataatagtttcatttgatgatcgactcataaacagtaattataaaaacttttttgaacaaacacttgaaaattatcgtcagaaaaaaggcgacattcaacagtttggaaaattattaagacaaattcaaaaaaagaaaaagtga

SEQ ID NO: 414725 - DNA, 972 bp, Staphylococcus aureus
atgtcaaaatatagtcaagatgtacttcaattactctataaaaataaaccgaattatatatctggacaaagcattgcggaatcacttaatatttcacgcactgcagtaaaaaaggtgattgaccaattaaagttagagggatgtaaaattgattcagtaaatcataaagggcatttattacaacaactcccagatatttggtatcagggtataatagaccaatatacaaaaagttctgctttgtttgattttagtgaagtatacgattcaatagattctacacaacttgctgcgaaaaagtcacttgttggaaatcaatcttcattttttatcttgagtgatgaacaaactaaaggtcgtgggcgatttaatagacattggagttcttcaaaagggcaaggactttggatgtctgtcgtgttaagacctaacgttgcattctcaatgatatctaaatttaatttatttattgcattagggataagagatgcgattcaacattttagtcaagatgaagtcaaagtgaaatggccgaatgatatatatattgataatggtaaagtgtgtggtttcttaactgaaatggttgctaataatgatggtatagaagcaataatatgtggtataggtattaatttgacgcaacaactagaagactttgatgaaagtattagacatagagcaacaagtatacaattacatgataaaaataaattagatagatatcaatttttagaaatattacttgaagaaattgaaaaaagatataatcaatttttaacgttacctttttctgaaattcgtgaagaatatattgcagcttctaatatttggaatagaacgttgctatttacagaaaatgataaacagtttaaaggacaagcaattgatttagattacgatggctatctaattgttagagatgaagcgggtgaatcacaccgtttaattagtgcagatatagatttttaa

SEQ ID NO: 414726 - DNA, 1203 bp, Staphylococcus aureus
atggataaatcattatttgaacaggcaaggcctatattagaacaaattcaagacaatggttttgaagcatattatgtaggtggctctgtaagagattatgtcatgggaagaaatattcatgatatagatatcacaacaagtgcaacgccagatgaaatagaatctatctttagtcatacgatacctgtaggtaaagaacatggcacgataaatgtagtttttaatgatgaaaattatgaagtgacaacattccgggctgaagaagattatgtcgatcaccgtagaccaagtggtgttacatttgttcgggatttatacgaagatttgcaacgaagagatttcacgatgaatgcgatagcaatggatacaacatacaaattgtatgattattttgatggtcaacaagatattaataatcgaataataagaactgtaggtatagctgaggaacgattccaagaagatgctttacgtatgattcgatgtttaagattccagtcacaattatcatttgatattgcaacggaaacattcgaagcgatgcgtacacaaatggcagatattaaatttttatcaattgagcgtatagtgattgaactaactaaattaatgcgaggtattaatgttgaaaagagttttaatcatttaaaatcgctgaaagcatttaattatatgccatatttcgaacatcttgatatgaatcaaattaatgtgactgaagcaattgatttagaattgttgattgctatagcatcagttaaatttgatattaattactcattgaagcctttaaagctaagtaaccgacaagtaaaagatatcaatcaatatattcaaattatgaatgcattaccaagtattattacaaaagaacaattaaaaatgtttgtttatgattatgatacgaatctcattaaaaatgtaatggttgcagcagacgtgttaaaggcaaatgatattcaaggacatgaaccattaatcgttaaccttcaaacgattaatgaaacattacatcgtttacctatgcataatagaaaagacatgatggttaatggcggtgtacttatggcacatttaaatgccaaaagtggtccgtggttaaaagatgtactaagacaaattgagatagcgattgtaacaggtaaagtaagcaacgaagaaactgaaattttgaaatgggtggataatcatgtcaaaatatag

SEQ ID NO: 414727 - DNA, 1143 bp, Staphylococcus aureus
atgaagataggtataacatgttacccgtccatgggtggttctggaattattgccacagaattaggaattaaattagcagagcgaggtcacgaagtacattttatcacttcaaatatcccatttagaataagaaaaccattaccgaatatgatttttcatcaagttgaagtgaatcaatatgcagtatttcaatatccaccgtatgatattacgttaagtactaaaatcgctgaagttattaaagaatatgatcttgatttgttgcatatgcactatgctgtacctcatgcaatttgtgggattttagctcgtgagatgtcaggtaaagatataaagattatgacaacgttacacggtactgatattactgttttgggctatgatcattcactccaaggtgcaattaaatttggcattgaaaaaagtgatattgtgacaagtgtgagtaaatctttagcgcaagaaacacatgaaattattgaaactaacaaagagattataccgatttataattttgtacgtgaaaatgagtttccaactaaacataacacagcattaaaatcacaatttggtatagcaccagatgaaaaagtgttaatacatgtatcgaattttagacaagtaaaacgcatagatactattatagaaacatttgcaaaagtacgtgaaaagatacctagtaaattaattttacttggtgatggtcctgaattagtgccaatgcgtcaattgacgaaagagttaaacgtagaagaggatgttttatttttagggaaacaagattgcgtaagtgaattttatcaattatctgacttagtattattattaagtgaaaaagaaagctttggactaactttacttgaggctatgaaaacaggcgtcgttccaattggttcaaatgccggtggaattaaagaggttattaaacatggtgaaactggatttgttgtagatgtgggtgattgtgattcagcgagtgactatgctatccgattacttgaagataaggcgttatacaacaaacttcagaaaaacatgctagcagatattgctgaacgtttaggatcagaactcattacagatcaatatgagtattattatcaaaaaatgctaaatgagcataacaaaagtaaaggcgagtaa

SEQ ID NO: 414728 - DNA, 318 bp, Staphylococcus aureus
atgaaatcaatggtagaaatgcaacgtgaagttgatgaatatattggacaatttaaaacaggatatttttcaccattagctaacttagctagattgactgaagaagtgggcgaacttgcacgtgaaataaatcatacctatggtgaaaaaaagaagaaagattcagaggaagcaaatacgattaaagcagaattaggtgataatttatttgtgttgttatgtttagcgaattcaatgggaatagatatgacagagagctttaatgaaactatggaaaagtttaatacaagagataaaaatcgattcgaaagaaagtga

SEQ ID NO: 414729 - DNA, 699 bp, Staphylococcus aureus
ttgtcttcaatttttactatgataatttatttcgtaatattaatggtgcttcctttatgggcacaacacaaagttaaatctaactatgagaaatattcacaagttagatcaactagtggtaaaacgggtcgtgaagttgcattagaaattttacatgcaaacggtatttatgatgtcgaagttgttaaaggtgaaggattcttaacagatcattacgatcctaaaaagaaagttgtttcactatctcctgcaaactatgacagaccatcagttgctggaactgcaattgcagcccacgaagttggtcatgccattcaagatcaccaaggatattggttcttaagattcagagcagcattagtacctgttgcaaacctagggagttcattaagttatatgatcatcatgttaggtattatcttaacagcgataggtagtgcatttggttcaactgctttatggattggtgctggtttaatgtcattagcggtattattctcaattgttacgttaccagttgagtttgatgcgagttcaagagcgatgaaacaaattacggcattgaacattgtaaatgaaaaggaatacaagcatgcgcgtaaagtattatctgcagcagcaatgacttatgttgcagcaactgctgtcgctgtagcagagcttgtacgtattattttgattgcgcgttcaagtgattaa

SEQ ID NO: 414730 - DNA, 588 bp, Staphylococcus aureus
atgacgattaatacattttggcaatatacactttatcaacgttcttggttaatgatgctactcatttgtaatatattagggatgatttatggttatatatggtatggtgaacaattaagtcatacgccgtggcattttaagatttttgttccagatagcccaactgcaatattatacttagttatttctatcacattgatattaattcaaaaacaaaatagtattatcgatgcactggcatttgtaacattattcaaatatgggatttgggcagttataatgaatatattatttattattgaacaaggtgatattacagtaaatggtttggtattaatgttttcccacagtataatggctattcaggcaatttacttctatcctaggtttaaacgttctatgattggaatcagtgtagcgatgatttgggtatttttgaatgattatattgactattttcaccttcaatttccatattatgattttataactacacatgtgtggcaaattggtgtattatcatgttgtctaagtgtttttggacttttgctttatattgaattaaacaaattattaaagtgtaaatga

SEQ ID NO: 414731 - DNA, 588 bp, Staphylococcus aureus
atggggtatttgatgtcagagacactcaatcaaattaaagaaagttttattgaatatttactttttcaatatcgatttaagtcgcgtattgcagtttgggtgcttaactatataaaagtgaatgaggcgaaattggcaaacattcattttgtagatacaaaaattaatcatcatgaaacattagaaattgcagaagtgggaagtcacgcttctgcaattcaatttactaagcgtaatataaagttaatgaatacaaatgaaatatttgattatatcgctaatcataactgtgcttttgatattcaaattcacttcgcaaacgtgtcaaagcgtgagcaaaggctagatgatttaatagttgctcaactaacggaatcgcccagttatcaaacttatcttcatgacttaaatagtatggctatagatcggcataaacatgcgttattaatagattacttgctacataatattgatttaagtttacagatgaatgaaaagcaacgtttttatcaactaacgcaaattttaaatacactcaagctagtaaataaacataatcaatttgaggacttagcagatgacgattaa

SEQ ID NO: 414732 - DNA, 1245 bp, Staphylococcus aureus
atggaagatatctataaattaatagacgatatcaatctacaaaaactagaaaatttagactctcgtgttaatgaagcaataactactgacaacgatgacgcattatttattctaggagagacactttacaattttggattaatgccacaaggtttggaagtattccgcgtgttatatcaaaaatatccagacgaaagtgaattgctgatttattttattgaaggtttaatgtctgaaaatcaaactgacgaagcgttagaatatttaagttatgttgaaccatcacctgaaaagttgatgttagaagcagatttatatcaacaaattaatatgatggaagttgctattgataaattacaagaagcacttgaactagagccaaatgatccaataatccattttgcattggctgaaatgttatattatgatggtcaatatttacgtgctacctctgaatacgaaaccgttttagaaactggtgaatatcaagttaatggtgtaaacttattctctcgtatggcagattgtagtttacaaagtggtaactatagtgatgcgattcgcttatacgatgaaattaatgaagatgaaatgacttcagaagattatctcaaaaaagccatttcttacgataaaaatgacatcactcaagaagcaattaaaataatgactacattactttctaaagatcctgattatattcaaggctacttgtatttacaatcattatatgaaaatgaaaaaaattatccagatgccattgagacgggtaaagaaggattacgactaagtcaattttataaagagttaatgtatacaactggatgtttggaaatagaacacggcgatgctaatgaaggtgtattattgttaaaacaagcattagaggttgataatgcttaccaagaacctttattgattttaagcgatttatatcgtaatgaagaagattatgaagcaatcattgaattattaacatatgtagatgaagaagatttggatcctacattcatgtggcatttagcgttcgcctatggtcaagaagagcgagataaagaagctcaacatttctttgaattagcatatccaacgatgaaaacaaatattgattttatgagtgattattatttctatttaattgaaattggtcaaaaggaacaagcaattactattttaaatcaattgttggaactagaaccaagtaacgaaaattggcatgacgaattatcaagattgcaatcttaa

SEQ ID NO: 414733 - DNA, 1299 bp, Staphylococcus aureus
atggtaaatgaacaaatcattgatatttcaggtccgttaaagggcgaaatagaagtgccgggcgataagtcaatgacacaccgtgcaatcatgttggcgtcgctagctgaaggtgtatctactatatataagccactacttggcgaagattgtcgtcgtacgatggacattttccgactgttaggtgtagaaatcaaagaagatgatgaaaaattagttgtgacttccccaggatatcaatcttttaacacgccacatcaagtattgtatacaggtaattctggtacgacaacacgattattggcaggtttgttaagtggtttaggtattgaaagtgttttgtctggcgatgtttcaattggtaaaaggccaatggatcgtgtcttgagaccattgaaacttatggatgcgaatattgaaggtattgaagataattatacaccattaattattaagccatctgtcataaaaggtataaattatcaaatggaagttgcaagtgcacaagtaaaaagtgccattttatttgcaagtttgttttctaaggaaccgaccatcattaaagaattagatgtaagtcgaaatcatactgagacgatgttcaaacattttaatattccaattgaagcagaagggttatcaataactacaacccctgatgccattcaacatattaaacctgcagattttcatgttcctggcgatatttcatctgcagcgttctttattgttgcagcacttatcacaccaggaagtgatgtaacgattcataatattggaatcaatccaacacgttcaggtattattgatattgttgaaaaaatgggcggtaatatccaacttttcaatcaaacaactggtgctgaacctactgcttctattcgtattcaatacacaccaatgcttcaaccaataacaatcgaaggagaattagtgccaaaagcaattgatgaactgcctgtaatagcattactttgtacacaagcagttggcacgagtacaattaaagatgccgaggaattaaaagtaaaagaaacaaatagaattgatacaacggctgatatgttaaacttgttagggtttgaattacaaccaactaatgatggattgattattcatccgtcagaatttaaaacaaatgcaacagttgatagtttaactgatcatcgaataggaatgatgcttgcagttgcttctctactttcaagcgagcctgtcaaaatcaaacaatttgatgctgtaaatgtatcatttccaggatttttaccaaaactaaagcttttagaaaatgagggataa

SEQ ID NO: 414734 - DNA, 1065 bp, Staphylococcus aureus
atgaaattacaaacaacctatccttcaaacaattatccaatatttgttgaacatggtgcaattgaccatattagcacgtatattgatcagtttgatcaaagttttatattaattgacgagcatgtaaatcaatattttgctgataaatttgatgatattttatcatatgaaaatgtgcataaagtcattattccagctggtgaaaagacgaaaacatttgagcaatatcaagaaacattagaatacattttgtcacatcatgtaacgcgtaatacagcgattatagctgttggtggtggtgcgacaggagattttgcaggatttgtagcagcaacactattaagaggtgtccattttatacaagttcctacaacgattttggcgcatgattctagtgttggcggtaaagtgggtattaactcaaaacaaggtaaaaaccttatcggtgcattttatcgtccagatgctgtaatttatgacttagactttttaaatactttgccatttgatgaaatattgagtggctatgcggaagtatataagcatgccttattaaatggtaaatctgctacacatgacatcgagcaacattttaaagatcgagcgtcattacaatcattaaatggtatggataaatatattgctaaaggtattgaaacgaagttggatattgttgttgcagatgaaaaagaacaaggtgtacgtaaatttttaaatttaggtcatacatttgggcatgctgttgaatactatcataaaatacctcatggtcatgcagtgatggttggcattatctatcaatttatagttgcgaatgctttgtttgattctaagcatgatattaatcattatattcaatatttaatacaactcggttatcctttagacatgataactgacttggattttgaaacgttatacgaatatatgctaagtgataaaaagaatgataagcaaggtgtacaaatggtcttgattagacaatttggtgatatcgttgtacaacatgttgatcaactaacattacaacatgcatgtgaacaattaaaaacatattttaagtag

SEQ ID NO: 414735 - DNA, 1167 bp, Staphylococcus aureus
atgagatatctaacttcaggagaatcacatggacctcaattaacagttattgtcgaaggtataccagcaaatttagaaattaaagttgaagatattaataaagaaatgttcaagcgtcaagggggttatggtcgtggccgacgcatgcaaattgagaaagatacagtagaaatagtatcaggcgttagaaatggttatacattaggtagtccaattactatggttgtaaccaatgatgactttacgcattggagaaaaattatgggagcagctccaataagtgaagaagaacgtgaaaatatgaaacgtactattacaaaaccaagacctggtcatgcagatttggttggaggtatgaaatataatcatcgtgatttacgaaatgtgctagagcgatcatctgctagagaaacagcagctcgagttgcagtcggtgccttatgtaaagtgttattacaacagttagatatcgatatatacagtcgtgttgttgaaataggtggaattaaagataaagatttttatgattcagaaacatttaaagcaaatcttgatcgtaatgatgttcgtgtaattgatgacagtatcgcacaagcaatgcgagataaaattgacgaagctaaaaatgaaggagattcaattggcggtgtcgttcaagttgtagttgaaaatatgcctgttggtgttggtagttatgtgcattatgatcgtaagttagatggtaagattgcacaaggtgttgtcagcataaatgcttttaaaggtgtaagctttggtgaaggatttaaagcagctgaaaagccaggtagtgagattcaagatgaaattctatataatagtgaaattggttattatcgtggatctaatcatttaggtggtttagagggtggtatgtcaaatggtatgccaattattgtaaatggtgtaatgaaacctattcctacgttatataaaccattaaattcagttgatataaatactaaagaagactttaaggcaacaattgaacgttctgatagttgtgctgtacctgcagcaagtatcgtgtgtgaacacgttgttgcatttgaaatagcgaaagcattacttgaagagtttcaatcaaaccatattgaacaacttcaacaacaaattgctgaccgcagacaattaaatgttgagttttaa

SEQ ID NO: 414736 - DNA, 201 bp, Staphylococcus aureus; identical to SEQ ID NO: 406409

SEQ ID NO: 414737 - DNA, 450 bp, Staphylococcus aureus
gtggaacgtacatttttaatgattaaaccagatgcagtacaaagaaatctaattggtgaagtaatttcaagaattgaaagaaaaggactaaaacttgtcggtggtaaattaatgcaagtaccaatggaacttgctgaaacacattatggtgaacaccaaggtaaaccattttataatgatttaatttcatttattacatcagcaccagtgttcgcaatggtagttgaaggtgaagatgcagttaatgtatctagacatattattggcagcacaaatccttcagaagcttcaccaggatcaattagaggtgatttaggtttaactgttggtagaaatatcattcacggttcagattcattagagtctgctgaacgtgaaattaatctatggtttaatgaaaatgaaattactagctatgcttcaccacgtgatgcatggttatatgaataa

SEQ ID NO: 414738 - DNA, 960 bp, Staphylococcus aureus
gtggcaaagttaaacatgaacaatgaaattaagaaagtggaacaacgacttgaaaaggcaataaaaagtaaagattctgtattagaacaggcatcattacacttattgtcttctggtggtaaaagagtacgcccagcatttgttattctgagtagccaatttggcaaagatgaacaaacgtctgaacaaacgtatcaagttgcagtcgcattagagttaattcatatggcaacacttgttcatgatgacgttattgataaaagcgacaagcgtcgaggcaagttaaccatatcaaagaaatgggatcagacaactgctattttaactgggaattttttattggcattaggacttgaacacttaatggcagttaaagataatcgtgtacatcaattaatatctgaatctatcgttgatgtttgtagaggggaacttttccaatttcaagaccaatttaacagtcaacagacaattatcaattatttacgacgtatcaatcgcaaaacagcactgttaattcaattatcaactgaagttggtgcaattacatctcaatctgataaagagactgtacgaaaattgaaaatgattggtcattatataggtatgagcttccaaatcattgatgatgtattagacttcacaagtaccgaaaagaaattaggtaagccggtcggaagtgatttgcttaatggtcatattacgttaccgattttattagaaatgcgtaaaaacccagacttcaaattgaaaattgaacaattacgtcgtgatagtgaacgtaaagaatttgaagaatgtatccaaatcattagaaaatctgacagcatcgatgaggctaaggcagtaagttcgaagtatttaagtaaagctttggatttgatttctgagttaccagatggacatccgaaatcactacttttaagtttgacgaaaaaaatgggttcaagaaacacgtag

SEQ ID NO: 414739 - DNA, 726 bp, Staphylococcus aureus
atggctgacaataaagcaaataaagagcaagtacatcgcgtttttcaaaatatttcaaaaaaatatgatagattaaataatattattagttttgagcagcataaagtatggagaaaacgcgtcatgaaagacatgggcgttagaaaagggacgaaagcattagatgtttgttgtggtactggtgattggacaatcgcattaagcaaagctgtaggaccaacaggtgaagttactggtattgactttagtgagaatatgttagaagtaggaaaagaaaaaactgcttcaatggaaaatgttaaacttgttcatggtgatgcaatggaattgccgtttgaagacaattcttttgattatgtaacaattgggtttggattaagaaatgtgccagactatttagtcgcgttaaaagaaatgaatagagtacttaaaccaggtggtatggtggtatgtcttgaaacgagccaaccaactttgccagtctttaaacaaatgtatgcattatactttaaatttgttatgcctatttttggaaaattatttgcaaaatcaaaagaagaatatgaatggttacagcaatctacgtttaattttcctggaaaagaagagttgaagcgcatgtttgaagaagcgggtttcataaatgtaagagtacgtagttttacagggggcgttgctgcaatgcaccttggctataaagaaaaagataataccaaaggtgattaa

SEQ ID NO: 414740 - DNA, 573 bp, Staphylococcus aureus
atggaaacaactgttagcaaattggaaagacaaatagaagaaagattaaagggtgtatcagaatatgaatccattaatattaatcatcggttaggtaagttacttgattcatatgatattccagatgttgccaaagtagcatgcctcacaattgacacatcaatgagacaccttgatgacattacatataatcatttgtctaaacattccattttgattggagatttaattagtgcacatttttatacgctactagcagaaatcaatgatttatcatttcaaaatgaaattagtaaagcaattgttgaaattaatgaattgaaatcttcattacatcatcaagctttaaatgattatgaaatttctcaagcaatagtaaaaattgaaacacttttcccatatattacgttatctcatttcggtatcaatattgatgagtcggaaatatataattatttatttgaagatatgtctgattactatccatcatacttcaagaaatataatcaaagtgaagtaaagcattacttacacgatatccaaaaaagttatttaaaaagtagaggtaattaa

SEQ ID NO: 414741 - DNA, 273 bp, Staphylococcus aureus; identical to SEQ ID NO: 406404

SEQ ID NO: 414742 - DNA, 999 bp, Staphylococcus aureus
atgactaaaattaccgtttttggtatgggaagttttgggacagcccttgccaatgttcttgcagaaaatggacatgatgttttgatgtggggtaaaaatcaagatgctgttgatgaattaaatacatgtcatacaaataaaaagtatttaaaatacgcgaaattaaatgttaacatcatcgctacttcagatatgaccaaagcaattcaatttgcagatatttacttaatggctttacctactaaagcaatgcgagaagttgctactcaaattaatgataagctgacatctaaaaagacttttatacatgttgctaaaggtattgaaaatgggacgtttaaacgtgtgtcagaaatgattgaagattctatttcacccgaatataatgcaggtattggcgtgttgtcagggccaagtcatgcggaagaagttgtagtcaagcaaccaactacagttgctgcatcatcaaaagataaaagtgtaagtaaattaacgcaagatttatttatgaatgattatttgcgtgtgtacacgaatgatgacttgattggtgttgaacttggtggtgcattgaaaaatatcatcgcagtagcaagtggtatcgttgctggaattggctacggtgataatgcaaaagctgcattaatgactcgtggcctagcggaaattagtagattaggtgaaaagttaggtgccgatcctatgacatttctaggtttaggtggtatcggtgacttaatcgttacttgcacatcaacacattctcgaaatttcacattaggatataaacttggacaaggtgaatcaatggatcaagcattatctgaaatgaatatggttgttgaaggtatttatacaactaaatcagtttatcatttagctaaagaaaaaaatgtggatatgccaattacaaatgcattatatagagtattatttgaaaatatctcagtaaaagaatgcgtaaaagatttaatggagcgcgataaaaaatctgaataa

SEQ ID NO: 414743 - DNA, 1311 bp, Staphylococcus aureus; identical to SEQ ID NO: 406402

SEQ ID NO: 414744 - DNA, 1176 bp, Staphylococcus aureus; identical to SEQ ID NO: 406401

SEQ ID NO: 414745 - DNA, 660 bp, Staphylococcus aureus
atgaaagccattaatattgcattagatggtccagctgctgccggaaaaagtacaattgcaaaacgtgtagccagcgaactatcaatgatttatgttgatacaggagcaatgtatcgtgcattaacatacaaatatttaaaattaaacaaaactgaggactttgcaaaactagttgaccaaacaacattagatttaacttataaagcagataaaggtcaatgtgtcattttagataacgaagatgtaacagactttttaagaaataatgatgtgacgcaacatgtttcatacgttgcatctaaagagccagtacgttcattcgccgttaaaaaacaaaaagagttagctgcagaaaaaggtatcgtaatggatggtcgcgatatcggaactgtagtgctaccagatgcagatttaaaagtatatatgattgcatcagttgaagagcgagcagaaagaagatataaagataatcaattaagaggtatcgaatcaaattttgaagatttaaaacgtgatattgaagctcgtgatcaatatgacatgaaccgtgaaatatcaccattaagaaaagcagatgatgcagtgacattagatacgacaggcaagtcgattgaagaagttactgacgaaattttagcgatggtgagtcaaattaaataa

SEQ ID NO: 414746 - DNA, 1380 bp, Staphylococcus aureus
atgttgcatgatattttacgaaacaaatttggattcgagagttttaaaccgggacaacaggaaattatagaaagtataatgtctcaacaacacactctaggtatacttccaactggaagtggaaagagtttgtgttatcaaatacctacgtatttatcaggtaagccgacattaattatctcaccgttaatatctttaatggatgaccaagttatgcagttgaaaataaatggagaaaaacgtgtaacatgtattcactctggtatggatgaaattgagaaaaagcataatattaaatgtttacgacatagccgcttcatctttctaagtccagaatttctcctgcaaccgtcaaattttaaattaatatctatgatagactttggcatgattgttctagatgaagcacattgcctatctgaatggggatatgatttcagaccacattatgctctaataggaaaagtaacaaagcattttaaagaagcggttgtcttagcattgacagcaactgcaccaccgcatttacaagatgatttgacggaaatgttagcgattcaattcaatgttattaaaactacaatgaatcgcccaaatataagctttaagcatcttaattttcatgatgatgaagataaaattgaatggttgctgccgtttctacaacagtcgggaccaacgattatttatgtctcatcgaaaaagatgtgtctgaatttagcgcaacttatttatgattcaggttttcttacaggtatttatcatggtgatatgaattatcaagagcgacacacagttcaacaacaatttttaaataatgatattccgattatagtcgcaacgagtgcttttggtatgggaattaataaaaaagatattcgcacaatcattcactttcatctttcaacaagtccttctaactacattcaagaaattggccgtgcgggtcgcgatggtgaactaagtcaggcaattagtttatttcaaccggacgataaatatattttagaaacgttattatttgcagatatgataacagaagaagatgtacaaaatttcgaaataggagaatttttagcacccgataaacaagacgttttgacaacgttgcattcattctatagtatcggcgccttgaaacagatatttaagcaatcatttaaacgaaagcaattaggattctttcgcatgattggctattgcaaattggatcaatgtagacggaagtatttattagaatttttcggtgaatatccaccggcacaagatcgatgttgtgacaatgattctaatataactgatatcgtaattttaaataagaagaaggtaattagaagtattggatttgatgaaaagttgcaaaatttatttctcagatag

SEQ ID NO: 414747 - DNA, 255 bp, Staphylococcus aureus
atgaaaataagaggctatgattacaaggcaagaaagaaaaaagttgaagaaatcttagagaatactaattttatacatgaagtggaaagatttcctaataatgatgattttacatatgagaatggctataaagcttggcttagtgcaatttttgtagatttaagaaattctactaaattattcacagaaaatagagaagtagatgttgccaaggtgattagaggctttacgtctgaagttatagagattttataa

SEQ ID NO: 414748 - DNA, 1161 bp, Staphylococcus aureus
atgagtaatacacaaaagaaaaatgtgccagagttgaggttcctagggtttgaaggcgaatgggaagagaagcagttaggggatattataaaagttaattctggaaaagattataaacatttggataaaggcgatataccagtctatggtactggcggttatatgacaagtgtttcagaaccactaagtgaaattgatgctgttggtattgggagaaaagggactataaacaaaccatatttgcttgaggcgccgttttggacggtggatacattattttattgtacacctaaaaaagaaacagacatactatttatattaagtttatttagaaaaataaactggaaagtatacgatgaatcaacaggtgtgccaagcttaagcaaacaaaccattaataaaataaatagatttgtccctacaaataaagagcagcaaaaaataggcaagttcttcagcaaactcgaccggcaaattgaattagaagaacaaaaacttgaattacttcaacaacagaaaaaaggctatatgcagaaaatcttctcgcaagaattgcgattcaaagatgagaatggtaatgattatccggaaagtctactttataaacttagcgagattggaacatttaatactggtattggatttcctgaaagtttacagggtgggaaagaaggaatacctttctttaaaatttctgatatgaataataaaggcaatgaaataattatgagaaatgctaataactacgtttcaaatgggattatagagtctaaaaaatggaaaattataactaacgtaccatctatgatttttgctaaagttggagctgcaataatgttgaatcgaaaaagattagttttagaaccatttttaatcgataacaatactatgagttattcattttcgcaagaatggaacattaattttggaagaacattgtttcaaaccatttatttacctaaatatgcccaggttggtgcacttccatcatacaatgcaaaagatattggattaattaaaatagaattacctgtcaaagaggaacaaaaaagaataggtgacttttttgtttggtttgaagaattaattgaaagacagatattaaaactagatttattaaaagagagaaaaagagcgattttacagaaaatgtttatttaa

SEQ ID NO: 414749 - DNA, 144 bp, Staphylococcus aureus
atggaaaatgttcttgatttagacgtacaagtaaaagcgaaaaacgacacttctgattcagcgggtgacgaacgtattactagtttcattggttgtactcctggttgtggtaagactggtagttttaatagcttctgctgttaa

SEQ ID NO: 414750 - DNA, 954 bp, Staphylococcus aureus
atggttaaattaaatgcatgtataaatgaagtgaaaacattcaaaggtatagtgaataatgtggtcaaagaaccagtatcctcatctgttaagaaaaaagctattcttgaaaaaatgtctgatgaggagagaaattattatcattcattcgtagaagaaaatgaattagaagaattaagcttaccttttttgaaaaataatatatatttaaagaaagtaaaagccaaattagaatatcctaggaagaagaagttgaacgagaatggaatatttttaccgaaaagtgatcgactaaatattgcctatgtagatgtttattttttagggctaaacaatagattttatacagttattactactagtaataaaacatgggtcaatagaattaaaaatttaattggcagtgagaatttcatagttaatgatgacttggatatagataatgatatatttaattggcttatgtacttatatgaagaaagaaacggtaatataagtgaaaaacttaaaattgaaaatataagtggttttgtagggaatatagctgatgatactaacgttttttcgggtaactctaatcaaactactgaattaacagttactaaggcatttattagtaatggtggagaactaaaaaaagtaggtactagaattagacatgatgaaataatagatataatattttttatcgaccataagtcgaatatttctatagattgtgtctcgtcaattgatttaattctattaaatggggttaatactcaattaggcaaagaagtttattatatgctttatatatactgttatttgatcaatgaattaaaaaagcgatacgccgttgaatcaaaagagtttatgaatactaaaaaaagagcattttccaaaaaaattggtttagaagttataaaatctataatgattgaaaatggaatagaactgaatgaactgaaataa

SEQ ID NO: 414751 - DNA, 708 bp, Staphylococcus aureus
atgaaaaaggtttggaatggcttcaaaaccttagttattactattttaacagttttagttgcaagtaatcacactaattttatttatgttggattagagagagtgggtcttgctgatgagactataaaaaaagtgatattaggagctcttatcacttttgctataatattaatagaagcttttttatcatgtttattcaaaattttaggaaaaatgtttttagtgtatttatcgagaataactatacaagtctcaatcaataattcaggtagacaaccaaataaaatagtatttgaaccttttaatggagagtatgaagaaaagataatagcattaaatattgctataacacctaaaggaaaattaataatgaagatattaaaaaaattgaattttcaattttcaattttctttaatcctaaaatattagatgttgaaccaattaacaatccaaattttagtgaaattaaggatgttagtagtaacatggatagaattgactattccatattaatgaattatgacttagacgcaattaatcatcttcaatatgagaagactataaaattcattgtaaaacctaaaagagttgaagatgatcaatgtaatctaagctatagtattaaatcaaatatcttacaaacaaaggtaaaacatttatgcgaatttagttatgaaaatttgtctgtaatatgtcgtgaaaggtga

SEQ ID NO: 414752 - DNA, 537 bp, Staphylococcus aureus
atggaatattttaaaattttattacaaagagatattgaaaaatttgatttcactttaatattgaaggaaaaggatatttgttatattaaaggtaatgcgaaagggtctttagcagttaaatataatcctgaaagttataatattttgatgagagatgataaagtttttgaaaagtaccaactatcctctataaaacagttaatgatgacgaatgaaaaatttgaatttttaagcaatagttctaaattaaaatttttaaacttggtgaattttaaagtaaaagaactaactgatgaagagattgaggaattgtatgattttgaaaatgcagataatagaaaaagaatagaaattttaattaatgagtatgaaattaacattagtgaatatatttttagaacaagtgagcagaaaagaatgattaaggtccaaaaaaatggtgttattggagtagaccaaaatataatagataatgatattgattcaataaaaaaagtaatggatttattaaattatggaaatggaataaagatatga

SEQ ID NO: 414753 - DNA, 1179 bp, Staphylococcus aureus; identical to SEQ ID NO: 405482

SEQ ID NO: 414754 - DNA, 558 bp, Staphylococcus aureus
atgaacatccaattaaaagggggagccttaaaatccagagagatgatactttacatcaatcgtaacactagaacaacgaaaggatattttatagtaggggagataactaaagataaaaagggatatacacatgataaagataaaaaatatcctgtcaagatggaacataatcaaattatcccaacaaaacctataaaagatgagaagttaaaaaaagaaattgaaaacttcaagttttttgtacaatatggcaactttaaagatttcaaagattataaaaatggggatatttcatacaatccaaacgtaccaagttattcggcaaaatatcaattaagtaatgatgattataatatccaacaattaagaaaaagatatgatataccgactaaaaaagcaccagaactattgttgaaaggtgatggcgatttaaaaggttcatccataggctctaaagacttagaatttacctttgtacaaaataaaagagagaatatctattttacagattcggttgaatttactccaagcgaggatacaagttatgagtcaaactaa

SEQ ID NO: 414755 - DNA, 750 bp, Staphylococcus aureus; identical to SEQ ID NO: 409891

SEQ ID NO: 414756 - DNA, 342 bp, Staphylococcus aureus
ttgaattattacacgaatatatctagagattataatgtttcggaagaaatatttgatgatttatggatgaatctgtattacttgtttaagaatttaaggaatttatttaaaacagaaggacatgaaccatggacatcatgcgaatttgactttacaagagatggtaaattaaacgtatcttttgattatattgattggattaaattaagtttaggtccgttagctagagaaaattactatatgtataaaaaatttggggttataccagaaatggaatatgaaatggaagaaattaaagaaatcgagcaatatattaaagagcaagatgaagctgaactatag

SEQ ID NO: 414757 - DNA, 327 bp, Staphylococcus aureus
atggttgaccaagaacttcagcagttgaaaaatatgttcaatcttatggatgagaaatttgaagcaaattggaaagacgcacaagaagctagtgatattgtaggtaaacatctttcatacccagaaaaggtaagtgcattagataacggtggtgtcaatgaaagtaaacttgctaccgaaccacataatgaaataaaagacaaactaaataaaattacggacttatctaagaaatataattcgtatttacagcaaatcgaaaaaagtattaatgaaatagttgctaaggatcaacaattggcagggcaaataggtgatttaatatga

SEQ ID NO: 414758 - DNA, 1206 bp, Staphylococcus aureus
atggtaacaagaagtgtgttgaaatttggcggatcatccgtcagtgattttacaaaaataaaaaggatcgctgaaatgttaaaggagcgagtcaatcaagatgaacaattaattgtcgttgtaagtgctatgggtaacacaacagatcaattaatgacgaatgtatcgaccttgactaaagcaccaaaacaacaagaactggcattattattgacaaccggagagcaacaaactgtatcttatttatcaatggtattaaatgatatcggtgtgaatgccaaagcaatgactggctatcaagcgggtattaaaaccattggccatcatttaaaaagtaaaattgctcaaattaatcctcaaacatttgaacaagcctttcaagaaaacgatattttagtagttgctggatttcaaggcatcaatgaacatcaggaattaacaactttaggcagaggcggttctgatacgaccgctgtggcacttgctgttagtaatcaaataccttgtgaaatttataccgacgttgatggtgtgtatgccactgacccaagacttttaccaaaggctaaacgactagacatcgtctcatatgaagaaatgatggaaatgagcgctttaggtgctggtgtacttgaaacaagaagtgttgaattagctaaaaactataatatccctttatatttaggaaaaactttatcgaacgtgaaaggaacatggattatgtcaaatgaagaaatattagagaaaaaagcagttactggtgtggctttggataaacatatgatgcatgtaacaattagttatcccctacctgacaatcagctacttacccaactatttacggaacttgaagaaggtgttgtaaatgttgatatgatttcacaaatcgtcaacttggatgggctacaactatccttcacgattaaagatagtgattttcatcaaatttctatgattcttgaaacattaaagaatcaatatgaagcattagcttataaaatcaatgagcattatgtcaaaatttcattaattggctcaggcatgcgtgatatgtcaggtgtggcatcaaaagcatttttgacattaattgaaaataatatacctttctaccaaacaacaacatctgaaataagtatttcatacgtcattgatgattttaatgggcaacaagcggtagaaaaactatatgacgcatttaacatttaa

SEQ ID NO: 414759 - DNA, 174 bp, Staphylococcus aureus; identical to SEQ ID NO: 411181

SEQ ID NO: 414760 - DNA, 177 bp, Staphylococcus aureus
gtgctttgtgaatctagacaaatttataaaaatcctaaatatcgagttattagatataataatgaatatttcatggtcgatttagtaagtacttggattacttattttttccctatgattaattggttttgcccaaaaaatacgcaaaaattagcgaaaatgaattttaaaggttaa

SEQ ID NO: 414761 - DNA, 303 bp, Staphylococcus aureus
gtgatttcgaaatataccattgattttaatctcccgtatagtgtatctgcacaagtagataataaaaatgataaaagtattaaagttaatagaaaaaaagataggatttctatagctttaaaagatcttgtaaataataagaattatttaaatggtgatattataccgttgaattttaaagtgattaagtcagaaaatgaggtaaatgcagatatagaattacaatgtaatcctaatgttaatttaatgaaaaaaatttgggtttcatttaactcgaataaagctaaatttgaaaaggagtaa

SEQ ID NO: 414762 - DNA, 306 bp, Staphylococcus aureus
atgaaaaagaatagtaaattttatattgataaagtgattgaattttttataattttgatcgcggcaaattttgcaaattatttctctatattaaagttctttaaaattacaataccttttgatcagtatttttcagttgatttagcaattaatatcattttgatacagatattttataaattcttatcttcattactccatagaacacatattaaagttaatttttataaaaatgagtcttctttatctgatgaagtaataaagtataaatttaatagtgatgttacaactatttttttaatgtaa

SEQ ID NO: 414763 - DNA, 1392 bp, Staphylococcus aureus
atgaaagtagcaatttacactagagtttcaagcgctgaacaggcaaatgaagggtattctatacacgaacaaaaaagaaagttaatttcattttgtgaagttaacgactggaatcgatacgaagtattttcagacccgggcgtttctggaggttcaatgaaaaggccatcattacaaaagttgtttgatagattagaagaattcgatttagtactagtatacaaattggatagattaacacgtaatgttagagatttactggaaatgttagaagttttcgaaaaaaacaatatagcttttaaaagcgcaactgaggtatttgacacaaattccgctataggcaagttatttataacaatggttggtgcaatggcagagtgggagcgtgagacaatacgagagcgttctttaatgggtagtcacgctgcgattagaagtggtaaatatattagggctcggccattttgttacgatttaatagacgataaattaaaacctaatcaacacgctaaatatattcgtttcatggtagataagttaatgattggtaaaagtgcgagtgaagttgttaggcagttagaaagcaagaagaagccacctggtataacgaaatggaatagaaaaatgattcttaattggataaaaaatccagttatgcgtggccatactaaatttggagacttattaatagagaacactcacgaaccaattataagcgaagatgaatatttaaaactgattgatattatcgaaaaacgtacttataaaactaaatcgaaacacaaagctatatttagaggtgttttggaatgtccgcgatgccaaagcaaattacacctatctagatctataaagaaatacgataacggtaaaactcgtgaagttagacgttattcatgtgacaaatgtcatagggacaacacagttaaaaatatatcatttaacgaaagtgaaatagaaagacagtttataaacaccttactcaaaaaaggaacggataattttaaaataagtgtacctaaaaagaaaagctacgatattgaagataacaaggtaaagataaatgaacaaagagcaaattatacacggtcttggtcattaggatatatcaaagacgaagaatattttatgttaatggacgaaacagaaaacttattaaaagatattgaagaaaaagcgaaatcacataccgatgaaaaattaaatgaagaacaaataagaacagttaaaaacttattgattaaaggttttaaaatagcaacacttgaagataaagaggatttaattacaagtagtgttgatgtaattaaattcgaatttatacctaaagagtttaacaaaaataagactctcaacacagttaaaatcaatgagatacagtttaaattttga

SEQ ID NO: 414764 - DNA, 405 bp, Staphylococcus aureus; identical to SEQ ID NO: 408138

SEQ ID NO: 414765 - DNA, 261 bp, Staphylococcus aureus
ttgtatgtagtatatcgagcttcacatgaaacagctaaagaagctttgggcgataaagagttaagagccattgcacatgagttaactaaaacagttaaggataacatgagtgttgattggtctaaacgagacagtgctaaagctaaaatgagagttcaagttagacgcctattaaagaaatatggctatccaccagatcttcaaaaaatggctgtggaacaagttgtagagcaagcagaattaatggcaagtcagcaataa

SEQ ID NO: 414766 - DNA, 1524 bp, Staphylococcus aureus
atgatgttaaaagtgattctatatgcctacacacaatctgtattctcaggtcgtaaaatagaaaaaatgcttaatgatagcatccgaatgatgtggctatcacaaaatcaaaaaccttcttataaaacaattaatcaatttagagtaaatccaaaagtagatgctttattagaatctttatttattcaattttacagtcagtgtgtaaaacaaaatcttatagatgataaagctatttttattgatggtacaaaaattgaagcaaatgccaatcgatatacatttgtatggaaaaagagtattcaaaaccatgaatcaaagatgaatgaggattctaaagccctctaccatgaattggtaaccaataaaatcataccggaaattaaagaagatcatgataatgaattaacaaaagaagaaatagatttgattggtagtcacttagataaagaaatcgaagatttaaaccaacatatcaacaatgaaaaatgtactaaaacaagaaaacaaatacgtctcaaaagaactaaaatcaaaaaatacaaaaagcaaatcaatgattattttgagcgaaagtatcgatacgaatttcaaaaatctattttaaaggatagaaatagttattctaagacagattatgatgcgacatttatgagaatgaaagaagatcacatgaaaaatggacaacttaagccagggtataatttacaaatagcaacaaattcccaatttgttttatcttataatgtgtatcaaaatccaacggatactagaacgatgattccatttttaaattcaattcaagagacctacggtcatttacctgaatatattgtagctgatgcaggttatggtagtgaatcaaattataaggcaattatagatgactttaatcgaacgccactcataacatatggaatgtttataaaagataaaactaaaaaatataaaagtgacatctttaatactcaaaattggaactatgacgaaattaatgacgaattcatttgtccgaataataaacggctaggttttaaaagatatgcctatcgtcatgataagtatggttataagcgagacttcaaattatatgaatgtgatgattgttcagaatgtcctctgaaaaatcaatgtatgaacttcaattcaaaaacaaacaaaaaaataatgaagaattataactgggaatattttaaatcccaaattaacaaaaagctttcagaaccagaaacaaaaaatatctacagtcaaagaaaaattgatgtggaacctgtttttggatttatgaaggctattttgggtttcactcggatgtctgtccgaggactcaataaagtcaaaagagaacttggttttgtattaatggcacttaatataagaaaagtagtagctcaacgagctgaaaataatcaaaaaatttataaaaaagacaatttctatattatttcaatagaaattgtcttttttcacttatccaagaactttatgtcccggactcattatgatttatttttttattgctga

SEQ ID NO: 414767 - DNA, 351 bp, Staphylococcus aureus
atgaaaaccatcactcaagaactcaaacaatatataacccacctattccaactatctaataacgaagcttgggaatgtgaagcgctggaggaagcagcagaaaatattctaccggaacgttttattaatgattctccactggtacatctcacactcgagacttatacctactataatgatgaactacatgagctaagtatctatccatttctaatgtatgccaataaccaactcatcagtgtcggatacttagaccattttgacatggactttctgtaccttacagatactcaaaatatcattattgatgaacgtcatttactaaaacaaggaggtcaggaccatgaataa

SEQ ID NO: 414768 - DNA, 1155 bp, Staphylococcus aureus
atgttaaagcataaaataataaatttaatacaagaaaagagagaagggagttactgggattttaaagcagaatatcataaagataaagcagaattattacatgatataatttgtttatcaaataacttgttgaatcaagaagcttatttaattttaggagtcgcagataacggtcatattctgggggttgcaggtgattcaaatcgaaaaaaccaagaagaattaatatcatttattactggaaaaaaatttgctgcgggtaggcaccccaagatttcattaatgacatttgaatatgaagaaaaggaaatcgatgtcattataataaatcctaaaggatatgtaccatactatctggagaaagcagaaaccgatcaaaaaagtaaaaaaaacaaaacagtcaatgcaggtagcatttatacaagagttgaagataaaaataccccaatagattctactgcaagtccattagatacagaaatattatggaaaatgcattttggtttatatcctactcctataaagaggttacagaattatttactaactcctgagaaatggatgcagaactcaacaggttattttcatagtgaatcgccagagtatatagtatacaaaaatgaggacattgaagaaaaagaaaattattttaatttagtaagtccattttatgcgtataatcaaatcaatagtaacactttatactcatattacgaatttaaatatcatagtacagttttatatggttgccggtgtatctctttagattcaggtatctacacaacaccagtacctgaactaggtgagataaattttaatatgcatagagatgatactatttattatcgttatttcattgaagagacgatgctttataatattcatctttttatgtataagggtgattcgatggaagagaaatttgcaatggataaatttttagaatgtgttttggtttataaaagtgatgtagaaaaggaactttttgaaaattatatattagataattgggataaagttaatcagtcaattaatgaaaataataaacgtgtatttggaactgaacatttgtcacaacttgaaaaagaagatatcactaaaaaagtaaaaacagttaaagttttaaaagatgaacttgagaactttagaacttga

SEQ ID NO: 414769 - DNA, 717 bp, Staphylococcus aureus
gtgagaagtggtgatgaaccacttgaggatagaacaactaataatacggggtttgttttagtttattttatgaatagttctgtgaaatatattataaataagaatacagactctcaatattttttgagacgttttttgaaatacacaggacaaaacgaaataactaagattaatttaaacttcaacgatgacttgcttttatggattgtttataaaatttataaggaaataagcgattttattataactactaatacacaaagcgaagagcaccttacttttgataatattaaaggatttaagggtgatactccagataataataaggtttcttctcatggtaatacagtgctaaatttaataagtactctatcgtttgtactcgaaaaaggtaagttaggtcagataattctttgcttgtcttatacgaatcatgaaaatatagagttaaggttaagcggtagtgatttagtaggtatagattttaaaagatacgatggaatttatgaacatgaagaatgtgaagaattattcaaagctaagttgttattattagtatatttaaaaatcataccaaatataaattctttttatcaaagtgatttaaatgaaaagaagtggactgatgaagtgaaaattaattttttagaagacattaaaaatgaaataattaatagaatagacttgaagaaagagactattagtgaaaataattaa

SEQ ID NO: 414770 - DNA, 552 bp, Staphylococcus aureus
gtgatttatcaggataccactcaaacgtatacaggctacatcgtggaaacggaagcttacttaggtttgaatgatcgtgcggctcatggctatggcggtaaaataacacctaaagtcacgtcattatataaacgtggtggtacaatttatgcacatgtcatgcatacgcatttactcattaattttgtaacaaaatctgaaggtatacctgaaggcgtacttatacgcgcaattgaaccagaagaaggtttatccgctatgttccgtaacagaggtaagaaaggctacgaggtaacgaatggcccaggaaaatggactaaggcatttaacattccacgggctatcgatggcgctacgttaaatgactgtagattgtctattgatactaagaatcgtaaatatcctaaagatattattgctagtccacgaatcggtattccaaataaaggtgattggacacataaatctttacgttacacagtgaaaggtaatccatttgtgtctcgcatgcgtaaatcagattgtatgtttcccgaagatacttggaaataa

SEQ ID NO: 414771 - DNA, 1065 bp, Staphylococcus aureus; identical to SEQ ID NO: 409284

SEQ ID NO: 414772 - DNA, 1110 bp, Staphylococcus aureus; identical to SEQ ID NO: 409287

SEQ ID NO: 414773 - DNA, 591 bp, Staphylococcus aureus; identical to SEQ ID NO: 411706

SEQ ID NO: 414774 - DNA, 258 bp, Staphylococcus aureus
atggaaataattttgtttctaacaatgatggttatgattacgtatgtttttagtggatatctatatcgcgtagcattggtgcaatcgtcaagagtagatttaatatttactagatttgaaaatatgtgttttaaaattatcggcacagatttagaacacatgtcagctaaaacatatgtcaaacattttctggcatttaatggatttatggggtttataacatttgtattgctaatagttcagcaatggcttttttaa

SEQ ID NO: 414775 - DNA, 903 bp, Staphylococcus aureus; identical to SEQ ID NO: 409250

SEQ ID NO: 414776 - DNA, 1509 bp, Staphylococcus aureus; identical to SEQ ID NO: 409239

SEQ ID NO: 414777 - DNA, 987 bp, Staphylococcus aureus
atgaaattcattagtaataataatattacagatccaactttaaacttagcaatggaagaatatgttttaaaaaatttaccagcagaagaaagttactttttattttacataaatagaccatctatcattgttggaaagaatcaaaatacgatagaggaagtaaatcagacatatatagatgctcataacatcgatgtagttagaagaatttctggtggtggcgctgtttatcatgatactggcaatttaaactttagttttataacagatgatgatggtaacagtttccacaatttccaaaaattcactgaaccaattgttcaagcattacaatctttaggcgtaaatgctgaattaactggtcgtaacgatattcaagttggacaagcgaaaatctcagggaatgctatggttaaagttaaaaatagaatgtttagtcatggtacgttgatgttaaatagtgatttagacgaagttcagaatgcactaaaagttaatccagctaagattaaatcaaaaggtattaaatctgttcgtaaacgagtagcaaacattcaagaatttttaaatgaccctttagaaattgaagaatttaaaaaaatcatcttgaaaactatctttggagaaactgaagtagaagaatataaattaacggatgaagattgggaaaatattgaaaagttaagtaacgacaaatatagaacttgggcatggaattatggtagaaaccctaaatataactttgaacgcgaggaaaaatttgaaaaaggatttgtacaaattaagtttgatgttaaacgaggtaaaatcgaacatgcaaaaattttcggtgatttctttggtgtcggagatgtcactgatcttgaaaatgcattagttggctgtctacacgactttgagcacatagaagaagcactatcagaatatgatttatatcattatttcggtgacatagatagacatgaattaattagattaatgtcataa

SEQ ID NO: 414778 - DNA, 378 bp, Staphylococcus aureus; identical to SEQ ID NO: 408858

SEQ ID NO: 414779 - DNA, 753 bp, Staphylococcus aureus
atgaattatttatcaaacttttttaatacgacaattcaacttaatatatacattatcgttattgttgcagcttgttatattgctattcatcaatatagacataagcctgttttgaactatttagatgtcattttaaactatatccctgttttaacacatgaatttggtcatgtactgtttaataaactcgctggtggccgtgcaaaagatttagtcattgtaacaagtccacgagagcgacaacagacattacaacaaggattcgcaattacacaatctagacatctagcaggccaatggcttacaacgattggtggttatttaatgccacctattatgttattgataggtttagcgtcgagccattatcagatacctagtttctttatatttacctatttattgatatttatttattttttaattttaacatctagaaaaggctcacccattgttgttataactttaatttctatcatgttgtattttatattaaaagatgaaaatatagtagaaattcaactacttgtcacaatgagttatcaatatattttaggtgtattattaggcgaagttctacaatctagttggacgattgctaaattgactttccagcgtccgagtccacagtgggatggtagtgcacttaaagaactcagtcatgtacctatcttcatttatagtacaatctggattatcttcaatctttatgcagtgaatattttactcaaatatactcacttgataaattaa

SEQ ID NO: 414780 - DNA, 174 bp, Staphylococcus aureus; identical to SEQ ID NO: 407440

SEQ ID NO: 414781 - DNA, 1320 bp, Staphylococcus aureus; identical to SEQ ID NO: 408215

SEQ ID NO: 414782 - DNA, 960 bp, Staphylococcus aureus; identical to SEQ ID NO: 409297

SEQ ID NO: 414783 - DNA, 405 bp, Staphylococcus aureus; identical to SEQ ID NO: 414404

SEQ ID NO: 414784 - DNA, 645 bp, Staphylococcus aureus
atgtatccaattaaaaatctagaggatttatacgataaagaaggctatcgtgatgacgaatttgataaaaatgataaaggaacgtggactattagttctgaaatggcaattcagaaaaagggagaagccttaaatataaaaggtatggttttgaagttaaatagaaatacaaggagtgcaaaaggattttactatgttaatgcgataaagaaggatgaaaatggcagacctcaggataagcaaatagaatatcccgttaaaatgattgacaataaaatcattccaactaaagatatcaaagatgaaaaaataaaaaaagaaatcgaaaactttaagtttttcgcgcagtatggcaattttaaagatttgacgaagtataaaggtggagatatttcatataatccagaagccccgatttattcagcaaaatatcaactaaccaatgatgattataatgtaaagcaattacgtaaaagatatgatataccgacgaataaagctccaaagttattgttaaaaggttcaggaaatttagatggttcatcaattggatacaaaaaaattgaatttactttcgtagagaaaaaaggagaaaacacttactttacagctaacctacattttaaaccgagtaatgatgaataa

SEQ ID NO: 414785 - DNA, 243 bp, Staphylococcus aureus
atgacatataacgcgcgcaaagaacacttaaaccaatttttcggatctaagagatatctgtatcaggataacgaacgagtggcacatatccatgtagtgaatggcacttattactttcacgggcatatcgtgccaggttggcaaagcgttaaaaagacatttgatactgctgaagagctcgaaatatatataaagcaacatggtttggaatacgaggaacagaagcaactaactttattttag

SEQ ID NO: 414786 - DNA, 507 bp, Staphylococcus aureus
atgctttttttaactgaatacggcttatcacatgaagctgatacagatacagaggatacaatggacggttcttataacactggtggttctgttgagtcaacaatgtctggtactgctaaaatgttttatggtgacgattttgcagatgaaattgaagatgcagttgtagatcgcgtattgtatgaggcttgggaagttgaaagtagaataccaggcaaaaatggagatgccactaaatttaaagcgaaatatttccaaggtttccacaataaatttgaattaaaagcagaagctaacggtattgatgaatatgaatatgaatatggagtgaatggtcgtttccaacgtggatttgcaacactacctgaggctgtaacaaagaaacttaaggcgactggatacagattccatgacactacaaaagcagatgcgttaactggcgaagatttaacagcaattccacaacctaaggtagattcatcatcggttacaccaggagaggtataa

SEQ ID NO: 414787 - DNA, 261 bp, Staphylococcus aureus
atgtattacaaaacgggtgacgtatgtcgaaaaatatttaatgtagatggctttgattttcaattaagagttaagaagcgagcatatagtgtcgaaatagtcgttttagatcatgaaggaaattcaattgacgggctactagtttctgacgagaacgatctatacacagctttagatattttgaaacaaagtatttatgaatggattgaaaataacacagatgaacaggatagactaattaacttagtcatgaaatggtag

SEQ ID NO: 414788 - DNA, 303 bp, Staphylococcus aureus
atgacattaacagaatataactatcgaatgtatgcgaaagagtatgaaatgctaacccaagaattcgaacgttacaaacttgcgtttgctattcgtgatgctgcagctactaaaaatgttgggacagaaaataaacctaaagaggaatatgtttttaacaatgcaaacgacgtattgccttatgaagaaaatatccaacggcttaacgaaggtaaagatataagatttagtagcgaacgtgatgaatacgaaccacaaaataatgaattctttaaagttatagcagaatttaataagcaatag

SEQ ID NO: 414789 - DNA, 2790 bp, Staphylococcus aureus
atggcataccaaagtgaatacgcattagaaaatgaaatgatgaatcaacttgaacaattgggttacgaaagagtaacgatacgtgataataagcaattgcttgataattttagaacgattttaaatgagcgtcatgcggacaaattagaaggcaatcccttaacagataaagaatttcaacgtctgttaacgatgattgatgggaaaagtattttcgagagtgcccgtattttacgtgataaattaccacttagacgtgatgatgagtctgagatttatttgtcgtttttagatacgaaaagttggtgtaaaaataagtttcaagtgacgaatcaagtatctgtcgaggatacatataaagcacgttatgatgtaacgatattaatcaatggactaccccttgtccaagttgaattgaaacgtcgaggcattgatattaatgaggcgtttaaccaagtaaaacgttaccgtaaacaaaattacacaggcttattccgctacatacaaatgtttatcattagtaatggtgttgaaacgcgatacttttctaataatgatagcgaactattgaagagtcacatgttttattggagtgataaacagaataaccgaatcaatacattacaatcgtttgctgagtcatttatgagaccttgtcaattagctaagatgatatcgcgctatatgattattaatgaaacagatagaatactgatggcaatgcgcccgtatcaagtgtatgcggtagaagcactaattcaacaagcgactgagacagggaataatggatatatttggcatacaactggaagtggtaagacgttgacttcttttaaagcgagtcagattttatcacagcaagatgacattaagaaagttatctttttggttgaccgcaaagacttggatagtcaaacagaagaggaatttaataaatttgctaagggtgctgtagacaaaacttttaatacctcgcaactggtacgccaactaaatgataaaagtttgccacttattgtaacgacgattcaaaaaatggctaaagcgattcaaggtaatgcccatttattagaacagtataaaacgaataaagttgtatttattattgatgagtgtcatcgcagtcaatttggtgacatgcatcgtctagttaaacaacatttcaaaaatgcccaatactttgggttcactggtacgccacgttttccagaaaatagtagtcaagatggtagaacaactgcagatattttcggtagatgcttacatacgtatttaattagagatgccattcatgatggtaatgtacttggtttctcagttgactatattaatacttttaaaaataaagctttaaaagcagaagataacagcatggttgaagcaattgatacggaagaagtatggttagcggataaacgtgtggaattagtaacacgacatatcatcaataatcatgataaatatacacgtaatcgtcaatattcaagtatatttacagtccaaagtattcacgcgcttattaaatattatgagacatttaagcgacttaacaaaaagttggaacaaccattaacggtagctggtatatttacgtttaaacctaatgaagatgatcgtgatggtgaagtgccatatcattcacgtgaaaaattagagataatgattagcgattataataaaaagttcgagacgaatttttcaacagacacaactaatgagtattttaatcatatttcaaaaaacgttaaaaagggcgttaaagatagtaaaattgatatcttaatcgttgttaatatgttcttaactggttttgatagtaaagtactgaacactttatatgttgataagaatttaatgtatcatgatttaattcaagcgtattcacgtacaaatagggttgaaaaagaatcaaaggcatttggtaaaattgtaaactatcgtgacttgaaaaaagagacagacgatgcactgagagtattctcacaaacaaatgatacggatacaattttaatgcgtagttatgaagagtataaaaaagaatttatggacgcttatcgtgagcttaaaatgattgtgccgacaccacacatggttgatgacattcaagatgaagaagagctaaagcgctttgttgaagcttatcgtttattagctaaaataatattacgtttaaaagcatttgacgagtttgagtttacaattgatgaaattggaatggatgaacaagagaatgaagactataaaagtaaatatttagctgtgtacgatcaagtaaaaagagcgacggctgagaaaaataaagtatccattttaaatgatattgatttcgaaatagaaatgatgcgtaatgatacgattaatgtgaattatattatgaatatattgagacaaattgatcttgaagacaaagcggaacaacgtcgtaaccaagaacaaattagacgcattttagatcatgcagatgatccgacattgaggttaaaacgagatctaattagagaattcatcgacaatgttgtaccttctttaaataaggatgatgatatcgatcaagaatatgttaatttcgaaagtattaaaaaagaagcggagttcaaaggatttgctggagagagatctatcgatgaacaagccctaaaaacaatttcaaatgactatcagaatagtggtgttgtaaacccacatcaccttaaaaaaatgattggtgatttgccattaaaagaaaaacgtaaagcaagaaaagccattgaatctttcgtggcagaaacaactgaaaaatacggtgtgtaa

SEQ ID NO: 414790 - DNA, 795 bp, Staphylococcus aureus
atgcagaataatgatatcaaaaaaatatttactatacatacgaatcatttcatgtccccttactcctatggcgctgagattaaaccagagttcagaaacatgttactaaaccttaaaaagttagatactttagttgtattaactaaagaacaaaaagatgacattataaaacaatttggtgattacaataatataaaggttattcctaatgctatatcttttgaagaaaatttaacacaaaatattcgagaaaaaaattctattattgtattacaaagatttgtagctatgaaaaatatcacacatatcatttccgctataaatattgtaagaaaaaaagtaaaggatgttaagttacacatatacggtaccggtacgcaaaaagaaaattacacaaaacttattaaaaaacttaaattgcaagataatgtgttcatccatgattacgcatttgacatacgtgctctttatacaaaaacctctctaagtgtactgacatcagattatgaaggtctcccaatgagtttactagaggccatgagttacggtgttccagttatttcatatcctattaattatggtcctaaatctataatccaaaataatataaatggaataataacaaaaaagaaggataatattaatgaattggcaaaaaaaataattcatgtattaaaaaaagaaacattgatatctcagttttctgaaaatgctagaacaacaataaagacaaacttttcttacgaagcagtatccaaaaaatggattgaattaatcgatgaaaaaagccaatag

SEQ ID NO: 414791 - DNA, 186 bp, Staphylococcus aureus
gtggctaaaatttcaatggttgctaagcaacaaaaaaaacaaaaatatgcagttcgtgaatacactcgttgtgaacgttgtggccgtccacattctgtatatcgtaaatttaaattatgccgtatttgtttccgtgaattagcttacaaaggccaaatccctggcgttcgtaaagctagctggtaa

SEQ ID NO: 414792 - DNA, 1347 bp, Staphylococcus aureus
gtgaaaaactatttccagttcgataaatatggaacaaactttaaaagagaaatcttaggcggtatcacaactttcttatctatggcctatattttagcagttaacccgcaagttttaagtttagcaggtgttaaaggcgtatcagaagatatgaaaatggaccaaggtgccatttttgtagcgactgcattagcagcatttgtaggctcgctattcatgggactaatagctaaatatccaattgcgttagcaccaggtatgggattaaatgcattctttgcatttactgttgtgttaaccatgggtattccttggcaagttggtttaacaggcgttttattctcaggtatattctttgcgatattaaccgtcacagggtttagggaagttattattaatgcaattccttatcaaatgaagatggctgtttcagcaggtataggattattcattacatttgtaggtttacaaagttcgggtattatagttaaaaatgaatctacattagtaacattgggacatttaactgatccaccagtacttttagcgatattcggtatcgttattacagttattttatatgcaattaaattgccgggttctatctttatcggtatgatcatcacagcaatcgttggtatgttcactggattgattcaaatgccatctggtattgtaggtaagattccaagtattgaaccaacgttcggtgctgcatttgaagcgtttaaagacccaagtcaattattaacgatacagttcttaattgttattttaacgttcttatttattgatttctttgatacagctggtacattagtagccgttgctactcaagcaggtattatgaaagataataaattaccaagagctggtagagcattgttctcagattctttagctacgattgtaggatcagtttttggaacaactacaacaacttcttatatcgaatcaacttcaggtgttgctgtaggtgctagaacaggatttgctagtatcgtaacaggttgttgtttcctattagcgctgttctttagtccgttaatcgctgttgtaacaagtgcagttacgacaccagctttagtggtggtaggtgtattaatggctgcaaactttgctgagataaactggaaaagttttgaagttgcagtgccagcattcattacaatcattatgatgcctttatcatactcaattgcaactggtattgcgtgtggatttattttctatccaattacaatgcttatctctaaaaaacataaagaagtacatccgataatgtatataaatatacttcttttaaaattgttggacgtgtttcttctatattatatacctaattaa

SEQ ID NO: 414793 - DNA, 555 bp, Staphylococcus aureus
atgaaagcacaattaaaaaatgaaactaaagtgattacaggaaaagtaagagcatcatatgcacatatttttgaaccgcacagtatggatgaaagcacaccaaaaaaatattcggtttcacttattattcctaaagaagacacccaaatggtcgagattatcgaaaaagcaattgagaatgcaaaagaagcatttaaaggtaaatggaacggcaagatacctaataacttgaaaacgccattacgtgatggagacattgatcgtgaagatgatccgaattatgaaaatgcgtattttattaatgctacaagtcaaaatgcaccaggtgtagttagtcctgccatggttcgtttgaacgaacctggttcagttgttagcggagactatatcagagctgtaatcaatttctatggttataacgtaaatggaaataaaggaattgcagcagggctcaacaacattcaacttgtagaaaaaggcgaacctcttggcggtgcaagtgcagcagaagatgatttcgatgaattagacactgatgatgaggatttcttataa

SEQ ID NO: 414794 - DNA, 579 bp, Staphylococcus aureus
ttgaaagaatttttatattacaagaaaaaaggtaagtttccaaaacgaagtgtatggattaactttgatgatatggatgaaactatttatgaaaatgcttatccaatcttaaaaaaatataaaataccggcaactgggtttattatcacaggtcatgttggggaagaaaactttcacaacctcgatatgattagtaaaaaagaactaaaagaaatgtataaaactgggttatgggaatttgaaacacatacccacgatttgcataacttatctaaaaataataagtcaaaattaatgaaatcttctgaagctacaatcataaaagatttaaacaaaagtgaaaaatatctaactaaaaactttaaaaagtcgcagaaaactatagcctatccttatggcttgatgaatgacgataaattaccagtaatcaaaaaagctgggttaaaatacggtttttcattagaggaaaaagcagtcactccgaactccaatgattattacatccctagaatactaattagtgatgatgcttttgagcatttaattaagagatgggacggattccatgaaaaagattag

SEQ ID NO: 414795 - DNA, 1206 bp, Staphylococcus aureus
gtgtataagagacaggaattaggacatataccgaaagctgacgtacaaaaaattcgtcaaaacgcaaaggtaaatgtcgaacgtgcacaagaaattgaacaagaaacgcgccatgatgttgtagcctttactagacaagtttctgaaacgctaggtgaagaacgtaagtgggtacattatggtttaacttctactgatgttgtagatacagctttaagtttcgttattaaacaagcaaatgacattattgaaaaagatttagaaagatttatcgacgttttagctgaaaaagcaaaaaattataaatatacattgatgatgggacgtacacatggagtgcatgcagaaccaactacatttggtgtcaaaatggcattgtggtacacggaaatgcaacgtaacttacaacgtttcaaacaagtaagagaagaaattgaagtagggaaaatgagtggtgcagtaggtacttttgctaacattcctcctgaaatagaaagttatgtgtgtaaacatttaggtattggcacagcgcctgtatcaacgcaaacattgcaacgcgatcgacatgcatactacattgcgacattagcattaatcgcgacgtcactagaaaaatttgccgttgaaattcgtaaccttcaaaaaaccgaaacaagagaagttgaagaagcatttgcaaaaggccaaaaaggttcatctgcaatgcctcataaacgaaatccaattggctctgaaaatatcacaggtatttcaagagtcattcgtggttatattactacagcttatgagaatgtgccattatggcatgaaagagatatttctcattcttcagctgagcgtattatgttaccagatgttacaatagcactagattatgcattgaatcgtttcacgaatattgtggaccgtttaactgtatttgaagataatatgcgtaataacatagataaaacatttggtctgattttctcacaacgtgtcttattagcattaattaataaaggtatggttcgtgaagaagcatacgacaaagtacaaccaaaagcgatgatatcttgggaaacgaaaacacctttccgtgaattaatcgaacaagatgagtctattacaagtgttttaacaaaagaagaattggatgaatgtttcgatcctaaacatcatttgaatcaagttgacactattttcaaacgcgctggattagcataa

SEQ ID NO: 414796 - DNA, 147 bp, Staphylococcus aureus; identical to SEQ ID NO: 409763

SEQ ID NO: 414797 - DNA, 1551 bp, Staphylococcus aureus
atggcgcaaaatcctcgtgtaacacgtgatgacgtgaacgttgcagaccttgttatttctaatgccgttattatcgattacgataaagtggttaaagccgatataggtattaaaaatggttatattttcgccattggaaatgccggcaacccggatataatggataatgtcgacattattataggatcaacaacagatatcattgccgctgaaggtaaaatcgtcactgctggtggtattgatactcatgttcattttattaatcctgaacaagcagaggtcgcattagaaagtggtattacgactcatattggtggtggtactggtgcttcagaaggttctaaagcaacaactgtaactccaggtccatggcatattcatagaatgttagaagctgccgaaggtttaccgattaatgtcggttttacaggtaaaggacaagcaacaaatccaactgcactcattgaacaaatcaatgccggagcaattggattaaaagtacatgaagactggggtgcaacaccatctgctttgagtcatgcattagatgttgctgatgaatttgatattcaaattgcattacatgcagatactttaaatgaagcaggatttatggaagacacaatggctgctgttaaagaccgtgtacttcatatgtaccatactgaaggtgctggtggcggtcatgcgcctgatttaattaaatccgctgcattttcaaatattttaccttcatctacaaatccaacattgccatatacacataatactgtagatgaacatttagatatggtaatgattactcaccatttaaatgcggctattcctgaagatatcgcattcgcagattcacgtattcgtaaagaaacgattgcagcagaagatgtcctgcaagatatgggtgtattcagtatgattagttccgattcacaggcaatgggccgtgtaggtgaagtaattacacgaacatggcaagtagcacatcgcatgaaagaacaacgtggtcctttagatggtgattttgaacataatgataataatcgcatcaaacgttatatcgctaaatatacaattaacccagcaattacacatggtatttctgaatatgtaggatctatcgagccgggcaaactagctgacattgtcttatgggatcccattttctttggtgttaaacctgaattagttgtaaagggcggattaattaactctgccgtaaatggcgatgcaaatggttctatccctacatctgaaccaatgaagtaccgtaaaatgtatggtcaatacggcggaaaccttacaagtacgtcaatgacattcgtgtctaaaactgcttatgaaaatggtatcaatcgtgcattaaatttaaaacgcatggtgcgtccagttaaaaatattagacaattatctaaagcagatatgaaaaataacagcgcaacacctaaattagacgttgatccacaaacatatgaagtatatgtagatggagaaaaaattacaagtaatgcagcaactgagttaccattaactcaaagatacttcttattctag

SEQ ID NO: 414798 - DNA, 555 bp, Staphylococcus aureus
atgacagatgtaattattgtacattctatgcatggaaatagtagaaatcattggtatcagtggttggagcataacttaactttagaaggatatgacgtaacattatttaattttgaatcccctgaagcgaagacagtggatcagtggattgaagctatgacgaaacaaattaatgtacgcaaaaaggatacatattttgtaacacatggtttaggttcaatcacagctttaaaatatattgaaatgattgatcagccgattgaaggcttttttagtatagcgggctttaaagaagatgcagaaaatatagatttagatattgatttaagtaatgtaaccattgattacgataatattaaaaagaaagttgacaatttttacggattgagttctaaaaatgacaaatacgtttcatataaagaaacccagcgtttaatgaatgcattagaggggaacttgcgaatcgtggaagatggagggcacttcttagaagaggatggcttcgaaacatttacagcgttgcaagatcggatgcaagattacatgacacgatag

SEQ ID NO: 414799 - DNA, 297 bp, Staphylococcus aureus
atgacttacaatcaaaaagatgattttaaagagttgaaaagaagaattttaggaattgtgttcgatttacctgaggggcaaacgtttacatttcatgatctgaacagtcgtgcaaatgtacaatgctcaaaagctgtacaacaaaatgtcggacgttggttcgcgtactttgtaaaacatgcgccacgtattccatttgttattattggtaaaaatactcatggacacttggtttatcttaaaacagggccaaatccatataataacagcaacccttcgaaaggaggtgttcgctaa

SEQ ID NO: 414800 - DNA, 1584 bp, Staphylococcus aureus
gtgtatgattttttagaatatttacatcgttattgtgtaaaatcgattaataattgggaggctgttgcagatatatcatgcaaagttgtacgtgaaaaagttagtaaaggttattatgttaaacaagatagcgttgtaattgatgataatgatataccttcaattattaaaataagtggaaattatgtagcagcagatatattagttactagatatttagatggaatgggtgaatttataaaggtatcagaattagatcagtcgagctattacgaatggtttatgtttgttgaagaaactagaagaatatttagaggtacagaaatagtttatcgatttttaaaatatctatttacgcatacctatgaacataaaaacgaagaacaaaaaatagaaaaatatatgaagaatattatcatagataatcattttagaggggggcatagtaatgatatagttcgtttagatatgaaagatgataatgtgttattttataattttgatatatacgatacaaatattctttatgaaaaaatagacgaggaaaaattacttagaattttagatgaaataagtaatactgacaattacaaagcgctatttaacattgtaagtgagaaccaaaagaaattttggaaatcaaatattaagccaatagtaagtgaatgtttagaagatataaatacgataccatttgatttatatgtttatgtaaataagtatataagtaataaaatatttaactgtgataattatttaattactaaaaatgaggttgtggatttttattttaatcatggtagtgactttaataatttcaagatgggacagaaatggacaaagtctaaatttaagcaggaaaataaacttaaaatacacgaatatattattgcagtaacttatgtgaatttattaaatcattcatatatgaaatatatcaatgctgaaaattactatgaccctagcaaaaaaataacaaaaggaatgaaaaataattatcataaatttacagattcattcagtgattttgtagaaatggtggacgatataacatggagaatccgtgattcatttgattatattggaggattaaaaaacaaagaatttaacgaagatgagaatgaatatatcgaacaattaattcaatttgttatattatctaaattcggctatatgaatgtagaaaatcactttgattatattgagaacttaaatacgcttaataatgaattaacgactatattaaaaagtgagttcgcgcacatttcaaatgatatgtataataatttattcagtaatttgtttgatgttgtaaatacatggaaaaaggattattcaaataacttttataataatactcagaatactataactacagaaaagttagacataatatctcgatttataaaacaatatgataaaccagttgaccgagacaaacatggtaaacgagttaaagcagaagtgtttgaaggtataagtgattttcataggcgtgtaaaagaaggatttgataataatgatgtgctattacaattaagattagaaatgagcgtacatgaaaatgataaatttactagttaa

SEQ ID NO: 414801 - DNA, 378 bp, Staphylococcus aureus
atgaatatgaagaaaaaagaaaaacacgcaattcggaaaaaatcgattggcgtggcttcagtgcttgtaggtacgttaatcggttttggactactcagcagtaaagaagcagatgcaagtgaaaatagtgttacgcaatccgatagcgcaagtaacgaaagcaaaagtaatgattcaagtagcgttagtgctgcacctaaaacagtcgacacaaacgtgagtgatactaaaacaacgtcaaacactaatagtggcgaaacaagtgtggcgcaaaatccggcacaacaggaaacgacacaatcagcatcaacaaatgcaactacggaagaaactccggcaactggtggaagctactactacggcaacgaatcaagctaa

SEQ ID NO: 414802 - DNA, 168 bp, Staphylococcus aureus
atgctagaatctagagagcaattatcagtcgaagaatacgaaacattctttaacagatttgataatcaagaatttgatttcgaacgtgaattgacacaagatccatattcaaaagtatacttatacagtatagaagaccatatcagaacatataagatagagaaataa

SEQ ID NO: 414803 - DNA, 813 bp, Staphylococcus aureus
atgaagtataaaacagagagacgtgaagcgatgggatatttaaaaaggtttacattgtacataagtatttttattttaatagttgttatagcaggttgtggtaaaagtgatgaaacaaaagaagattccaaagaagaacaaattaaaaagagctttgcgaaaacgttagatatgtatccaatcaaaaatctcaaggatttatacgacaaagaaggctatagagatggcgaatttaaaaagggcgataagggtacatggactttactcacaagtttttcaaaaagtaacaaaccaggcgagatagatgatgaaggtatggtgctatatctaaataggaataccaaaaaggcaacaggttattattttgtaaataaaatttatgatgatattagcaaaaatcagaatgagaaaaaataccgtgttgaacttaaaaataataagattgttcttttagataatgtagaagacgaaaaacttaaacaaaaaattgaaaattttaaattttttagtcagtatgccgattttaaagatttaaaaaattatcaagatggaagtataacaactaatgaaaatgtaccgagctatgaagcagaatacaaattgaataatagtgatgaaaatgtaaaaaaacttagagatatttatccaattacaacgaaaaaggctccaatattaaagttacatatagatggtgatataaaaggaagttcagttggatacaaaaaaatagaatataaattttcaaaagttaaagatcaagagacaacattaagagattatttaaattttgggccgtctgatgaagatatctaa

SEQ ID NO: 414804 - DNA, 783 bp, Staphylococcus aureus
atgatgggatatttaaaaaggattggattgtgcataagcctgttgattttaagcatttttgtaacatcttgtgatagtgataataagatcactggagattcaaaagaagcacaaattaaaaagagttttgcaaaaactttagatatgtatccaattaagaatctcgaggatttatacgacaaagaaggatatagagatggtgaatttaaaaagggagacaaagggacgtgggttgttagatctgaaatgataattcaaccaaaaggtaaaagtttaacttcaagaggcatgatattatacatgaatagaaatactaggaccacaactggttatttttcaatagaagaaatagattcaagaaaaaaccttgacgagagagaaacagaaaaaaagtatcctgtgaaaattataaacaataaaattattccaaccgtaaagataaaagatgaaaagttgaaaaaggaaattgaaaactttaagttttttgttcaatatgggagttttaaaggaatagagaattatgaaaatggtcacatttcctacaattctgaaggtcctatttattccgcgagatatcaactgaaaaatgatgattataatgttaaagaattacgaaaaagatatgatataccaacagaaaaggcgcccaaattattgttgaaaggttcgggggatttgaaagggtcttcagttggatataaggaaattgaatttatatttctagaaaataaaaaagaaaatatatatttttcagatggattaaacttaattccaggtgactaa

SEQ ID NO: 414805 - DNA, 1011 bp, Staphylococcus aureus
atgaaactgagtgatagagaatggaaggcgtttacaactgatgagttattcagtattaaatctgggactacgtctgacttttcaaaattgaatttaaaaaacgattcaaagttaccgtgtataggggcaaaatataaaaataatggtgtggtaggtttcgctaataatgaagaactgaaagtagaaggaaacgctttagtttttattaaaactggagaaggttctgttggactaactctttataaagcagaagattttataccgcacaaaaatgtttacataggctataacgtaagcttaaataaatatataggcttgtttattgcaactatgtacaataaacagaaatttatatataactatggctatggtctaaaccaattaagagtaaaaagacgtaaaatattgcttccttctaaaaataatagtcctgattacgaattcatggaacgatacatcaaagaaaaatattttaatctaaaatcacatataaaagagaaacaaaaacacaaaatttctgattggcgagagttagatgaggttgagtggctacccttctcaacttcagaagtttttaatactattcaacgaggaaaaaggttaactaaatctaatcaaataaaaggattaacaccttacatatcctctagtggtattaataacggattagataactttatttcaaatagcgaaaaaattagagtttttgataattgtttaacaatagcaaacagcggaagtgtaggaagtactttttatcatacgtatagattcattgctagtgatcacgttactcacttaaaaaataataatttaaataagtttacttatttatttatagctaatatgctacgtagactagaaggaaagtatagttttaatcgtgaaattaatgattttcgtattaaaagagaacgcatattactccccactaaaaacaatcagcccgactatgaatttatggagcaatacatgaagcgaaaagaaaataagatattagatagattataa

SEQ ID NO: 414806 - DNA, 1905 bp, Staphylococcus aureus
atgaacgaaaaaactggtatagaccaatttatgagaaaagaaatcgaaagtttaggcgtaagttacgatgaacaacaaagcagcaatgttgaaatagcggaagcgctaaaaacagcaagtaaaagtttaagcggaaaagtaggtaaaccagaatttttattttttagcgatgaatttttagtcgttgttgaggataaaaaagatatacataagcatgaaatgaagtctgaacgaggtgaactaatactagattcaccagaaatattgaaagattatgctgtaaatggcgcagtgcattatgcgcggcacattattaaacatacaaatatagttgaaaaggtttttgcggttggcgcatcaggtgatgggcattcgaataaaattagcatacattatgtagatagcaaaagctataaatatatttcagatataaacaacttagaggatttgaaagaagaaaacattgaagaattttatcgtgtttctgtgttaggagagttgcctaaagaagaaagagagttaatagaagttaataaaattgctgccgatttgcacgaggacttaaggaactatggttcgcttgaaggtgaaaagaaagcttctgtagtgtccgcaattttactagctttagaaaatgaagaagtgatttttaatgtggataaactacaaggacttcaaggtgagggtgttaaagatggcgaaatcctctttgatgctattgataaatatttaagaaataaaagtttaatgcctcatgctaaaattggtgaattaaaagataacttcacttttatacagaacgatttgacgttaaatagatcaagagaagacttaaagatgacaccattaaaatattttactatcaagctaagtaataaattaaagaaaaatatcaaacattctgatatggatatactaggtaatttttatggtgagtttgtaaaatatggaggaaatgatggtaattcattaggcatagtcttaacacctagacatattacaaacctgatgtgcgaattaattgatattgatgaaaatgattatgtattagatccatgctgtggttcaggtgggtttttaatagctgccatgaatagaatgttaggaaaaacaaatgatgaaatcaaaaaagctgaaataaaacaaaatcaattacatggaattgaattacaacaaaagttattcactatagcaactacaaatatgattttacgtggtgatggtaaaagtaatctaaaacgtgatgacatattccatgttgaaacaggtctatataaaaatcaaattactaaggcattaattaaccccccatattcacaagctaaaacgaaaaacttaagtcacttatcagaaattagttttatcaatgaaacgttgtcactaatgaaaaaggacgctaagttagccgctatcgttccacagagtacaatgattggtaaaactaataatgataagaattacaagcgcgaaatactagaaaagcattcgttagaaacagtaattacgcttaataaagataccttttatggcgtgggagtaaatccgtgtatagcaattttcactgcaggtgttccacaagacaacaaaaaacgtgttaactttgtaaacttttctgatgatggttatatagtgcgtaaacatgtgggattagttggagatggtaccgagaaatcaaaaaaagaatatcttttaaacgtgttaaatgattatgaagatgcggatactaactttttagttaaatcccctattacttggaaggatgaatggttgcatagcttcttttactacaatgaagaaattcctacagatgaagatttcgaaaagacaatagctgattacttatcatttgaatttgatatgaaactgcacggcaggggggatttattcgataatgaaactgagtga

SEQ ID NO: 414807 - DNA, 258 bp, Staphylococcus aureus
atggctacgaaaattaaaaagattccaaaatataagttaaatgactcaaatgttaaatatctactaatgaatgacccaagcaatgaacctggtaataatccaaataaaaagatggaaccatttttaatatcaacttgttttgtttttaaatatccaagtgatgaagaaagtcctgtcacaattagaatgactgaagacgtccctatcgctacttgtgttgtaatattatgtagtaatccatgttcaacaccgaggtaa

SEQ ID NO: 414808 - DNA, 360 bp, Staphylococcus aureus
atgtttattaataatgaagatacatttatgggacaattcttaattaaaatgggtattcaacctgaagtcacaaaagacaaaactgcgcatgttggtgaacgcaagggtggcccttatatatatttaaataatgaagagcttgccaatatcaatccaaaagttatgattttagctacgaatggaaaaacagataaaaatagaacgaaattcattgatcctgcagtttggaaatcattaaaagctgtgaaagataataaagtttatgacgttgaccgaaataagtggttgcaatcaagaggtattatcgcaagtgaaagtatggcagaagatttagagaaaattgcagaaaaagcaaaataa

SEQ ID NO: 414809 - DNA, 987 bp, Staphylococcus aureus
gtgttatcatcttttttaatgttaagtataatcagttcattgctcacgatatgtgtaatttttttagtgagaatgctctatataaaatatactcaaaatattatgtcacataagatttggttattagtgctcgtctccacgttaattccattaataccattttacaaaatatcgaattttacattttcaaaagatatgatgaatcgaaatgtatctgacacgacttcttcggttagtcatatgttagatggtcaacaatcatctgttacgaaagacttagcaattaatgttaatcagtttgagacctcaaatataacgtatatgattcttttgatatgggtatttggtagtttgttgtgcttattttatatgattaaggcattccgacaaattgatgttattaaaagttcgtcattggaatcgtcatatcttaatgaacgacttaaagtatgtcaaagtaagatgcagttctacaaaaagcatataacaattagttatagttcaaacattgataatccgatggtatttggtttagtgaaatcccaaattgtactaccaactgtcgtagtcgaaaccatgaatgacaaagaaattgaatatattattctacatgaactatcacatgtgaaaagtcatgacttaatattcaaccagctttatgttgtttttaaaatgatattctggtttaatcctgcactatatataagtaaaacaatgatggacaatgactgtgaaaaagtatgtgatagaaacgttttaaaaattttgaatcgccatgaacatatacgttatggtgaatcgatattaaaatgctctattttaaaatctcagcacataaataatgtggcagcacaatatttactaggttttaattcaaatattaaagaacgtgttaagtatattgcactttatgattcaatgcctaaacctaatcgaaacaagcgtattgttgcgtatattgtatgtagtatatcgagcttcacatga

SEQ ID NO: 414810 - DNA, 267 bp, Staphylococcus aureus; identical to SEQ ID NO: 409011

SEQ ID NO: 414811 - DNA, 579 bp, Staphylococcus aureus
atgaagcataaaagtgtgtatcttttatgctttttaattttgcctattctgcttttaacatctgtgagtgcttacgctgtttctaatccagttggagagccctcacatgcagttaagccaaaaattgaaaagtatgatttatcacattatcgttcaatatatagtgaaaaaggcgactggaatccgtttggtcaagaagaaatttcacgacaaattaataatgtgtcagattttttcttttctatgactaagattttagcaggtgttacagattatgcgattgaaaatttatttcaactagatgttattaatgattttgcggataaaatcggcgattttgttggcgatatatatcaaaagttattgagtaatttagcattaacattatttattattgtttgctttaacgcatttattatttttagtgtacaaggtaatgcaagagaagcattaaaacgagcgtttttaattatgtgtttaattggttttggtgttggtatacttgcgaatgcaggtaatattatacgtggtacaaacaatattggtaaggacttaaatctgtctcttatacacatctga

SEQ ID NO: 414812 - DNA, 324 bp, Staphylococcus aureus
atgtgtataagagacagcaacaaaaagagtgatggtaattattattttcctgttttgaacactgaaggtaatatcgattatatagttacaatttcaccaaaagtcactaaggattctagttcatcttctaaatacacaatcaatgtttcttcatttttatctaaagccttaaatcaatataaagatcaacaaattactattttgacaaactcaaaaggttactatgtggttactcaaaatcataaagcaaaattagtactaaaaacaccacgtctagaagataaaaaggtaaaaaaagaccgagagtatacctactggcaataa

SEQ ID NO: 414813 - DNA, 525 bp, Staphylococcus aureus
atgaatcatgataaatcaccaataattttaattggtttcatgggtaccggtaaatctacgattggtaaatacgttgcagatgagcaaaatttatcatttattgatatagattcatatatcgaagaaaagtataagttaacaataccagaaatatttagtaaacatggtgaacaatatttcaggaatttagagttcacatgtttgcaagaatgtattaacactgcagatataattgctactggtggtggtattattgaaagtgaagaggcatttaattttttgaaaaatcaaaaaaacattatttggttagattgtaatattgatattatatatagtcgaatcaatgatgacccacatcgacctaatgcaaataataagacaatcatgcagttaaatgacttgtattgctcgcggattttaagatataatgaaatcgcattcaagaaatttgatagtcatttgctatcaatttcagaaatatattatgaattgctaaatttaataaaagcgagtgatcagtattag

SEQ ID NO: 414814 - DNA, 558 bp, Staphylococcus aureus
atggtaatcgagccaaaaggtaaggatatggaaacgagaggaatggtgctctatatcaatcgcaatactagaaccacaaaagggtattattttataagtgaaatgacagatgacagtaacggcaggccaaaggatgatgaaaaaaggtatccggtaaaaatggaacataataaaatcataccaacgaagccactaccgaatgacaagttaagaaaagaaatcgaaaactttaaattctttgtacaatacggtgactttaaagatattaatgattataaagatggtgacatttcatataatcctaatgttccaagttattccgcaaaatatcaattgaaaaacgatgactacaatgtgaagcaacttcgaaaaagatatgatattccaaccaacaaagctccgaaattattaataaaaggtgatggtgatttaaaaggctcatctgtaggatcaaaaaatctagaatttacctttgtagaaaataaagaagaaaacatttattttacagattctgtacaatatactccaagtgagggtacaagttatgagtcaaactga

SEQ ID NO: 414815 - DNA, 828 bp, Staphylococcus aureus
atgagatttgattttaatgcgaaaaatggtgagatttctgacaataatatttatacaaatataattataggtactggagttggacattctaaagttatatttgataacgggaaagaaattaatttttctaatgcaacgccaattatcttcgcacaatatttgaaaattgaattgaaaaagagaaatataattgtagatattaataattattttaatagcactgttatttcatttgcgcatgataaaaaatatagatataaggatatgtatattgaaaaatacaatgaaattattaaagtgatgagtgaagaagatttaaatgaggcatcggttttagaagctaaagagttagccaagaaagacatgaattataattttaaaattagtgagtacagagctactatgaaattcatggaattatttagtgactatacattttcttttaaaaagttgatttctgatttatggatttttgatcaaaagaatttggaagtatttaaaaaatatatgctaaattacgaaaattgtttgattaatataagtgaaaaaattgacaataaagaaaaattaaagaattttaaaaataaaggtgaaaaatttaattatttatatataccaaagtttaacggtcataattatatagttgaaaaagcacgtaggaactcttcatttattggatacttatttaaagagtttgataataaaaataaacattatgattatgcagtaattttggctactggatattacttatttggcgataattttgaagtgcacaagtctagaaaagaaataggtattttaggtctgtctcttatacacatctga

SEQ ID NO: 414816 - DNA, 510 bp, Staphylococcus aureus
atgtctttatttgatagactaagtgttctaaaaaataaatcagaaataaaacttatagaaagtaagcaagtagttgaagataaagtatttgaaatacgacatggtaaattagatgatataccaatgactaaagaaagaaagcgttcagaaaaaacgaggaaaaaacttgaaaaacatgaatcaaaggtaaaagaaaaaaaaaaaagaaagcaacaaagagaagaagaaatagaaaaaaggagaatagcaaaagaagagcaagaaaagcgtgatgtttggattaaagagaatgtatttaaaattatagtaaatgaggaaggtaaacgaataattttttgtcctaaatgtggtagtgagaataatgtaactgctactacttggaacgtagatgaagctgaaaatagtgaggatattggaacatattttaagagaacttgtaatttatgcggacattctcaaaaatctgtctcttatacacatctgacgctgccgacgaagaggatagtgtag

SEQ ID NO: 414817 - DNA, 291 bp, Staphylococcus aureus
ttgaatttagaatttaaatacctttttttgaaacttatagttaaagaggattggtctttatctaatgtatttaatactggagcagtgaaacttaacaagattgctgagttctttaatgaagtttatccaaatttaaattctttactagattgtgatattaatatgttagaaaagtactggtttagttggttgactaaaaataatatacctataaaaagaaaatcatcaacaatagtttttggtgattatgaacataaaagtggactagcttcttttttaaagaatatgtag

SEQ ID NO: 414818 - DNA, 582 bp, Staphylococcus aureus
atggcaaatatgaaaaatagtaatgatcgtattattttatttagaaaagctggcgaaaaagtagatgctactaaaatgctttttttaactgaatacggcttatcacatgaagctgatacagatacagaggatacaatggacggttcttataacactggtggttctgttgagtcaacaatgtctggtactgctaaaatgttttatggtgacgattttgcagatgaaattgaagatgcagttgtagatcgcgtattgtatgaggcttgggaagttgaaagtagaataccaggcaaaaatggagatgccactaaatttaaagcgaaatatttccaaggtttccacaataaatttgaattaaaagcagaagctaacggtattgatgaatatgaatatgaatatggagtgaatggtcgtttccaacgtggatttgcaacactacctgaggctgtaacaaagaaacttaaggcgactggatacagattccatgacactacaaaagcagatgcgttaactggcgaagatttaacagcaattccacaacctaaggtagattcatcaacggttacaccaggagaggtataa

SEQ ID NO: 414819 - DNA, 207 bp, Staphylococcus aureus; identical to SEQ ID NO: 409232

SEQ ID NO: 414820 - DNA, 405 bp, Staphylococcus aureus
gtgggctcggagatgtgtataagagacaggttatttttcctttgcctatcttttatcatttcagaaggtactccgaaaataaacatcagaataaataatataattggcaaatgtggtatgttttctagcaaataccatcttaaattccaatcaaacaccatatttgcatacgccacaaaatatttactaaataataatactacgcatattccagttagtgtatctaaaacctttgtcaaatgtgtcatttatagccatcctttatatatgctattttcacaaccatatgtgtcatgtgttacaaaaactgtttacagcaaatacatatttaccacgataaatataatataccatagatctaacattacattaaaaacaaattttaaaaatatcattattaaatag

SEQ ID NO: 414821 - DNA, 720 bp, Staphylococcus aureus
atgaataaaaatataatcatcaaaagtattgcagcattgacgattttaacatcagtgactggcgtcggcacaacaatggttgaaggtattcaacaaacagccaaagccgaaaatactgttaaacaaattacaaatacaaatgttgcaccatacagtggtgttacatggatgggcgctggaacaggatttgtagttgggaatcatacaatcattaccaataaacatgttacttatcacatgaaagtcggtgatgaaatcaaagcacatcctaatggtttttataataacggtggtggactttataaagttactaagattgtagattatcctggtaaagaagatattgcggttgtacaagttgaagaaaaatcaacacaaccaaaaggtagaaaattcaaagatttcactagtaaatttaatatagcatcagaagctaaagaaaatgaacctatatcagtcattggttatccaaatcctaatggaaataaactacaaatgtatgaatcaactggtaaagtactatcagtgaatggaaatatagtgacatctgatgcggttgtccaacctggcagctctggttcacctatattaaatagtaagcgagaagcaattggtgttatgtatgctagtgataaaccaacaggtgaaagtacaaggtcatttgctgtttatttctctcctgaaattaagaaatttattgcagataatttagataaataa

SEQ ID NO: 414822 - DNA, 684 bp, Staphylococcus aureus
atgaaatttacagcattagcaaaagcaacattagctttaggaattttaacaacaggaactttaacaacagaagttcattcaggtcatgcaaaacaaaatcaaaagtcagtaaataaacatgacaaggaggcactataccgatactacactggaaagactatggaaatgaaaaatattagtgctttgaaacatggtaaaaataacttgcgttttaagtttagaggtattaagattcaagttttactgcctggaaatgataaaagtaaatttcaacagcgtagttatgaggggttagatgtgttttttgttcaagaaaaaagagataagcacgatatattttatactgttggtggtgtaatacagaataataaaacatctggagttgtcagtgcaccaatattaaatatttcaaaagaaaagggtgaagatgcttttgtgaaaggttacccttattacattaaaaaagaaaaaataacactaaaagagctggattataagttgagaaagcatctaattgaaaaatacggactttataaaacaatctcaaaagatggtagggtcaaaattagcttgaaagatggcagtttttataaccttgatttaagatctaaattaaaatttaaatatatgggggaagtcatagaaagcaaacaaattaaagatattgaagttaacttaaagtaa

SEQ ID NO: 414823 - DNA, 213 bp, Staphylococcus aureus
ttgaataatagtgatacaaatgtaaaaaaacttagagatatttatccaattacaacgaaaaaggctccaatattaaagttacatatagatggtgatataaaaggaagttcagttggatacaaaaaaatagaatataaattttcaaaagttaaagatcaagagacaacattaagagattatttaaattttgggccgtctgatgaagatagctaa

SEQ ID NO: 414824 - DNA, 213 bp, Staphylococcus aureus
gtgtataagagacagtttttaacgttacctttttctgaaattcgtgaagaatatattgcagcttctaatatttggaatagaacgttgctatttacagaaaatgataaacagtttaaaggacaagcaattgatttagattacgatggctatctaattgttagagatgaagcgggtgaatcacaccgtttaattagtgcagatatagatttttaa

SEQ ID NO: 414825 - DNA, 288 bp, Staphylococcus aureus
gtgaaatttaacgatttagaagatgttattaattatgcatatcatagcaatccaataactacagagtttgaagatttgttatatatggttgatggtacttattattatgctgtacattttgatagtcatgttgatcaagaagtcattaatgatagttacagtcaattgcttgaatttgcatatccaacagacagaacagaagtttatttaaatgactatgctaaaataattatgagtcataacgtaacagctcaagttcgacgttattttccagagacaactgaataa

SEQ ID NO: 414826 - DNA, 237 bp, Staphylococcus aureus; identical to SEQ ID NO: 408128

SEQ ID NO: 414827 - DNA, 423 bp, Staphylococcus aureus; identical to SEQ ID NO: 409264

SEQ ID NO: 414828 - DNA, 516 bp, Staphylococcus aureus
atggaatttttttcgagatatgttatttcggggatcagattttgcgatttcgccttggatagagtagcagcacattattcgagtaaaggtaaaggcggaggaaactacgacgttaaagacattgtagaatatcctggaaaagaagaccttgcgatagttcatgttcatgaaacaagtacagaaggtttgaattttaataagaacgttagttatacaaaatttgcagaaggagcaaaagcgaaagatagaatttctgttattggttatccaaagggtgcacaaacaaaatataaaatgtttgaatcgacaggaacgattaaccatatcagtggaacgtttatagaatttgatgcgtatgcacaaccaggtaattcaggatctcctgtattgaattctaaacatgaactgattggtattttatatgcaggtagtggaaaagatgaatctgaaaagaatttcggtgtttatttcacaccacaattaaaagaatttattcaaaataatattgaaaaataa

SEQ ID NO: 414829 - DNA, 501 bp, Staphylococcus aureus
atgactttcgaagaaaaattaagtcaaatgtacaacgagattgcgaataagattagtagcatgataccagtagagtgggaaaaagtatatacaatggcttatatagatgatgaaggtggagaagtgttctactattacacagaacctggaagcaatgaattatactactatactagtgtattaaataaatatgatatatcggaatcagaatttatggactcagcgtatgagttgtataaacaatttcaaaatttaagaaatatatttaaagaagaaggatatgaaccatggacatcatgcgaatttgattttacaaaagaaggtgaattaaaagtttcatttgattatatagattggatcaatacagagtttgatcaattgggccgtcaaaattattatatgtacaaaaaatttggggttataccagaaatggaatatgaaatggaggaggttaaacaaatcgagcaatatattaaagagcaagaagaagctgaacaatag

SEQ ID NO: 414830 - DNA, 579 bp, Staphylococcus aureus
gtgattgaagattatgtgatgaagcaaatacttgaaatagtcaaaagtgataaagtcattcaacgcgtagtaacacacgtcaatcaagaaaatcaagttgatggcgctgcacttcatcacgatattgcttataagcaacaacaatatgatgaagtacaaatcaaactaaataacttgattaaaaccatcgaggataatccggacttaacatcagtaatcagaccaagtattcaaaaatatgaaaagcaactcaatgacattacgaatcaaatcaaccaactcaaaaatcaacaaaatgaagataagcctttatttgatgccaaagaaatcagtaaactattacaacacatctttcatgatattaagcacatagaaaaatctcgactcaaagcattgtatctatcagtgattgatcgcattgatattaaaaaagatggtaatcataaaaaacaattctatgtcacactcaaacttaataacgaaatcataaaacaacttttcaataataaacaactcgacgaagtgcatctcagcacttcgtctttgtttttgccccaaacactatatcttactatttag

SEQ ID NO: 414831 - DNA, 1047 bp, Staphylococcus aureus
atgaataataaagacatatatagcgatgattttcaaaatgctttagtagacataattttgaacattgataaaataaatgtcaaagaagtttttgatgattcatgtagggctgtagatcaagataataaaaaggatactttaaatcgttctcctaaagatttttccataaatataagtgatatagtaagatatagtatactttgcatggaaaatttaagtagtgacaagattgaagaaaatatcaatatgattaaaaatcatagttcagaattaaatgacaacgacatgtttattcaagaaaaaaataattttacaactaattttaataaattctgcaacgctctaggaataaacatagcaaactttaaatcaggaaaatcatatgtatttaaaccaaaaagtttatttgtattatatgatatactctcaaacaactcagtttatctacacttttttaaaaacggtatcaatgacaaagatatagattcttctaatcgtatcaaagagaacttatattatttcatcaatcatgaaattactgatcaaagagattatgaacatgctctgactaattattatctctattttctagtagacagtaatatagaaattggaatcaaatctatcattattaagattttcactgaaaaaggtatcacttctaaagataaacttcagattcttgaatattatttagatgaaatagacgatttaaacactgaaataagtaccaaaattgctgatgctcatgttaaaaatagtacaaactttttagaaaatgaaaaagtaagtataaacagtaatttagcaaaatatattactcatcgagacaccagagcttcggcacctaaaaatatgctgttatcattaattttaaatagtgacctagtgtctccaaaagacttagaagaaaaagaactcaaatatccaaagaaaataacaaaagaacatcatgataaattaataaaagaaatcaataaagcactagattattataatgataataacaccactccttctgactacttttatataacttcagattaa

SEQ ID NO: 414832 - DNA, 168 bp, Staphylococcus aureus
gtgggctcggagatgtgtataagagacagcatggctgataaaatactaaagcttgttaataatgatgttttagcagaggagtttggttcgaaagcgagagaaaacattatagaaaaatattcaacggaatcaatattagaaaaatggttaaatcttttcaatagctaa

SEQ ID NO: 414833 - DNA, 720 bp, Staphylococcus aureus
atgaataaaaatataatcatcaaaagtattgcggcattgacgattttaacatcaataactggtgtcggcacaacagtggttgatggtattcaacaaacagccaaagcagaaaatagtgtgaaattaattaccaacacgaatgttgcaccatacagtggtgttacatggatgggcgctggaacaggatttgtagttgggaatcatacaatcattaccaataaacatgttacttatcacatgaaagtcggtgatgaaatcaaagcacatcctaatggtttttataataacggtggtggactttataaagttactaagattgtagattatcctggtaaagaagatattgcggttgtacaagttgaagaaaaatcaacgcaaccaaaaggtagaaaattcaaagatttcactagcaaatttaatatagcatcagaagctaaagaaaatgaacctatatcagtcattggttatccaaatcctaatggaaataaactacaaatgtatgaatcaactggtaaagtactatcagtgaatggaaatatagtgacatctgatgcggttgtccaacctggcagctctggttcacctatattaaatagtaagcgagaagcaattggtgttatgtatgctagtgataaaccaacaggtgaaagtacaaggtcatttgctgtttatttctctcctgaaattaagaaatttattgcagataatttagataaataa

SEQ ID NO: 414834 - DNA, 645 bp, Staphylococcus aureus; identical to SEQ ID NO: 414784

SEQ ID NO: 414835 - DNA, 183 bp, Staphylococcus aureus
gtgtttactacagacatcgcagtcaacaatataactttcgttgaacgtaaaaacaacggtcaatctaacaaccaacaacagcataattcatataacgcaccacagaatagacagcaatcaaataatccatttgctaatgctaatggtcctatagaaatctctgacgatgatttacctttctag

SEQ ID NO: 414836 - DNA, 504 bp, Staphylococcus aureus
atgggtggcggcatgattatagggagtatgttaggtgcatttctagcaaatttatttgatgctacatttgtaaatacggtatatatcattattgctttacttgcattaacattaatgtttattaaagtgaaacctagttccgaaaagtcttcatttaataaatatttattagttatcattggccttttcattggtattatttcaggtatagtaggtgcaggtggtgccttcattattattcctatattattggttttattcaaattaccaatgaatactgtagtcgctaatagtatagtaattgcttttatatcttcaattggtgcttttgtcatcaaacttattcaaggttatatccctttatatgacgccttattccttataatagggagtattatatttgctccaatagggttaaaattaagtaaaaaagtccctaacataatacaaaaatggattatcagtattttaatcgtttttgctatagttcaactcattttataa

SEQ ID NO: 414837 - DNA, 354 bp, Staphylococcus aureus
gtggtaccaacagtagtcatagatttagtggatcaattaaaaggaaactattcaatcaaattgatactagaagtattaaatatacctaaatcaacatattaccgatggaaaaacaaaacctataaaaatgatactgtaacacaaaaagttattgaattatgtgaagctaaccattatacctacggttatcgtaagattacagcactgattaatcaatgttatacatcaccaattaatcataagagagtacagagaatgatgcagaagcatcatttgaactgccgagttagacctaaaaagacgacaaggataggtaaaccgtattataaaacagacaatttattacaaagataa

SEQ ID NO: 414838 - DNA, 390 bp, Staphylococcus aureus; identical to SEQ ID NO: 406382

SEQ ID NO: 414839 - DNA, 165 bp, Staphylococcus aureus
atgcttaaattaatttcaccaacattcgaagatattaaaacatggtatcaattgaaaaaatatagtaaagaagatatagcgtggtatgtagatatggaagttatagataaagaggaatatgcaattattacaggagaaaagtatccagaaaatctagagtcatag

SEQ ID NO: 414840 - DNA, 300 bp, Staphylococcus aureus; identical to SEQ ID NO: 406384

SEQ ID NO: 414841 - DNA, 303 bp, Staphylococcus aureus
atggatgcaaaagtaataacaagatacatcgtattgatcttagcattagtaaatcaattcttagcgaataaaggtataagtccgataccagtagatgaagaaagtgtttcatcgattatcttaacagttgttgctttatatactacatataaagataatccaacatctcaagaagggaaatgggcgaatcaaaaattaaagaaatataaagctgaaagtaaatatagaaaagcaacagggcaagcgccaattaaagaagtaatgacacctacgaatatgaacgacacaaatgatttagggtag

SEQ ID NO: 414842 - DNA, 1455 bp, Staphylococcus aureus
atgttgataacaaaaaaccaagcagaaaaatggtttgataattcattagggaagcagttcaatcctgatttgttttatggatttcagtgttacgattacgcaaatatgttttttatgatagcaacaggcgaaaggttacaaggtttatacgcttataatattccatttgataataaagcaaggattgaaaaatacgggcaaataattaaaaactatgatagctttttaccgcaaaagttggatattgtcgttttcccgtcaaagtatggtggcggagctggacatgttgaaattgttgagagcgcaaatttaaacactttcacatcatatgggcaaaattggaatggtaaaggttggacaaatggcgttgcgcaacctggttggggtcctgaaactgttacaagacatgttcattattacgatgacccaatgtattttattagattaaatttcccagataaagtaagtgttggagataaagctaaaagcgttattaagcaagcaactgccaaaaagcaagcagtaattaaacctaaaaaaattatgcttgtagccggtcatggttataacgatcctggagcagtaggaaacggaacaaacgaacgcgattttatccgtaaatatataacgccaaatatcgctaagtatttaagacatgccggtcatgaagttgcattatatggtggctcaagtcaatcacaagacatgtatcaagatactgcatacggtgttaatgtaggcaataaaaaagattatggcttatattgggttaaatcacaggggtatgacattgttctagagattcatttagacgcagcgggagaaagtgcaagtggtggacatgttattatctcaagtcaatttaatgcagatactattgataaaagtatacaagatgttattaaaaataacttaggacaaataagaggtgtaacacctcgtaatgatttactaaacgttaatgtatcagcagaaataaatatgaattatcgtttatctgaattaggttttattactaataaaaaagatatggattggattaagaaaaactatgacttgtattctaaattaatagctggtgcgattcatggtaagcctataggtggtttggtagctggtaatgttaaaacatcagctaaaaaccaaaaaaatccaccagtgccagcaggttatacacccgataaaaataatgtaccgtataaaaaagaaactggttattacacagtagctaatgttaaaggtaataatgtaagagacggttattcaactaattcaagaattacaggggtattacccaacaacacaacaattacgtatgacggtgcatattgtattaatggttatagatggattacttatattgctaatagtggacaacgtcgctatattgcgaccggagaggtagacaaggcaggtaatagaataagtagttttggtaagtttagcacgatttag

SEQ ID NO: 414843 - DNA, 216 bp, Staphylococcus aureus; identical to SEQ ID NO: 409121

SEQ ID NO: 414844 - DNA, 363 bp, Staphylococcus aureus
atggcaatattagaagatatttttgaagaattaaaactattaaataagaatttacgtgtgttaaatactgaactatcaactgtggattcatcaatcgtacaagagaaagttaaagaagcaccaatgccaaaagaagaaacagctcaactggaaacaattgaagaagttaaggaaacgtctactgatttaactaaagattatattttatcagtaggaaaagagttccttaaaaaagcagatacttctgataagaaagaatttagaaataaacttaacgaacttggtgcggataagctatctactatcaaagaagaacattatgaaaaaattgttgatttcatggaagcgagaattaatgcatga

SEQ ID NO: 414845 - DNA, 690 bp, Staphylococcus aureus
atgtatgaagaaaatatttatattaaaaattcagaatatgaatttgataataatcttaaacaattagcatcatacttaaatattcctgttagtattgttagaccttataaagaggatttaacactttatcaatataaaaaaggacaagtcatatatcattcaactgatcaaataaaatttgtatactttttagtaaatggttgtattttacatgaatcttctaatattactggtgacaattatttaagattaagtaaagacgaaaatatatttccaatgaacttcatatttaatgaaacccctgcaccatatgaaatatgtacagctttgacagattgtaaaatattaactttaccgaaagatttacttgagtatttatgtagaaagcataatgaaatatttgaaagtctcttcaagaaacttaatgagactattcaatttcaagtagaatatattatggcgttaagagctaattcagctaaagaaagaattgaaagaatactacaaattttatgcctttcaattggggatgataatggagaattctatgaattaaaacaaattatgactgttcaattaataagtaatttatctggacttaacagaaaaactactggtgaaataatcagagaattaaaaatagaaaatattatatatcaagataaaagaaattggattataaaaaaataa

SEQ ID NO: 414846 - DNA, 1257 bp, Staphylococcus aureus; identical to SEQ ID NO: 409235

SEQ ID NO: 414847 - DNA, 378 bp, Staphylococcus aureus
gtggcgtataaaatagatgataaacaagaccaaagtttagttaatgatacattaaatcaaatcgatatacctgaggggtatatattacatagtgatcaaggcagcgtttatacatcttatgcttattatcaattatgcgaagaaaaaggcattatcagaagtatgtcccgaaagggaacacctgccgataacgccccgatagaaagtttccattcctcgctaaagtctgaaactctttacatcaataatcagcttaatagctctaatcatattgtaatagatattgtcgaaaagtacattaaaaactataataataatcaaattcaacaaaaactaggctacttatcccctgtaaaatacagagaattaatagcctag

SEQ ID NO: 414848 - DNA, 240 bp, Staphylococcus aureus; identical to SEQ ID NO: 409234

SEQ ID NO: 414849 - DNA, 264 bp, Staphylococcus aureus
gtgagcgaaagaaacgatcgtaaagtttatgtaggtaaagttgtttcagacaaaatggacaagactattacagtacttgttgaaacttacaaaacacacaaattatacggtaaacgagtaaaatactctaaaaaatacaaaactcatgatgaaaacaattcagctaaattaggagacattgttaaaattcaagaaactcgtcctttatcagcaacaaaacgttttcgtatagtagagattgttgaagagtcagtaattatttaa

SEQ ID NO: 414850 - DNA, 1308 bp, Staphylococcus aureus
ttgaaaaacactttataccatcaactttatgaaaaattaaaaaaacaaataattgaaggtcaatttaaagaaggcgataaattttattctaaaagacaattaagcaaacatttatctatcagccaaacaaccgtagagcatgcatatcaacttctattagacgaaggttacatttattcaagacctcgctctggatattttgtgtccgaaattgaatctttaacaattttaaacaatcaacctatcccctctctttttgatgatgattcatataaaccaaaagcgagtgatgaagcttatgattatgcttttaatttggatgaaatagatacgaaacatttccctatagaacttttcagaaagtattccaaagatctttatgatacaaatcatttaaatcaattacgtagaggacattttcaaggagaattacatttaagatttcaactggcattttatttatttactaatcgtggtgtaatttgtgatcctaatcaaattataattggctcatctaccgaacaattagtaaatcaattagtcgatttactttatacttcaacgtttattatcgaaaaacctagttatccaccaatcaaaaatattttagataaaaaacaagttgaatatgaacaaattgaagttgaagataatggaataaacgtagatgaagttattaaatcacaaaaaaatatagtatatataacgccttcccatcaatttccaactggatatgtgatggacttaaaaaaacgaactcaattaatacaatgggctcaagaaaaagaagaacgatttattatagaagatgattatgattccgagtttagatatttcggcaaacccattccagcaattcaaggtctatattcaagaggagaaaaagtgatttatatcagtacattttcaaagtctatttttcctagctgtcgagttgcatatatggtgttaccctattctataatgaaaaaatatcattctcaaaatcacattgaaggcaacactgtacctgttcatatgcaaaaccttattgcaacgtttatatcttccggtggttttgaaaggcatttaaataaaatgagacgaatttatcgtagaaaactaacctatattttaaaaagattgaaaccttacaaagagcagcttgatattcaaggtgctgaaacgggtatgcattttacaattacagtaaaaaatggattaacattacaagagtgtcttgatagagcaaacaaagtaaagttaaaattacaagtttataattttgatgatgatcaagagtataagaaacccctaaatttatattag

SEQ ID NO: 414851 - DNA, 888 bp, Staphylococcus aureus
atgagtaaaattattggatcagacagagtcaaaagaggtatggctgaaatgcaaaaaggcggcgttattatggatgtcgttaatgctgagcaagcaagaattgcagaagaagcaggcgcggtagcagttatggcattagaacgagtaccttctgatattagagctgctggtggcgttgcacgtatggcaaaccctaaaattgtagaagaagtaatgaatgctgtttctattccagtcatggctaaagcacgtattggtcatatcactgaagcaagagtattagaggcgatgggtgttgactatattgatgaatcagaagtgttaacaccagcagatgaggaatatcacttaagaaaagatcaatttacagtaccatttgtatgtggatgtcgtaatttaggtgaagctgcgcgtagaattggtgaaggtgctgctatgttacgtactaaaggtgaaccaggtacaggtaatattgttgaagctgtaagacatatgagacaagttaattcagaagttagtcgattgactgtaatgaatgatgatgagattatgacttttgcgaaagatatcggtgcgccttatgaaattttaaaacaaattaaagacaatggtcgtttaccggtagttaactttgcagctggtggcgttgcgactcctcaagatgctgctttaatgatggaattaggtgctgacggtgtattcgttggatcaggtatttttaaatcagaagatccagaaaaatttgctaaagcaattgttcaagcaacaacacattaccaagactatgaactaattggaagattagcaagtgaacttggcactgctatgaaaggtttagatatcaatcaattatcattagaagaacgtatgcaagagcgtggttggtaa

SEQ ID NO: 414852 - DNA, 561 bp, Staphylococcus aureus
atgaaaataggtgtattagcattacaaggtgcagtacgtgaacatattagacatattgaattaagtggtcatgaaggtattgcagttaaaaaagttgaacaattagaagaaatcgagggcttaatattacctggtggcgagtctacaacgttacgtcgattaatgaatttatatggatttaaagaggctttacaaaattcaactttacctatgtttggtacatgcgcaggattaatagttctagcgcaagatatagttggtgaagaaggataccttaacaagttgaatattactgtacaacgaaactcattcggtagacaagttgacagctttgaaacagaattagatattaaaggtatcgctacagatattgaaggtgtctttataagagcgccacatattgaaaaagtaggtcaaggcgtagatatcctatgtaaggttaatgagaaaattgtagctgtccagcaaggtaaatatttaggcgtatcattccatcctgaattaacagatgactatagagtaactgattactttattaatcatattgtaaaaaaagcatag

SEQ ID NO: 414853 - DNA, 1215 bp, Staphylococcus aureus
atgcatattctaattgggattatcggaattatcttctttttagcacttgcgtttctatttagctcagacaggaaaaatattcgctggaaatatgtaggaattttacttgcaattcagcttatctttgcatttatcttgcttaaaactacaatgggaatcaaggttattggtggtatttcaaacggttttaactacttattattaaaagcagcagatggtgttaactttgtattcggtggtattcaatatatcgatcctaagcaaccaccattcttcttcagtgtattattacctatcgtatttatttcagcgattatcggtatccttcaatacacaaagattttacctttaatcattaatgttttaggattcttaatttctaaaattaatggtatgggacgtttagaatcatacaatgcagttgctgcagcaattttaggacaatctgaagtatttatttcaattaaaaaacaattaccatacatacctaagcaacgtttatacacattaacagcttcagcaatgtcgactgtttctgcttcaattatcggtgcatactttaccttaattgaacctaaatatgttgtaacggctgttgtcttaaacttatttggtggtttcatcatcgcttcaattattaacccttataaagttaatgaagaagatgacaaattattagttgaagaaactgaagaaagacaacaatcattcttcgaaatgctaggagaatatattttagatggatttaaagtagctgtcattgtaggtgcaatgttaatcggatacattgccattatcgctctattaaatggaattgtaagcaatatctttagtacagtttcaggtggcgctatttcttgggatttccaaacattaattggttttgtctttgcaccatttgcattcttagtcggtgtgccatggcaagatgcagttcaagccggttcagttatggcgacaaaactattatctaacgaatttgtagcaatgcaagcacttggtaaacttagtgatttatctgaacacgcaaaaggtgttacatctgtattcttagtatcatttgctaactttagctctattggtattatttcaggtgctattaaatcacttaatgacaaaaaaggagatacagttgcccgctttggtttgaaattattattcggtgcaacactagtatctttcatttcagctgcaatcgctggattctttatttaa

SEQ ID NO: 414854 - DNA, 471 bp, Staphylococcus aureus; identical to SEQ ID NO: 411029

SEQ ID NO: 414855 - DNA, 567 bp, Staphylococcus aureus
gtgctttgtgaaaattgtcaacttaatgaagcggaattaaaagttaaagttacaagtaaaaataaaacagaagaaaaaatggtgtgtcaaacttgtgctgaggggcaccatccgtggaatcaagctaatgaacagcctgaatatcaagaacatcaagataatttcgaagaagcatttgttgttaagcaaattttacaacatttagctacgaaacatggcattaattttcaagaagtagcgtttaaagaagaaaaacgttgcccatcatgtcatatgactttgaaagatattgcacatgttggtaaatttgggtgtgctaattgttatgcaacatttaaagatgacatcattgatatcgtccgcagagttcaaggtggacaatttgagcacgttggaaagacaccacattcttcacataaaaagatagctttaaagcgaaaaatcgaagaaaagaatgaatatttgaaaaaacttattgaaatccaagattttgaggaagcagccattgttagagatgaaattaaagcactaaaagctgagagtgaggtgcaacatgatgacgcataa

SEQ ID NO: 414856 - DNA, 1011 bp, Staphylococcus aureus
atgatgacgcataatattcatgataatatcagccaatggatgaaaagtaatgaagaaacaccaattgttatgtcttctagaattcggttagcgcgtaatttagaaaatcatgtgcatccactaatgtatgctactgaaaatgatggatttagagttataaatgaggtacaagatgccttgccaaattttgaattaatgcgtcttgatcaaatggatcaacaaagtaaaatgaaaatggttgcaaagcatttgattagtcctgaactaataaaacaaccagcagccgcagtattagtgaatgatgatgaatctttaagtgtcatgataaatgaagaggaccatattcgtattcaagctatgggaactgacacgacattacaggctttatataatcaagcttcatcaattgatgatgaattagatcgaagccttgatataagttatgatgaacaacttggttatttaactacatgtcctaccaatataggtactggtatgagagcaagcgtgatgctacatttaccaggtctatctattatgaaaagaatgacacggattgctcaaaccattaatcgttttggatatacaatcagaggtatttacggtgaaggttcgcaagtttatggacatacttatcaagtatccaaccaacttacacttggtaaatctgagttagaaatcatagaaacattaacagaagttgttaatcaaatcattcatgatgaaaaacaaatacgacaaaagttagacacttataatcaattagaaacacaagaccgtgtttttcgctcgctaggtattttacaaaactgtagaatgataactatggaagaggcttcttatagattaagcgaagttaaacttggtatagatttaaattacattgaattacaaaactttaaatttaatgaattgatggtagctatacagtcaccatttttattagatgaagaagatgacaaatctgtaaaagaaaaacgagcagatatactaagagaacatataaagtag

SEQ ID NO: 414857 - DNA, 2457 bp, Staphylococcus aureus
atgttatttggtagattaactgaacgtgcacagcgcgtattagcacatgcacaagaagaagcaattcgtttaaatcattcaaatataggaacagaacacctattattggggttaatgaaagaacctgaaggaattgctgcaaaagtattagaaagttttaatatcactgaagataaagtaattgaagaagttgaaaaattaatcggacatggtcaagatcatgttggtacattgcattatacacctagagctaaaaaagtcattgaattatcgatggatgaagctagaaaattacatcacaattttgttggaacggaacatattttattaggcttgattcgtgaaaatgaaggtgttgcagcaagagtttttgcaaatctagatttaaatattactaaagcacgtgcacaagttgtgaaagctttaggaaaccctgaaatgagtaataaaaatgcacaagctagtaagtcaaataatactccaactttagatagtttagctcgtgacttaacagtcattgccaaagacggtacattagatcctgttataggacgtgataaagaaattacacgtgtaattgaagtattaagtagacgtacgaaaaacaatcctgtacttattggagagccaggtgttggtaaaactgctattgctgaaggtttagcgcaagccatagtgaataatgaggtaccagagacattaaaagataagcgtgttatgtctttagatatgggaacagtagttgcaggtactaaatatcgtggtgaatttgaagagcgtctgaaaaaggttatggaagaaatccaacaagcaggtaatgtcatcctatttattgatgagttgcatactttagttggtgctggtggtgctgaaggtgctatcgatgcttcgaatattttgaaaccggcattagcacgtggtgaattacaatgtattggtgctactacattagatgaatatcgcaaaaatattgaaaaagacgcggctttagaacgtcgtttccaacctgtacaagttgatgaaccttcagtagtagatacagttgctattttaaaaggattaagagatcgttacgaagcacaccatcgtattaatatttcagacgaagctattgaagcagctgttaaattaagtaacagatacgtttcagatcgtttcttaccagataaagcaattgatttaattgatgaagcaagttctaaagtaagacttaagagtcatacgacacctaataatttaaaagaaattgaacaagaaattgaaaaagttaaaaatgaaaaagatgccgcagtacatgctcaagagtttgaaaatgctgctaacctgcgtgataaacaaacaaaacttgaaaagcaatatgaagaagctaaaaatgaatggaagaatgcacaaaatggcatgtcaacttcattgtcagaagaagatattgctgaagttattgcaggatggacaggtatcccattaactaaaatcaatgaaacagaatctgaaaaacttcttagtctagaagatacattacatgagagagttattgggcaaaaagatgctgttaattcaatcagtaaagcggttagacgtgcccgtgcagggttaaaagatcctaaacgaccaattggtagctttatcttccttggaccaactggtgttggtaaaactgaattagctagagctttagctgaatcaatgtttggcgatgatgatgcgatgatccgtgtagacatgagtgaatttatggaaaaacacgcagtgagccgattagttggtgctcctccaggatatgttggtcatgatgatggtggacaattaactgaaaaagttagacgtaaaccatattctgtaattttatttgatgaaattgaaaaagctcatccagatgtatttaatattctattacaagttttagatgatggacatttgacagatacaaaaggacgtacagttgatttcagaaatacaattatcataatgacatcaaacgttggggcacaagaattacaagatcaacgatttgctggattcggtggttcaagtgatggacaagattatgaaacaattcgaaaaacgatgttaaaagaattaaaaaattcattccgtccagaatttttaaaccgtgtagatgatatcattgtattccataaactaacaaaagaagaattaaaagaaattgtaacaatgatggttaataaattaacaaatcgattatctgaacaaaacataaatattattgttactgataaagcgaaagacaaaatcgcagaagaaggatatgatccagaatatggtgcaagaccattaattagagcgatacaaaaaactatcgaagataatttaagtgaattaatattagatggtaatcaaattgaaggtaagaaagttacagtagatcatgatggtaaagagtttaaatatgacattgctgaacaaacttcagaaactaaaacaccatcgcaagcataa

SEQ ID NO: 414858 - DNA, 1365 bp, Staphylococcus aureus
ttggccaagaaaaaagtgatttttgaatgtatggcttgtggttatcaatctcctaaatggatggggaaatgtcctaattgtggcgcttggaatcaaatggaggaaattgttgaaaaagcagccaatcctaaacatggagttaaaaccaaggaattagcaggtaaagtacaaaaattaaatagtattaaacatgaaacaacgccgagagtgttaacagattcagcagaattcaaccgtgtattaggtggaggtattgtgagcggatcgttagtacttattggtggggatccaggtattggtaagtcaacgttacttttacaaatttgtgcatcgttatctcaaaagaaaaaagtactatatattactggagaagaatcgcttagtcagactaaattacgtgcagagcgattagatgaagattcaagtgaattgcaagtattagctgaaacagatcttgaagttatttatcaaacagtaaaagaagaacaacctgatttattagtagtggattcgattcaaacaatatatcatcctgaaatcagctctgcgccaggttctgtttcacaagttcgtgaaagtacacaaagtttaatgaatattgctaaacaaatgaacattgcaacttttatagtgggtcatgtaacgaaagaaggtcaaattgctggcccaagattgctagaacacatggttgatactgtgctttattttgaaggcgatgaacaccacgcatatcgaattttgcgagctgttaaaaaccgttttggttcaacgaatgaaatgggaatcttcgaaatgaagcaaagtggattaaaaggtgtaaataatccatctgaaatgtttttagaagaacgttcaacaaatgttccaggttcaacaattgttgcaaccatggagggaaccagaccacttttaatagaagttcaagcgctggtaactccaacgacttttaacaatccgagacgaatggcaacagggattgatcataatcgattaagtttgttgatggctgttttggaaaagaaagaaaattatctattacaacaacaagatgcttatatcaaagtagctggcggtgtaaagttaacggagccagcagttgatttaagtgtaattgtagcaactgcatctagctttaaagataaagctgtcgacggattagattgctatattggagaagttggtttaacgggtgaggtacgtcgtgtatctcggatagaacaacgcgtgcaagaggctgcaaaactaggtttcaaacgtgtaattattcctaaaaataatataggcggatggacatatcctgaaggtatacaagtaataggtgtaactactgtacatgaagcattgtcatttgctcttcattcataa

SEQ ID NO: 414859 - DNA, 1074 bp, Staphylococcus aureus
gtgaatatcgttaaactaatggttattattatttacttaattattgggagcgcattaggaataattattattcctgaaattgcaaatgatcttggattacaaaactccagctttttaaaaaatcactatgtagatggcattatcggtagtatttttatgttcttaatttttggtgtatttattagacgagttactaacgctataaaaggtttagaacattttattatgcgtagaagtgctgttgaaatactattcgcaacaataggtttaataatcggattacttatttctgttatggtgtcgtttatattagaatcaattggtaactctatttttaatcatttcattcctgtcataattacgatattactatgttatttcggtttccaatttggccttaaaaaacgagatgaaatgttaatgtttttacctgagaatatagcgcgttccatgtcacaacatactaaaagtgctacgccaaaaattatcgacacaagcgcaattattgatggtcgtattttagaagtcattcgttgcggttttatcgatggcaatattttaattccgcaaggtgttattaatgaattacaaattgttgcagattcaaatgacagtgttaaacgtgaaaagggtaaaagaggcttagatattttaaatgaattgtatgatttagattatcctacaaaggttatacatccaactaaaacacatagtgatattgatacaatgctattaaagctagctaaacaatatcatgcaagtattattacgacagatttcaacctaaataaagtttgtcatgtacatggtatcaaagcattaaatgttaatgatttatcagaagcaatcaaacctaatgtacatcaaggtgatcaactgcatattttactgacaaaaatgggtaaagagcctggtcaggcagtaggatatctagatgatggtacgatggtagttgttgataatgctaaaaatcttattggcagtcatgtcaatttagaagtagtcagcttattgcaaacatcttcaggaagaattgtttttgctaaaaaaatcgaagatacagtatcattataa

SEQ ID NO: 414860 - DNA, 1455 bp, Staphylococcus aureus
atgagcgatcgtataagagtaagatatgcaccaagtccaactggttatcttcatattggtaatgcaagaacagcattattcaattacttgtatgctaaacattacaacggagattttgtgattcgaattgaagatactgataaaaaacgtaatttagaagatggagaaacatcacaatttgataatcttaaatggttaggattagattgggatgagtctgtagataaagacaatggctacggaccatatcgtcaatctgaacgtcaacatatctaccaaccattaatagatcagttactagcagaagataaagcatataaatgctatatgacagaagaagaattagaagctgaacgtgaagcgcaaatcgctcgtggtgaaatgcctcgctatggtggtcaacatgcgcatttgactgaagaacaacgtcaacaatttgaagcagaaggacgccaaccatcaattcgtttccgagtacctcaaaaccaaacgtattcatttgatgatatggtaaaaggaaatatttcatttgattcaaatggtattggtgactgggttatcgtaaaaaaagatggcattccaacgtacaattttgcagtagctatagatgatcattacatgcaaatttcagatgtaattcgtggtgatgatcatatttcaaacacgcctaaacaaattatgatttatgaagcatttggctgggagccacctcgttttggtcatatgtcattaattgttaatgaagaacgtaaaaagttaagtaaacgtgatgggcaaattttacaatttattgagcaatatcgtgacttaggttatttacctgaagcgttatttaattttattgcgttattaggttggtctcctgaaggtgaagaagaaatcttttctaaagaagaatttatcaaaatctttgatgaaaagcgtttgtcaaaatcaccagcatttttcgataagcaaaaattagcatgggttaataaccaatatatgaaacaaaaagatactgaaacagtattccaattagcattacctcatttaattaaagcaaatttgattcctgaggtgccgtcagaagaggatttatcttggggacgcaaattaattgcgctttatcaaaaagaaatgagttatgccggtgaaattgtacctttatcagaaatgttctttaaagaaatgccagctcttggtgaagaagaacaacaagtgattaatggagagcaagtaccagagttaatgacgcacttattcagtaaattagaagcacttgaaccatttgaagcggctgaaattaaaaagacaattaaagaagttcaaaaagaaacaggaataaaaggcaagcaattatttatgcctattcgtgttgctgtaacaggccaaatgcatggtcctgaattaccaaatacaattgaagtacttggtaaagaaaaagtgctaaaccgtttaaaacaatataagtaa

SEQ ID NO: 414861 - DNA, 681 bp, Staphylococcus aureus; identical to SEQ ID NO: 406733

SEQ ID NO: 414862 - DNA, 1401 bp, Staphylococcus aureus
atgattacattatataatacgcttacacgtcaaaaagaagtgttcaagcctatagaaccagggaaagtaaaaatgtatgtatgtggtcctactgtatataactacattcatattggtaacgcaagaccagcaattaattatgacgtagtgagacgttactttgaataccaaggatataatgtagaatatgtatcaaattttacagacgtagatgataaattaattaaacgttctcaagaattaaatcagtctgttcccgaaattgcagaaaaatatatcgctgcttttcatgaagatgttggtgcgttaaatgttagaaaagcgacttcaaatccaagggtaatggaccatatggatgacattattcaatttattaaagatttggtggatcaaggttatgcatatgaaagtggtggcgatgtttactttagaacacgtaaatttgaaggttatggtaaattaagtcatcaatccatagatgacttaaaagtgggtgctcgtatagatgcaggagagcataaagaagatgcacttgattttacattgtggaaaaaagcgaagcctggcgagattagttggaatagcccatttggtgaaggtagaccaggatggcatatagaatgttctgtaatggcatttcatgagctaggacctacaattgatatacatgcgggtggttcagatttacaatttccacatcatgaaaatgaaatagcacaatcagaagcacataatcatgcgccatttgctaattattggatgcataatggtttcattaatattgataatgaaaaaatgagtaaatcactaggcaactttattttagttcacgatattattaaagaagttgatccagatgtactaagattctttatgattagcgtacattatagaagcccaattaactataatctagaattggtagaatcagcacgtagtggactagagcgtattcgcaatagttatcaattaattgaagagcgcgcacaaattgctactaatattgaaaatcaacagacatatattgatcaaattgatgcgattttaaatcgttttgaaacagttatgaatgatgattttaatacagctaatgcaattacagcttggtatgatttagcaaaacttgcgaataaatatgtactagagaacacaacatcaacagaagtaattgataaatttaaagcagtttatcaaattttcagcgatgttttaggtgtaccgttaaaatctaaaaatgcagatgaattattggatgaagatgttgaaaaattaatcgaagagcgtaatgaagcaaggaaaaacaaagattttgcacgagcagatgagattcgagacatgctgaaatcacaaaacattatattagaagacacacctcaaggggttagatttaaacgtggataa

SEQ ID NO: 414863 - DNA, 405 bp, Staphylococcus aureus; identical to SEQ ID NO: 406731

SEQ ID NO: 414864 - DNA, 747 bp, Staphylococcus aureus
gtggaagatacggttattgttggtaggcatgctgttagagaagcgattattactgggcatccgataaataagatattgattcaagaaggtattaaaaagcaacaaattaatgaaattttaaaaaatgcaaaagatcaaaaaattattgttcaaactgtaccaaaatctaaattagattttttagcaaatgcaccacatcagggtgttgcagcgcttattgcaccatatgaatatgctgacttcgatcaatttttaaaacagcaaaaagaaaaagaaggtttatcgacagtacttatattagacggcttagaagacccgcataacttgggatcaattttaagaacagccgatgcaacgggagttgatggtgttattattcctaaacgtcgttcagttacactaacgcaaacagttgcaaaagcctcaacaggtgcaattgaacatgtaccagttattcgagtgacaaatttagctaaaactatcgatgaactaaaagataatggcttttgggtagctggcactgaagctaataatgcaacagattatagaaatctagaagcggacatgtcattggctattgtaattggtagcgaaggacagggtatgagtcgcctagtaagtgataaatgcgatttttatattaagattccaatggttggacatgtaaacagtttgaatgcttcggttgcagcaagtttaatgatgtacgaagtatttcgaaaaagacatgatgttggagaaatataa

SEQ ID NO: 414865 - DNA, 525 bp, Staphylococcus aureus
atgaaagaacgttacttaatcattgatggatacaatatgataggacaatcaccaacgctaagcgccattgcaaaagagaatttagaagaagctagaatgcaattaatagatgcaattgcaaattataatgcagttatttcagatgaaattatttgtgttttcgatgcttatgaccaatcgggtgttgaaagagaatacatgtatcatggcgttaaaacgatttttaccaaggaaaaagaaacagctgatagtttcatagaacgttatgtttatgaactttatgacaagcatactaagcatattgcagttgtaacaagtgatatgagtgagcaacatgctatctttggatcaggtgcatatagaatatcatctcgcgaaatgtggagagatttaaaagaaaatgaaattgatgtgagtaaatcattagatgatataagtgaaaacaagccaagaactcgaattccgttatcttctgaaatccttgcagaatttgaaaaaatacgaagaggacatcataagaaatga

SEQ ID NO: 414866 - DNA, 570 bp, Staphylococcus aureus
ttgaaatatgatttgacaactcaagacagtacaatcaaacgtaacaattcaataaatgataaagacttcgaaaagttagtaatggatctacaaccattaattattcgacgcatcaaaacatttggatttaatcattatgatttagaagacttatatcaagaaatacttatacggatgtataggtcggtccaaacatttgattttagtggagagcagcctttcacaaattatgttcaatgtttaattacgtctgtaaagtatgattatttgagaaaatatttagctacaaataaaagaatggataatttgattaatgaatatagagttacgtatccatgtgcaataaagcgttttgatgttgaaaacaattatttgaataaattagcaattaaagagttgatttgtcagtttaagtatttgagtgcatttgaaaaagatgtcatgtatttaatgtgtgaacaatataagccgagagaaattgctcaattgatgcatgtaaaagagaaagtgatttataatgccatacaacgatgtaaaaataaaataaaacgttatttcaaaatgatttga

SEQ ID NO: 414867 - DNA, 183 bp, Staphylococcus aureus
atggctaaaaaagaaagtttctttaaaggcgttaagtctgaaatggaaaaaacaagttggccgacgaaagaagagctatttaaatatactgtaattgtagtttctactgttatattcttcttagtctttttctatgccttagatttaggaattacagcattgaaaaatttattatttggttag

SEQ ID NO: 414868 - DNA, 549 bp, Staphylococcus aureus; identical to SEQ ID NO: 406726

SEQ ID NO: 414869 - DNA, 423 bp, Staphylococcus aureus; identical to SEQ ID NO: 406725

SEQ ID NO: 414870 - DNA, 693 bp, Staphylococcus aureus; identical to SEQ ID NO: 406724

SEQ ID NO: 414871 - DNA, 501 bp, Staphylococcus aureus
atgtctgctatcattgaagctaaaaaacaactagttgatgaaattgctgaggtactatcaaattcagtttcaacagtaatcgttgactatcgtggattaacagtagctgaagttactgacttacgttcacaattacgtgaagctggtgttgagtataaagtatacaaaaacactatggtacgtcgtgcagctgaaaaagctggtatcgaaggcttagatgaattcttaacaggtcctactgctattgcaacttcaagtgaagatgctgtagctgcagcgaaagtaatttctggatttgctaaagatcatgaagcattagaaattaaatcaggtgttatggaaggcaatgttattacagcagaagaagttaaaactgttggttcattaccttcacacgatggtcttgtatctatgcttttatcagtattacaagctcctgtacgcaacttcgcttatgcggttaaagctattggagaacaaaaagaagaaaacgctgaataa

SEQ ID NO: 414872 - DNA, 369 bp, Staphylococcus aureus; identical to SEQ ID NO: 406722

SEQ ID NO: 414873 - DNA, 609 bp, Staphylococcus aureus
atgagtcattattacgatgaagatccaagtgtaattagcaatgaacaacgtattcaatatcaattaaaccatcataaaattgatttaataactgataacggagtgttttcgaaagataaagtagattatggttcagatgttcttgttcaaacttttttaaaagcgcatccacctggtccaagtaagcgaattgccgatgttggttgtggttacggaccaattggtttgatgattgctaaagtatcaccacatcattcaattacaatgctaaatgttaatcacagagcgctagccttagttgaaaaaaacaaaaaattaaatggtattgataatgtgatcgtaaaggaaagtgatgctttgtctgctgtggaagacaaaagttttgattttattttaaccaatccaccaataagagcagggaaagaaaccgtgcatcgtatattcgagcaagcattacatagattagactcgaacggtgaactattcgttgtaattcagaagaagcaaggtatgccatctgcaaagaaaagaatgaatgaactttttggaaatgtagaagtggtaaataaagataaaggatattacattctgagaagtataaaagcttga

SEQ ID NO: 414874 - DNA, 3552 bp, Staphylococcus aureus
ttggcaggtcaagttgtccaatatggaagacatcgtaaacgtagaaactacgcgagaatttcagaagtattagaattaccaaacttaatagaaattcaaactaaatcttacgagtggttcctaagagaaggtttaatcgaaatgtttagagacatttctccaattgaagattttactggtaatttgtcattagagtttgtggattaccgtttaggagaaccaaaatatgatttagaagaatctaaaaaccgtgacgctacttatgctgcacctcttcgtgtaaaagtgcgtctaatcattaaagaaacaggagaagttaaagaacaagaagtctttatgggtgatttcccattaatgactgatacaggtacgttcgttatcaatggtgcagaacgtgtaatcgtatctcaattagttcgttcaccatccgtttatttcaatgaaaaaatcgacaaaaatggtcgtgaaaactatgatgcaacaattattccaaaccgtggtgcatggttagaatatgaaacagatgctaaagatgttgtatacgtacgtattgatagaacacgtaaactaccattaacagtattgttacgtgcattaggtttctcaagtgaccaagaaattgttgaccttttaggtgacaatgaatatttacgtaatactttagagaaagacggcactgaaaacactgaacaagcgttattagaaatctatgaacgtttacgtccaggtgaaccaccaactgttgaaaatgctaaaagtctattgtattcacgtttctttgatccaaaacgctatgacttagcaagcgtgggtcgttataaaacaaacaaaaaattacatttaaaacatcgtttatttaatcaaaaattagctgagccaattgtaaatactgaaactggtgaaattgtagttgaagaaggtacagtgcttgatcgtcgtaaaatcgacgaaatcatggatgtacttgaatcaaatgcaaacagcgaagtgtttgaattgcatggtagcgttatagacgagccagtagaaattcaatcaattaaagtatatgttcctaacgatgatgaaggtcgtacgacaactgtaattggtaatgctttccctgactcagaagttaaatgcattacaccagcagatatcattgcttcaatgagttacttctttaacttattaagcggtattggatatacagatgatattgaccatttaggtaaccgtcgtttacgttctgtaggtgaattactacaaaaccaattccgtatcggtttatcaagaatggaaagagttgtacgtgaaagaatgtcaattcaagatactgagtctatcacacctcaacaattaattaatattcgacctgttattgcatctattaaagaattctttggtagctctcaattatcacaattcatggaccaagcaaacccattagctgagttaacgcataaacgtcgtctatcagcattaggacctggtggtttaacacgtgaacgtgctcaaatggaagtacgtgacgttcactactctcactatggccgtatgtgtccaattgaaacacctgagggaccaaacattggattgattaactcattatcaagttatgcacgtgtaaatgaattcggctttattgaaacaccatatcgtaaagttgatttagatacacatgctatcactgatcaaattgactatttaacagctgacgaagaagatagctatgttgtagcacaagcaaactctaaattagatgaaaatggtcgtttcatggatgatgaagttgtatgtcgtttccgtggtaacaatacagttatggctaaagaaaaaatggattatatggatgtatcgccgaagcaagttgtttcagcagcgacagcatgtattccattcttagaaaacgatgactcaaaccgtgcattgatgggtgcgaacatgcaacgtcaagcagtgcctttgatgaatccagaagcaccatttgttggaacaggtatggaacacgttgcagcacgtgattctggtgcagctattacagctaagcacagaggtcgtgttgaacatgttgaatctaatgaaattcttgtacgtcgtctagttgaagagaacggcgttgagcatgaaggtgaattagatcgctatccattagctaaatttaaacgttcaaactcaggtacatgttacaaccaacgtccaatcgttgcagttggagatgttgttgagtataacgagattttagcagatggaccatctatggaattaggagaaatggcattaggtagaaacgtagtagttggtttcatgacttgggacggttacaactatgaggatgccgttatcatgagtgaaagacttgtgaaagatgacgtgtatacttctattcatattgaagagtatgaatcagaagcacgtgatactaagttaggacctgaagaaatcacaagagatattcctaatgtttctgaaagtgcacttaagaacttagacgatcgtggtatcgtttatattggtgcagaagtaaaagatggagatattttagttggtaaagtaacgcctaaaggtgtaactgagttaactgccgaagaaagattgttacatgcaatctttggtgaaaaagcacgtgaagttagagatacttcattacgtgtacctcacggcgctggcggtatcgttcttgatgtaaaagtattcaatcgtgaagaaggcgacgatacattatcacctggtgtaaaccaattagtacgtgtatatatcgttcaaaaacgtaaaattcatgttggtgataagatgtgtggtcgacatggtaacaaaggtgtcatttctaagattgttcctgaagaagatatgccttacttaccagatggacgtccgatcgatatcatgttaaatcctcttggtgtaccatctcgtatgaacatcggacaagtattagagctacacttaggtatggctgctaaaaatcttggtattcacgttgcatcaccagtatttgacggtgcaaacgatgacgatgtatggtcaacaattgaagaagctggtatggctcgtgatggtaaaactgtactttatgatggacgtacaggtgaaccattcgataaccgtatttcagtaggtgtaatgtacatgttgaaacttgcgcacatggttgatgataaattacatgcgcgttcaacaggaccatattcacttgttacacaacaaccacttggcggtaaagcgcaattcggtggacaacgtttcggtgagatggaggtatgggcacttgaagcatatggtgctgcatacacattacaagaaatcttaacttacaaatccgatgatacagtaggacgtgtgaaaacatacgaggctattgttaaaggtgaaaacatctctagaccaagtgttccagaatcattccgagtattgatgaaagaattacaaagtttaggtttagatgtaaaagttatggatgagcaagataatgaaatcgaaatgacagacgttgatgacgatgatgttgtagaacgcaaagtagatttacaacaaaatgatgctcctgaaacacaaaaagaagttactgattaa

SEQ ID NO: 414875 - DNA, 3624 bp, Staphylococcus aureus
ttgattgatgtaaataatttccattatatgaaaataggattggcttcacctgaaaaaatccgttcttggtcttttggtgaagttaaaaaacctgaaacaatcaactaccgtacattaaaacctgaaaaagatggtctattctgtgaaagaattttcggacctacaaaagactgggaatgtagttgtggtaaatacaaacgtgttcgctacaaaggcatggtctgtgacagatgtggagttgaagtaactaaatctaaagtacgtcgtgaaagaatgggtcacattgaacttgctgctccagtttctcacatttggtatttcaaaggtataccaagtcgtatgggattattacttgacatgtcaccaagagcattagaagaggttatttactttgcttcttatgttgttgtagatccaggtccaactggtttagaaaagaaaactttattatctgaagctgaattcagagattattatgataaatacccaggtcaattcgttgcaaaaatgggtgcagaaggtattaaagatttacttgaagagattgatcttgacgaagaacttaaattgttacgcgatgagttggaatcagctactggtcaaagacttactcgtgcaattaaacgtttagaagttgttgaatcattccgtaattcaggtaacaaaccttcatggatgattttagatgtacttccaatcatcccaccagaaattcgtccaatggttcaattagatggtggacgatttgcaacaagtgacttaaacgacttataccgtcgtgtaattaatcgaaataatcgtttgaaacgtttattagatttaggtgcacctggtatcatcgttcaaaacgaaaaacgtatgttacaagaagccgttgacgctttaattgataatggtcgtcgtggtcgtccagttactggcccaggtaaccgtccattaaaatctttatctcatatgttaaaaggtaaacaaggtcgtttccgtcaaaacttacttggtaaacgtgtcgactattcaggacgttcagttattgcagtaggtccaagcttgaaaatgtaccaatgtggtttaccaaaagaaatggcacttgaactatttaaaccattcgtaatgaaagaattagttcaacgtgaaattgcaactaacattaaaaatgcgaagagtaaaatcgaacgtatggatgatgaagtttgggacgtattggaagaagtaattagagaacatcctgtattacttaaccgtgcaccaacacttcatagacttggtattcaagcatttgaaccaactttagttgaaggtcgtgcgattcgtctacatccacttgtaacaacagcttataatgctgactttgacggtgaccaaatggcggttcacgttcctttatcaaatgaggcacaagctgaagcaagaatgttgatgttagcagcacaaaacatcttgaaccctaaagatggtaaacctgtagttacaccatcacaagatatggtacttggtaactattaccttactttagaaagaaaagatgcagtaaatacaggcgcaatctttaataatacaaatgaagtattaaaagcatatgcaaatggctttgtacatttacacactagaattggtgtacatgcaagttcgttcaataatccaacatttactgaagaacaaaacaaaaagattcttgctacgtcagtaggtaaaattatattcaatgaaatcattccagattcatttgcttatattaatgaacctacgcaagaaaacttagaaagaaagacaccaaacagatatttcatcgatcctacaactttaggtgaaggtggattaaaagaatactttgaaaatgaagaattaattgaacctttcaacaaaaaattcttaggtaatattattgcagaagtattcaacagatttagcatcactgatacatcaatgatgttagaccgtatgaaagacttaggattcaaattctcatctaaagctggtattacagtaggtgttgctgatatcgtagtattacctgataagcaacaaatacttgatgagcatgaaaaattagtcgacagaattacaaaacaattcaaccgtggtttaatcactgaagaagaaagatataatgcagttgttgaaatttggacagatgcaaaagatcaaattcaaggtgaattgatgcaatcacttgataaaactaacccaatcttcatgatgagtgattcaggtgcccgtggtaacgcatctaactttacacagttagcaggtatgcgtggattgatggccgcaccatctggtaagattatcgaattaccaatcacatcttcattccgtgaaggtttaacagtacttgaatacttcatctcaactcacggtgcacgtaaaggtcttgccgatacagcacttaaaacagctgactcaggatatcttactcgtcgtcttgttgacgtggcacaagatgttattgttcgtgaagaagactgtggtactgatagaggtttattagtttctgatattaaagaaggtacagaaatgattgaaccatttatcgaacgtattgaaggtcgttattctaaagaaacaattcgtcatcctgaaactgatgaaataatcattcgtcctgatgaattaattacacctgaaattgctaagaaaattacagatgctggtattgaacaaatgtatattcgctcagcatttacttgtaacgcacgacatggtgtttgtgaaaaatgttacggtaaaaaccttgctactggtgaaaaagttgaagttggtgaagcagttggtacaattgcagcccaatctatcggtgaaccaggtacacagcttacaatgcgtacattccatacaggtggggtagcaggtagcgatatcacacaaggtcttcctcgtattcaagagattttcgaagcacgtaaccctaaaggtcaagcggtaattacggaaatcgaaggtgtcgtagaagatattaaattagcaaaagatagacaacaagaaattgttgttaaaggtgctaatgaaacaagatcataccttgcttcaggtacttcaagaattattgtagaaatcggtcaaccagttcaacgtggtgaagtattaactgaaggttctattgaacctaagaattacttatctgttgctggattaaacgcgactgaaagctacttattaaaagaagtacaaaaagtttaccgtatgcaaggtgtagaaatcgacgataaacacgttgaggttatggttcgacaaatgttacgtaaagttagaattatcgaagcaggtgatacgaagttattaccaggttcattagttgatattcataactttacagatgcaaatagagaagcatttaaacaccgtaagcgtcctgcaacagctaaaccagtattacttggtattactaaagcatcacttgaaacagaaagtttcttatctgcagcatcattccaagaaacaacaagagttcttacagatgcagcaattaaaggtaagcgtgatgacttattaggtcttaaagaaaacgtaattattggtaagttaattccagctggtactggtatgagacgttatagcgacgtaaaatacgaaaaaacagctaaaccagttgcagaagttgaatctcaaactgaagtaacggaataa

SEQ ID NO: 414876 - DNA, 255 bp, Staphylococcus aureus; identical to SEQ ID NO: 406718

SEQ ID NO: 414877 - DNA, 414 bp, Staphylococcus aureus; identical to SEQ ID NO: 406717

SEQ ID NO: 414878 - DNA, 471 bp, Staphylococcus aureus
atgcctcgtaaaggatcagtacctaaaagagacgtattaccagatccaattcataactctaagttagtaactaaattaattaacaaaattatgttagatggtaaacgtggaacagcacaaagaattctttattcagcattcgacctagttgaacaacgcagtggtcgtgatgcattagaagtattcgaagaagcaatcaacaacattatgccagtattagaagttaaagctcgtcgtgtaggtggttctaactatcaagtaccagtagaagttcgtccagagcgtcgtactactttaggtttacgttggttagttaactatgcacgtcttcgtggtgaaaaaacgatggaagatcgtttagctaacgaaattttagatgcagcaaataatacaggtggtgccgttaagaaacgtgaggacactcacaaaatggctgaagcaaacaaagcatttgctcactaccgttggtaa

SEQ ID NO: 414879 - DNA, 2082 bp, Staphylococcus aureus
atggctagagaattttcattagaaaaaactcgtaatatcggtatcatggctcacattgatgctggtaaaacgactacgactgaacgtattctttattacactggccgtatccacaaaattggtgaaacacacgaaggtgcttcacaaatggactggatggagcaagaacaagaccgtggtattactatcacatctgctgcaacaacagcagcttgggaaggtcaccgtgtaaacattatcgatacacctggacacgtagacttcactgtagaagttgaacgttcattacgtgtacttgacggagcagttacagtacttgatgcacaatcaggtgttgaaccacaaactgaaacagtttggcgtcaggctacaacttatggtgttccacgtatcgtatttgtaaacaaaatggacaaattaggtgctaacttcgaatactctgtaagtacattacatgatcgtttacaagctaacgctgctccaatccaattaccaattggtgcggaagacgaattcgaagcaatcattgacttagttgaaatgaaatgtttcaaatatacaaatgatttaggtactgaaattgaagaaattgaaattcctgaagaccacttagatagagctgaagaagctcgtgctagcttaatcgaagcagttgcagaaactagcgacgaattaatggaaaaatatcttggtgacgaagaaatttcagtttctgaattaaaagaagctatccgccaagctactactaacgtagaattctacccagtactttgtggtacagctttcaaaaacaaaggtgttcaattaatgcttgacgctgtaattgattacttaccttcaccactagacgttaaaccaattattggtcaccgtgctagcaaccctgaagaagaagtaatcgcgaaagcagacgattcagctgaattcgctgcattagcgttcaaagttatgactgacccttatgttggtaaattaacattcttccgtgtgtattcaggtacaatgacatctggttcatacgttaagaactctactaaaggtaaacgtgaacgtgtaggtcgtttattacaaatgcacgctaactcacgtcaagaaatcgatactgtatactctggagatatcgcggctgcggtaggtcttaaagatacaggtactggtgatactttatgtggtgagaaaaatgacattatcttggaatcaatggaattcccagagccagttattcacttatcagtagagccaaaatctaaagctgaccaagataaaatgactcaagctttagttaaattacaagaagaagacccaacattccatgcacacactgacgaagaaactggacaagttatcatcggtggtatgggtgagcttcacttagacatcttagtagaccgtatgaagaaagaattcaacgttgaatgtaacgtaggtgctccaatggtttcatatcgtgaaacattcaaatcatctgcacaagttcaaggtaaattctctcgtcaatctggtggtcgtggtcaatacggtgatgttcacattgaattcacaccaaacgaaacaggcgcaggtttcgaattcgaaaacgctatcgttggtggtgtagttcctcgtgaatacattccatcagtagaagctggtcttaaagatgctatggaaaatggtgtcttagcaggttatcctttaattgatgttaaagctaaattatatgatggttcataccatgatgtcgattcatctgaaatggccttcaaaattgctgcatcattagcacttaaagaagctgctaaaaaatgtgatcctgtaatcttagaaccaatgatgaaagtaactattgaaatgcctgaagagtacatgggtgatatcatgggtgacgtaacatctcgtcgtggacgtgttgatggtatggaacctcgtggtaatgcacaagttgttaatgcttatgtaccactttcagaaatgttcggttatgcaacatcattacgttcaaacactcaaggtcgcggtacttacactatgtacttcgatcactatgctgaagttccaaaatcaatcgctgaagatattatcaagaaaaataaaggtgaataa

SEQ ID NO: 414880 - DNA, 1185 bp, Staphylococcus aureus
atggcaaaagaaaaattcgatcgttctaaagaacatgccaatatcggtactatcggtcacgttgaccatggtaaaacaacattaacagcagcaatcgctactgtattagcaaaaaatggtgactcagttgcacaatcatatgacatgattgacaacgctccagaagaaaaagaacgtggtatcacaatcaatacttctcacattgagtaccaaactgacaaacgtcactacgctcacgttgactgcccaggacacgctgactacgttaaaaacatgatcactggtgctgctcaaatggacggcggtatcttagtagtatctgctgctgacggtccaatgccacaaactcgtgaacacattcttttatcacgtaacgttggtgtaccagcattagtagtattcttaaacaaagttgacatggttgacgatgaagaattattagaattagtagaaatggaagttcgtgacttattaagcgaatatgacttcccaggtgacgatgtacctgtaatcgctggttcagcattaaaagctttagaaggcgatgctcaatacgaagaaaaaatcttagaattaatggaagctgtagatacttacattccaactccagaacgtgattctgacaaaccattcatgatgccagttgaggacgtattctcaatcactggtcgtggtactgttgctacaggccgtgttgaacgtggtcaaatcaaagttggtgaagaagttgaaatcatcggtttacatgacacatctaaaacaactgttacaggtgttgaaatgttccgtaaattattagactacgctgaagctggtgacaacattggtgcattattacgtggtgttgctcgtgaagacgtacaacgtggtcaagtattagctgctcctggttcaattacaccacatactgaatttaaagcagaagtatacgtattatcaaaagacgaaggtggacgtcacactccattcttctcaaactatcgtccacaattctatttccgtactactgacgtaactggtgttgttcacttaccagaaggtactgaaatggtaatgcctggtgataacgttgaaatgacagtagaattaatcgctccaatcgcgattgaagacggtactcgtttctcaatccgcgaaggtggacgtactgtaggatcaggcgttgttactgaaatcattaaataa

SEQ ID NO: 414881 - DNA, 1176 bp, Staphylococcus aureus
gtgttagattggttccaactagcaaataataaagaaaataaaacaattcaactcagacgttatttacaccaatatcctgagttatcttttgaagaatttcaaacacatgattatattgttaaccaattaagccagttatcttgtgatattgaaactcctatcggccgcaatggtatcaaagccacatttaaaggcttgggcacaggacctaccattgcattaagagctgactttgatgcgttacctgtcgaggaattaaacgatgtgccttataagtctaaaaatccaggatgtatgcatgcgtgtgggcatgatggtcatacagcaattttacttactgtagcagagattttagatgaacataaacatttattagaaggtaatgttgtattaatattccagtacggtgaagaaatcatgccaggtggttctcaagaaatgatagatgctggatgtctggaaaatgtagatagaatttacggtacacatttatggagtggttatcctactggaactattcattcacgtgcgggggcaatcatggcctctccagatgaatttagcgtcacaattaaaggtcgtggtggtcatggtgccaaacctcatgaaaccattgacccaatagtaatcatggcagagttcattttaagtgcacaaaaaataatttcacgtacgatcgatccagttaaacaagctgtactttcatttggaatgattcaagcaggtaccacagatagcgttattcctgatcaagcattttgtaaaggtacagttagaactttcgattcagatatacagaatcatgtaatggacaaaatggataagcttctacaaggtttagcaatagcaaatgatattaactatgatttgaattatattaaagggtatttgcctgtccataataacgagaaagcatatcaagttattaaagaagcaacaaatgacttacatgtacgctttaatgaatcagatttaatgatgattggagaagatttttcacattatttgaaagtacgaccaggtgcattctttctgactggttgtggtaatgaaagtaaaggtattacagcgccacaccataatcccaaatttgatattgatgaaaaatcattaaaatacgctgtagctgtatttttaaaaatcattgaattagagcaagtatttaaaacaaattaa

SEQ ID NO: 414882 - DNA, 1188 bp, Staphylococcus aureus; identical to SEQ ID NO: 408159

SEQ ID NO: 414883 - DNA, 879 bp, Staphylococcus aureus; identical to SEQ ID NO: 408158

SEQ ID NO: 414884 - DNA, 1638 bp, Staphylococcus aureus
atgtcgtatagcattggaattgattatggaactgcttcaggccgtgtgtttttaattaatacaactaacggtcaagtagtatcaaaatttgtgaaaccatatacacatggtgtcattgaaagtgaattaaatggtttgaaaataccacatacatatgcacttcaaaatagtaatgattatttagaaattatggaagaaggaatatcatatatagtacgtgaatcaaaaatagatccagtcaatatagtaggtattggtatagactttacttcatctactattatttttactgacgaaaaccttaacccggtacataatttaaaacaatttaaaaacaatccacatgcgtatgtgaaactttggaaacatcatggtgcatataaagaagcagagaaattatatcaaactgctattgaaaataataataagtggttaggccattatggatataatgttagtagtgaatggatgattcccaaaataatggaagtcatgaatcgagcaccagaaattatggaaaaaacggcttatattatggaagcgggcgattggattgtaaataaattaactaataaaaatgtacgctcgaattgtggattaggtttcaaagcattttgggaagaagaaacagggtttcattatgatttatttgataaaatagaccccaaattatcaaaagtaattcaagataaagtatctgcaccggttgttaatattggtgaagtagtagggaaactggacgataaaatggcacagaaattaggattatcaaaagagactatggtaagtccttttattattgatgcccatgctagtttattaggtattgggtctgaaaaagataaagaaatgactatggtgatgggaacaagcacatgccatcttatgttaaatgaaaagcaacatcaagtgccaggtatatcaggttctgtaaaaggagcaattattccagaattatttgcttatgaagcggggcaatcagcagtaggtgatttgtttgagtatgtcgctaagcaagcaccaaagtcatatgtagatgaagcagcaaatagaaatatgactgtatttgaattaatgaatgaaaagataaaacatcaaatgccaggtgaaagtgggctcattgctcttgattggcataatggaaatcgaagtgtattaagtgatagcaatttaacaggttgtatctttggattaactttacaaactaagcatgaggatatttatagagcatatttagaagctacagcatttggtactaagatgattatgcaacagtatcaagattggcatatggaagtagaaaaggtatttgcatgtggcggtatacctaaaaagaatgctgttatgatggatatctatgcgaatgtactgaataaaaaactaattgttatggatagtgagtatgcaccagcaataggcgcagcaatattaggtgcagtcagtggtggcgcacataattcaattaatgatgcagttgatgctatgaaagagccaattttatacgaaattaatccagaagcggaaaaagtacaaaggtatgaaacattatttaaagcttataaggctttacatgatatccatggttataaaaaagctaatataatgaaagatatccagagtttaagagttgagggataa

SEQ ID NO: 414885 - DNA, 966 bp, Staphylococcus aureus
atgaaaaaaattatgattactggtgcattaggacaaattggtacagaattagttgttaagtgcagagaaatttatgggacagataatgttcttgctacagatattagggaacctgaagcagactcacctgtacaaaatggaccatttgaaattttagacgtaacagatcgtgaccgcatgtttgagttagttagggactttgaagcggatagtctaatgcatatggcagcattattatcagcaactgcagagaaaaatccaattctagcttgggatttaaatatgggtggattaatgaatgcattagaagctgcaagaacttataatttgcactttttcacaccaagttcaattggtgcatttggagactcaactcctaaagttaatacgccacaagtaacgattcagcaacctacgacaatgtatggtgtaaataaagtagctggagaattattgtgtcaatactatttcaaacgttttggtgtagatacaagaagtgttagattcccaggtttaatctcgcatgttaaagagccaggtggcggtactacagactatgctgttgaaatatacttcaaagcagtaagagagggtcattatacaagcttcatagataaaggcacgtatatggatatgatgtatatggatgatgcaattgaagcaattattaaacttatggaagcagacgacgctaaattagaaactagaaacggttataatttgagcgcaatgagttttgatccagagatggtaaaagaagcaattcaagaatactatccaaattttacattagattatgatgttgatcctattagacaaggtatcgctaatagttggccggattctattgatacaagctgttcacgtggcgaatggggatttgatcctaaatatgatttagcgagcatgactaaattaatgttagaagctattgaacaaaaagatactgttaaaaataataactaa

SEQ ID NO: 414886 - DNA, 1077 bp, Staphylococcus aureus
atgtcacaagcagttaaagttgaacgacgagaaacattaaaacaaaaaccaaatacatctcaactaggttttggtaaatattttactgattatatgttgagttatgattatgatgcagataaaggatggcatgatttgaagatagtaccttatggtcctattgaaatttcacctgctgcacaaggtgttcattatggtcaatcggtattcgaaggattaaaagcatataaaagagatggggaagttgcacttttccgtcctgaagaaaattttaagcgtcttaataactcgttagcacgattagaaatgcctcaagtagacgaagcagaattgttagaggggctaaaacaattagttgatatagaaagagattggattcctgaaggggaaggtcaatcattatatattcgtccatttgtttttgcaacagaaggggcacttggcgttggtgcatcacatcagtataaattattaattattttatctccttcaggtgcatattatggtggtgagactttaaaaccaactaaaatctatgtagaagatgaatatgtgcgtgctgttcgtggcggtgtaggctttgcaaaagttgcaggtaactatgcggcaagtttattagcacaaacaaatgcaaataaattaggttatgaccaagtattatggcttgatggtgttgaacagaaatatatcgaagaagttggtagcatgaatattttcttcgttgaaaatggaaaagtaattacaccagagttgaatggcagtattttacctggtattacacgtaaatctattatcgaattagctaaaaacttaggatatgaagtcgaagagcgccgcgtttcaatcgatgaattattcgaatcatatgataaaggtgagttaacagaagtatttggtagtggtactgcagcagttatttcacctgtgggtacattgagatacgaagatcgtgaaatcgttattaataataatgagactggtgaaattactcaaaaattatacgacgtctatactggtattcaaaatggtactttagaagataaaaatggttggagagtcgttgtaccaaaatattaa

SEQ ID NO: 414887 - DNA, 684 bp, Staphylococcus aureus; identical to SEQ ID NO: 408156

SEQ ID NO: 414888 - DNA, 663 bp, Staphylococcus aureus
atgaataattacggtattccacaaaatgccattataaccattgcaggtacagttggtgttggaaaatcaacactaacgcaagcacttgcagataaattaaactttaaaacgtcttttgaaaatgtcgaacataatccatatttagataaattttatagcgattttgaacgatggagtttccatttgcaaatttacttcttagctgaacgttttaaagaacaaaagcgtatgtttgaatatggtggtggctttgtccaagatcgatcaatttatgaagatgttgatatttttgcaaaaatgcatgaagaagaaggcacaatgagtaaagaagatttcaaaacatattcagacttatttaatgccatggtcatgacaccttattttcctaaaccagatgtaatgatttatttagaatgtaactatgatgaggtcattgatcgtattattgaacgtggtcgcgaaatggaaattaatacagaccctgaatactggaaaaagctatttaaacgctatgacgattggattaatagctttaatgcatgtccagttgtacgtatcaatattaatgaatatgatatccataaggaccccgaatctttaaatcctatgatagacaaaattgctcgaattattcaaacatatcgacaagtagatacacgataa

SEQ ID NO: 414889 - DNA, 618 bp, Staphylococcus aureus
atgaacaaaccttttatagcaattgaaggtcctattggcgtaggtaaatcttcacttgcacacaaattaagtcaaactttagatttttatgaagaaaaagaaatcatcacagaaaatccatttttatcagacttttatgaagatatctctaaatggagttttcaaactgaaatgttctttttatgcaatagatataagcaatttcaagatgtaacacaactaaatcaaggtgtagttagtgattatcatatacataaaaataagatatttgctaaaaatactttgagtcctgttgaatttcagaaattcagtaaaatttatgatattttaactgaagatatgattatgccgaatatgattatctttttagatgcagaccttgatgtgttaaaatctagaattgctaaacgtaaccgtagttttgagcatcaaatagaagatgaatatctgttaaagttaaaaaaagattatcgtgagtattatgagtccttacaaagtaatggttcaaatgtagttttaatcgatacaacttctattgattttcttaaaaatgaacaagattacgaagatatattacatattatattacctatgataggagatattaccaatgaataa

SEQ ID NO: 414890 - DNA, 471 bp, Staphylococcus aureus; identical to SEQ ID NO: 406704

SEQ ID NO: 414891 - DNA, 870 bp, Staphylococcus aureus
atgataaaactaatagccactgatatggatggcacgctacttaatgcagcacatgaaatttctcaacctaatattgatgcgattaaatacgctcaagaacaagggataacggttgttatcgcgacaggtcgagcattttatgaagcacaagcaccagttgctgacacagatttaacagtaccatatatttgtttgaatggtgctgaagtacgtgatgaaactttcaatgtaatgagcacttcacaccttaataaatcgttagtacacaaaattacaaatgttttaaaagatgcaggtatttattatcaagtatacacgagtcgtgcgatttatactgaagatccacaaagagatttagacatttacatagatattgctgagcgtgcaggtcaacatgcaaacgttgagcgtattaaaaatggtattcaaagacgcatagataatggtacgttgaaagttgttgataattatgatgctattgaaaacatacctggtgaattaattatgaaaatattagcatttgatggaaatttagaaaaaattgacaaagctagtaaaattttagctgaatctccgaatttagctatatcatcatcttcgagaggaaatatagaaataacgcattcagatgcacaaaaaggtattgcgctagaaacaattgccgaaagattagggattgaaatgaaagatgtcatggcaataggtgacaatttaaatgacttatcaatgttagagaaagttggctatccagttgcgatggaaaatggtgcagaagaagttaaaaaaatagcgaaatatgtcacagatacgaatgaaaatagtggtgttggaaaagctattatgaaattattacgtgaacaacaagtttaa

SEQ ID NO: 414892 - DNA, 567 bp, Staphylococcus aureus; identical to SEQ ID NO: 406702

SEQ ID NO: 414893 - DNA, 984 bp, Staphylococcus aureus
atgcaaaatcaatattttacagtgcaagaaaattacaaagaaagattttatcaaatccctaaagtattctttaccagtgaaaattataaaaatctaactaatgatatgaaaatagcctatgctatcttacgtgatcgcttaaatttatctattaaaaatagctgggttgatgaagatggtaacatttactttgtttattcaaatgaaaagctaatggaaatcttaaattgtaaaaaagaaaagttaacaaaaataaaaaaagggttagaaaacgatggtctactcattcaaaaacgacgtggtttaaataaaccaaatattctatatttaatgaaacctattgtcacagaacgtgatatttacaaaatagaaaaagaagaaaacgatgttgaaccttacggcgagaaggacgttcgattttcgaacgtccagaagttcgaaaatcgaacgtccagaagttcgaaaatcgaacgtccagaagttcgaaaatcgaacactaatgatactgactttaatgacattgactttaatgatactgagaataatgatatgaatgacttgaatgatataaagtacaaaaatgaaattagtaatcattcaaatcattcaaatcaatttacacataattttgatgataaagaaatgctattgcaagaattcccagaacaactaactaattatttattaaaatatgattatagagatttagaaatcataaaggctgttattcttaaagcaaaaaaatcatttaattcaaggcatgaagatatgcattacatgttagaggacattgaggatgaaatattaacttctttaaaaagacttaaaaaagctatacatgataggggagttaaaggccaaaaggaaacaatcaagtcaatgcaagcttatttaatgcaaacaattctaactgaacttgaagaaacacatgccctttatatgcgccgtaaaaacatgaaacaatataatatctttaatcaataa

SEQ ID NO: 414894 - DNA, 789 bp, Staphylococcus aureus; identical to SEQ ID NO: 408560

SEQ ID NO: 414895 - DNA, 420 bp, Staphylococcus aureus
atgattaaaggaataaatcatattacttattcggtttctaatatagctaaatcaattgaattttacagagatattttaggggctgacattttagttgaaagtgagacctcggcctattttaatttaggtggtatatggttagctttgaacgaagaaaaaaatattcctagaagcgaaattaaatattcgtatactcatatagcatttacaatttcagataacgattttgaagattggtatatctggttgaaagaaaatgaagtaaatattcttgaaggtagagatagagatattagagataaaaaatcaatatatttcactgatttagatggccataaattagaattgcatacaggaagtttagaagatagattgagttattataaagaggctaaacctcatatgaatttttatatttaa

SEQ ID NO: 414896 - DNA, 276 bp, Staphylococcus aureus
ttgaacgaagaaaaaaatattcctagaagcgaaattaaatattcgtatactcatatagcatttacaatttcagataacgattttgaagattggtatatctggttgaaagaaaatgaagtaaatattcttgaaggtagagatagagatattagagataaaaaatcaatatatttcactgatttagatggccataaattagaattgcatacaggaagtttagaagatagattgagttattataaagaggctaaacctcatatgaatttttatatttaa

SEQ ID NO: 414897 - DNA, 999 bp, Staphylococcus aureus
atgcatttttatactacaggatatatagacgaaaatcaagataatgaaacattaaaagatatgactaaaagtgggaaacaacgcccatggaaagaaaagaaaattgataatgtgagccttgcagatatactggaaattttgaaaattaaaaaggcttttaacgtaaaacaatgtggtaacgtcttagagttcaagccgactgatgaaggttatttgaagttacataagacatggttttgtaaatcaaaattatgcccagtttgtaattggaggcgtgctatgaaaaatagttatcaagctcaaagagtaattggagaagtggttaaagaaaagccgaaagcgcgttggttgtttttaactctttcaacaagaaatgcgatagacggagatactttagaacaaagtttaaaacatttaacaaaagcttttcatagattaactaaatacaaaaaagttagtaagaatttagttggttttatgcgttcaactgaagttacagttaatgagaatgacggaagttataatcaacatatgcatgttttgttatgtgttgaaaatgcgtattttagaaaaaaagaaaattatattacgcagactgaatgggtcgatttatggcaaaaagcattacaagtaaattatcgacccgtagcaaatatcaaagcgatcaaaccaaataaaaaaggcgataaagatattcaagcagcaatcaaagagacttcaaaatactcggttaagtcatctgattttttaactgatgatgacgaaaaaaatcaagaaattgtaaatgatttagaaaaaggtttataccgaaaacgtatgttgagttacggtggtttacttaaacaaaaacataaacttttaaatttagacgatgccgaagaaggtaatttaattcaaacgagcgatgaagaaaaaacgaccgaagaagaacaaaaagcccattcaattacggctatttggaattttgaaaaacaaaattatttcttaaaaaatttgtaa

SEQ ID NO: 414898 - DNA, 720 bp, Staphylococcus aureus
atgaaaaatagttatcaagctcaaagagtaattggagaagcggttaaagaaaagccgaaagcgcgttggttgtttttaactctttcaacaagaaatgcgatagacggagatactttagaacaaagtttaaaacatttaacaaaagcttttcatagattaactaaatacaaaaaagttagtaagaatttagttggttttatgcgttcaactgaagttacagttaatgagaatgacggaagttataatcaacatatgcatgttttgttatgtgttgaaaatgcgtattttagaaaaaaagaaaattatattacgcagactgaatgggtcgatttatggcaaaaagcattacaagtaaattatcgacccgtagcaaatatcaaagcgatcaaaccaaataaaaaaggcgataaagatattcaagcagcaatcaaagagacttcaaaatactcggttaagtcatctgattttttaactgatgatgacgaaaaaaatcaagaaattgtaaatgatttagaaaaaggtttataccgaaaacgtatgttgagttacggtggtttacttaaacaaaaacataaacttttaaatttagacgatgccgaagaaggtaatttaattcaaacgagcgatgaagaaaaaacgaccgaagaagaacaaaaagcccattcaattacggctatttggaattttgaaaaacaaaattatttcttaaaaaatttgtaa

SEQ ID NO: 414899 - DNA, 999 bp, Staphylococcus aureus
atgcatttttatactacaggatatatagacgaaaatcaagataatgaaacattaaaagatatgactaaaagcgggaaacaacgcccatggaaagaaaagaaaattgataatgtgagctatgcagatatactggaaattttgaaaattaaaaaggcttttaacgtaaaacaatgtggtaacgtcttagagttcaagccgactgatgaaggttatttgaagttacataagacatggttttgtaaatcaaaattatgcccagtttgtaattggaggcgtgctatgaaaaatagttatcaagctcaaagagtaattggagaagtggttaaagaaaagccgaaagcgcgttggttgtttttaactctttcaacaagaaatgcgatagacggagatactttagaacaaagtttaaaacatttaacaaaagcttttcatagattaactaaatacaaaaaagttagtaagaatttagttggttttatgcgttcaactgaagttacagttaatgagaatgacggaagttataatcaacatatgcatgttttgttatgtgttgaaaatgcgtattttagaaaaaaagaaaattatattacgcagactgaatgggtcgatttatggcaaaaagcattacaagtaaattatcgacccgtagcaaatatcaaagcgatcaaaccaaataaaaaaggcgataaagatattcaagcagcaatcaaagagacttcaaaatactcggttaagtcatctgattttttaactgatgatgacgaaaaaaatcaagaaattgtaaatgatttagaaaaaggtttataccgaaaacgtatgttgagttacggtggtttacttaaacaaaaacataaacttttaaatttagacgatgccgaagaaggtaatttaattcaaacgagcgatgaagaaaaaacgaccgaagaagaacaaaaagcccattcaattacggctatttggaattttgaaaaacaaaattatttcttaaaaaatttgtaa

SEQ ID NO: 414900 - DNA, 720 bp, Staphylococcus aureus
atgaaaaatagttatcaagctcaaagagtaattggagaagtggttaaagaaaagccgaaagcgcgttggttgtttttaactctttcaacaagaaatgcgatagacggagatactttagaacaaagtttaaaacatttaacaaaagcttttcatagattaactaaatacaaaaaagttagtaagaatttagttggttttatgcgttcaactgaagttacagttaatgagaatgacggaagttataatcaacatatgcatgttttgttatgtgttgaaaatgcgtattttagaaaaaaagaaaattatattacgcagactgaatgggtcgatttatggcaaaaagcattacaagtaaattatcgacccgtagcaaatatcaaagcgatcaaaccaaataaaaaaggcgataaagatattcaagcagcaatcaaagagacttcaaaatcctcggttaagtcatctgattttttaactgatgatgacgaaaaaaatcaagaaattgtaaatgatttagaaaaaggtttataccgaaaacgtatgttgagttacggtggtttacttaaacaaaaacataaacttttaaatttagacgatgccgaagaaggtaatttaattcaaacgagcgatgaagaaaaaacgaccgaagaagaacaaaaagcccattcaattacggctatttggaattttgaaaaacaaaattatttcttaaaaaatttgtaa

SEQ ID NO: 414901 - DNA, 408 bp, Staphylococcus aureus
ttgggaatattaaagaaagaaaatattaagtccttatttaaagacgaagtgatgcaatattttctatcaaacagaaagatttatcctaatatatttcccgaatttaaggtagaggggaaatctaagttaatccatagtttcgaagcagtatttccaggagaagctacagagtatgttaaaacaattaaacgaatcgataaaaacaatgcaaaaaatgtccttttcgattggaatgatgttgaaatacatagaaataaaaattttgattctaatgctagacttaatatcattacagaacaacaagatgatattagcgaagcagtatcaacaatgttgtctcaatataatgtagaggtattttcatttgaaaacaaaaaacaacttgaagaaaagtttagtaacgtataa

SEQ ID NO: 414902 - DNA, 276 bp, Staphylococcus aureus; identical to SEQ ID NO: 414896

SEQ ID NO: 414903 - DNA, 171 bp, Staphylococcus aureus; identical to SEQ ID NO: 409574

SEQ ID NO: 414904 - DNA, 969 bp, Staphylococcus aureus; identical to SEQ ID NO: 408570

SEQ ID NO: 414905 - DNA, 390 bp, Staphylococcus aureus
atgatgattaaaaaacttaaaaatatggattggttcgatatctttattgctggaatactgcgattattcggcgtaatcgcactgatgcttgttgtcatatcgcctatctatacagtggctagttaccaaaacaaagaagtacatcaagggacaattacagataaatataacaagagacaagataaagaagacaagttctatattgtattagacaacaaacaagtcattgaaaactccgacttattattcaaaaagaaatttgatagcgcagacatacaagctaggttaaaagtaggcgacaaagtagaagttaagacgattggatatagaatacactttttaaatttatatccggtcttatacgaagcaaagaaggtagataaacaatga

SEQ ID NO: 414906 - DNA, 1164 bp, Staphylococcus aureus
atgccgacattatatgaattaaaacaatccttaggtatgattggacaacaattaaaaaataaaaatgatgaattgagtcagaaagcaacagatccaaatattgatatggaagacatcaaacaactagaaacagaaaaagcaggtttacaacaaagatttaacattgttgaaagacaagtgcaagacattgaagagaaagaaaaagcgaaagttaaagataaaggagaagcttatcaatctttaagtgataatgagaagatggttaaagctaaggcagagttttatcgtcacgcgattttaccaaatgaatttgaaaaaccttcaatggaggcacaacgtttattacacgctttaccaacaggaaatgattcaggtggagataagctcttaccaaaaacactttctaaagaaattgtttcagaaccatttgctaaaaaccaattacgtgaaaaagctcgtctaactaacattaaaggtttagagattccaagagtttcatacactttagacgatgatgatttcattacagacgtagaaacagcaaaagaattaaaagcaaaaggtgatacagtcaagttcactactaataaattcaaagtatttgctgcaatttcagatactgtaattcatggatcagatgtagatttagtaaactgggttgaaaacgcactacaatcaggtctagcagctaaagaacgtaaagatgccttagcagtaagtcctaaatctggattagatcacatgtcattttacaatggatctgttaaagaagttgagggagcagacatgtatgatgctattattaacgctttagcagatttacatgaagattaccgtgataacgcaacaatttatatgcgatatgcggattatgtcaaaattattagtgttctttcaaatggaacaacaaatttctttgacacaccagcagaaaaagtatttggcaaaccagtagtatttacagatgcagcagttaaacctattgtgggagatttcaattattttggaattaactatgatgggacaacttatgacactgataaagatgttaaaaaaggcgaatatttgtttgtattaactgcatggtatgatcagcaacgtacattagacagtgcattcagaattgcaaaagcaaaagaaaatacaggttcattacccagctaa

SEQ ID NO: 414907 - DNA, 432 bp, Staphylococcus aureus
ttgttaaaaggtcatgtttataatggtattagtggcggtcaatttaaagatttaccaccaatggaacaagtatttgatacattggatttagataaatctagaccacaaactattgtgatggatcaaaatgatgacaaacgttcattatcttttgtaaattattcagatcaaattgaggcgattaaacaattggctgaagacttacaaaaagaattaggtgccaaatatacgccaacttcaattttatactttaatcctaaaaatgaaggcgatgtaacgatttcaaattataatcaaaatagtgctgtcaaagtgcttgtcggtgctgaacaattagacgagttctttaacaaatttgtattccatggtcgtattcaatacaacgtggaagacttacaacaaatgatggataaaattgaatcattcaattaa

SEQ ID NO: 414908 - DNA, 4500 bp, Staphylococcus aureus
atgcacaatgagaaattaattaaaggcttatatgactatcgtgaggaacatgatgcgtgtggtattggtttttatgcgaatatggataataaaaggtctcacgacatcattgataaatcgcttgaaatgttgcgacgcttagatcacaggggcggggtcggcgcagatggcatcactggtgatggcgcaggtattatgactgaaataccttttgcatttttcaaacaacatgtaacggactttgatatcccaggtgaaggtgaatatgccgtggggttatttttttccaaagaacgcattttaggttctgaacatgaagcagtttttaaaaaatattttgaaggcgaagggttatcaattcttggttatcgtaatgtaccagttaataaagatgccattgctaaacatgtagcagatacgatgccagtcattcaacaagtgtttattgatattaggggcattgaagatgttgaaaagcgtttgtttttagcgagaaaacaattagagttctattcgactcagtgcgatttagaattgtattttacgagcttatcacgcaaaacaattgtatataaaggttggttacgatcagaccaaattaaaaaactatatacagatttatcggatgatttatatcaatcaaagctagggttagtgcattcgagatttagtacgaatacattcccgagttggaaaagggcacatcctaaccgtatgttaatgcataatggtgagattaacacgattaaaggtaatgtaaactggatgcgagcacgccaacataaattaatcgaaacattatttggcgaggatcaacataaagtgtttcaaattgtcgatgaggatggtagtgactctgctattgtagataatgcgctagagttcttatcgttagccatggagccagaaaaggcagcgatgctactcatacctgaaccttggttatacaatgaagcgaatgatgcaaatgtacgtgcgttttatgaattttatagttatttaatggaaccgtgggatggtcctacaatgatttcgttctgtaacggtgacaaacttggcgcgcttacagatagaaatggattacgtccaggtcgttatacgattactaaagataactttattgtcttttcatctgaagtgggtgttgtggacgtacctgaaagtaatgttgcttttaaaggtcaattgaatcctggaaagttattgcttgttgattttaaacagaataaagtcattgaaaataatgatttaaaaggtgcgattgctggagaattaccatataaagcgtggattgataaccataaagttgactttgattttgaaaatatacaatatcaagattcgcaatggaaagatgagacgttatttaaattacaacgtcagtttgcatacacgaaagaagagattcataagtatattcaggaacttgtagaaggtaagaaggatcctatcggtgcaatgggatatgatgcgccaattgcagtgttgaacgagcgaccagaatcactatttaattactttaaacagctgtttgcacaagttacgaatccaccaattgatgcgtatcgtgaaaaaatcgtaacgagtgaactttcttatttaggtggcgaaggtaacttactagcacctgacgaaacggttttagatcgtattcaattgaaaaggccggtattgaatgaatcacacttagcagcgattgatcaggaacattttaaattaacttatttatcaacggtatatgaaggggatttggaagatgcgttagaagcattaggccgagaagcagtgaatgctgtaaagcaaggcgctcaaattctagtgttagatgacagtggattagttgatagcaatggctttgcaatgccgatgttactcgcaataagtcatgtgcatcaattacttattaaagcagatttacgtatgtctacaagtttagtcgctaaatctggtgagacacgagaagtgcatcatgttgcttgtttactcgcatatggcgcgaatgcaattgtgccatacctagcgcaacgtacagttgaacaactgacattgacagaagggttacaaggcaccgttgtcgataatgttaagacatatacggatgtattgtcagaaggtgtcattaaagtaatggctaagatgggaatttcgacagtgcaaagttatcaaggtgcacaaatatttgaagcgattggcttgtctcatgatgtgattgatcgttattttactgggacacagtctaagttatcgggtatttcgattgatcaaattgatgctgaaaataaagcacgtcaacaaagtgatgataattatcttgcatcaggtagtacatttcaatggagacaacaaggtcaacatcatgcttttaatccggaatctattttcttattgcagcacgcatgtaaagaaaatgactatgcgcaatttaaagcatactctgaagcggtgaacaaaaatagaacagatcacattagacatttacttgaatttaaagcatgtacaccgattgacatcgaccaagttgaaccggtaagtgacattgtcaaacgctttaatacaggggcgatgagttatggatcgatttcagcggaagcacatgaaacgttagcacaagccatgaaccaattaggtggaaagagtaatagtggtgaaggtggcgaagatgcaaaacgttatgaagtacaagttgatggaagcaacaaagtaagtgcgattaaacaagttgcttctgggcgttttggtgtaactagtgattatttacaacatgccaaagaaattcaaattaaagttgcgcaaggtgcaaagcctggtgaaggtggtcaattacctggtactaaggtatatccgtggattgcaaagacaagagggtcaacgccaggtatcggtctgatttcaccaccgccacatcatgatatttattcaatagaagatttagcgcaactgatacatgatttgaaaaatgcgaataaagatgcagatatcgcggtaaaattagtttcgaaaacaggtgttggtaccattgcatctggggtggcaaaagcatttgcagataaaattgtcatcagtggttacgatggtggtacaggggcttcacctaaaacgagtattcagcatgccggtgttccttgggagattggtttagcagaaacacatcaaacattaaaactaaatgacttaagaagtcgtgttaagttagaaacagacggtaagttattaactggtaaagatgtagcgtacgcatgtgcgcttggagcggaagaatttggatttgcaactgcaccattagtggtgttgggctgtattatgatgcgtgtatgccataaagatacatgtccagtaggagttgcaactcaaaacaaagatttacgtgctttatatagaggtaaagcacatcatgttgttaattttatgcattttattgcacaagaattaagagaaattttagcatctttaggtttgaaacgtgtagaagacttagttggaagaactgatttattacaacgatcatcaacattaaaagcgaatagcaaagcggctagtattgatgttgaaaaactgttatgtcctttcgatgggccaaacacaaaagaaattcaacaaaatcataatcttgagcatggatttgatttaacaaatttatatgaagtaacgaagccatatattgctgaaggacgtcgctatacaggtagctttacagtaaataatgaacaacgtgatgtaggagttattacaggtagtgagatttcgaaacaatatggagaagcaggacttcctgaaaatacaattaatgtttatacgaatggtcatgctggtcaaagtcttgcagcatatgcaccgaaaggcttaatgattcatcatactggagatgcgaatgactatgttggtaaaggattatctggtggtacggtcattgtcaaagcaccttttgaagaacgacaaaatgaaattattgctggtaacgtctcattctatggtgcgacaggtggtaaggcatttattaacggtagtgcaggagaaagattctgtattagaaatagtggtgtagatgttgtcgttgaaggtatcggtgaccatggattagagtacatgactggtggacatgtcattaatttaggtgatgtaggtaagaacttcggtcaaggtatgagtggtggtattgcttacgttatcccgtctgatgtagaagcttttgttgaaaataatcaactagatacgctttcgtttacaaagattaaacaccaagaagaaaaagcattcattaagcaaatgctggaagaacatgtgtcacacacgaatagtacgagagcgattcatgtgttaaaacattttgatcgcattgaagatgtcgtcgttaaagttattcctaaagattatcaattaatgatgcaaaaaattcatttgcacaaatcattacatgacaatgaagatgaagcgatgttagctgcattttacgatgacagtaaaacaatcgacgctaaacataaaccagccgttgtgtattaa

SEQ ID NO: 414909 - DNA, 1173 bp, Staphylococcus aureus; identical to SEQ ID NO: 408565

SEQ ID NO: 414910 - DNA, 339 bp, Staphylococcus aureus
atgacaaaagcaccaattgaagatataaaagcaattactatactattagcgactacagtattcattggtaatttgaataaaaccaataatataggaataataatgaaggcaccacctgcacctactatacctgaaataataccaatgaaaaggccaatgataactaataaatatttattaaatgaagacttttcggaactaggtttcactttaataaacattaatgttaatgcaagtaaagcaataatgatatataccgtatttacaaatgtagcatcaaataaatttgctagaaatgcacctaacatactccctataatcatgccgccacccatataa

SEQ ID NO: 414911 - DNA, 777 bp, Staphylococcus aureus; identical to SEQ ID NO: 408049

SEQ ID NO: 414912 - DNA, 393 bp, Staphylococcus aureus; identical to SEQ ID NO: 408047

SEQ ID NO: 414913 - DNA, 726 bp, Staphylococcus aureus
atgaaaaagaacatcatgaataaattagttttatcaacagcattgttacttttaggaaccacatcaacacaacttcctaaaacaccaatcagtttttcatctgaagcaaaagcctataatatcagtgaaaacgagactaatatcaatgagttaatcaaatattacactcagccgcatttttcattatctggaaaatggctatggcaaaagcccaatggtagcattcatgcaacattgcaaacgtgggtttggtatagtcatattcaagtgtttggatccgagagttggggaaacattaatcagttaagaaataaatacgttgatatatttggaactaaagatgaggacacagttgaaggttactggacttatgatgaaacatttactggtggtgttacgccagcagctacttcatctgataaaccttatagactatttttaaaatatagtgataaacaacaaactatcatcggtggacatgaattttacaaaggaaataaaccagtattaactttaaaagaattagatttccgtattcgtcaaacattaataaagaataaaaagttatataacggagaatttaataaaggtcaaattaagataactgctgatggaaataattacacgattgatttaagtaaaaagttaaaattaactgacacaaaccgttatgttaaaaatcctaaaaatgcacaaattgaagtcatactcgaaaaatctaactaa

SEQ ID NO: 414914 - DNA, 1530 bp, Staphylococcus aureus
gtgaggaaattttcaagatatgcatttacaagtatggcagcagtaacattgttgagcactttatcaccagcagcattagcgattgattcaaaaaataaaccagctaattctgatattaaatttgaggtgactcaaaagagtgatgcggtcaaagcattaaaagaattgcctaaatccgaaaatgtaaaaaatatttatcaagattacgctgttactgatgtaaaaactgataaaaaaggatttacgcattatacattgcaaccgagtgttgatggtgttcatgcacctgacaaagaagtgaaagtacacgcagacaaatcaggaaaagtcgttttaatcaatggggatactgatgcgaagaaagtaaagccaacgaataaagtgacattaagtaaagatgacgcagccgacaaagcatttaaagcagttaagattgataagcataaagcgaaaaatcttaaagataaagtcattaaagaaaacaaagttgaaatcgatggtgacagtaataaatacgtttataatgttgagttaattacagtgacaccagaaatttcacattggaaagttaaaattgatgctcaaactggcgaaattttagaaaaaatgaacttagttaaagaagctgcagaaactggtaaaggaaaaggtgtacttggcgatacaaaagatatcaatatcaatagtattgacggtggatttagcctagaagatttaacgcatcaaggtaaattatcagcatttagctttaatgatcaaacaggtcaagcaacattgattactaatgaagatgaaaacttcgtaaaagatgagcaacgtgctggcgtagatgcaaattattacgctaaacaaacatatgattattacaaagacacatttggtcgtgaatcatatgacaaccaaggtagtccaattgtttcattaacgcatgttaataactacggtggtcaagataacagaaataatgccgcatggattggtgacaaaatgatctatggtgatggtgatggtcgcacattcacaagtttatcgggtgcaaatgacgtagtggcacacgaattaacacacggtgtgacacaagagactgcgaacttagaatataaggaccagtcaggcgctctaaatgaaagcttttcagatgtttttggatactttgtagatgacgaggatttcttaatgggtgaagatgtctacacacctggaaaagagggggacgctttacgcagcatgtcaaacccagaacaatttggtcaaccagctcatatgaaagactatgtattcactgaaaaagataatggtggcgtacatacgaattctggaattccaaataaagcagcttataacgtgattcaagcaatagggaaatctaaatcagaacaaatttactaccgagcattaacggaatacttaacaagtaattcaaacttcaaagattgtaaagatgcattataccaagcggctaaagatttatatgacgagcaaacagctgaacaggtgtatgaagcatggaatgaagtaggcgtggagtaa

SEQ ID NO: 414915 - DNA, 291 bp, Staphylococcus aureus
atgtctggaccagaaagtaatttatttgtattaaaatcaatactaacaacaacgataactaaaccttcttcagataatagcttacggtctcttattacaacattaccgatatcaccgataccactaccatcaacaagtacattaccagatggaatgcgaccagctttacgtgctgaatcgtgtgttaaagctaagacatctccaatatcaaagatgaagacattatcttcttcaacgccgcattcaacaccagtctcaccatgtgcttttaacatacggtattcaccatga

SEQ ID NO: 414916 - DNA, 498 bp, Staphylococcus aureus
atgaaaaataaattgatagcaaaatctttattaacaatagcggcaattggtattactacaactacaattgcgtcaacagcagatgcgagcgaaggatacggtccaagagaaaagaaaccagtgagtattaatcacaatatcgtagagtacaatgatggtacttttaaatatcaatctagaccaaaatttaactcaacacctaaatatattaaattcaaacatgactataatattttagaatttaacgatggtacattcgaatatggtgcacgtccacaatttaataaaccagcagcgaaaactgatgcaactattaaaaaagaacaaaaattgattcaagctcaaaatcttgtgagagaatttgaaaaaacacatactgtcagtgcacacagaaaagcacaaaaggcagtcaacttagtttcgtttgaatacaaagtgaagaaaatggtcttacaagagcgaattgataatgtattaaaacaaggattagtgagataa

SEQ ID NO: 414917 - DNA, 696 bp, Staphylococcus aureus
atgaaattaaaaacgttagctaaagcaacattggcattaggcttattaactactggtgtgattacatcagaaggccaagcagtccacgcaaaagaaaagcaagagagagtacaacatttatatgatattaaagacttatatcgatactactcatcagaaagttttgaattcagtaatattagtggtaaggttgaaaactataacggttctaacgttgtacgctttaaccaagaaaaacaaaatcaccaattattcttattaggaaaagataaagataaatataaaaaaggccttgaaggccagaatgtctttgtggtaaaagaattaattgatccaaacggtagactatctactgttggtggtgtgactaagaaaaataacaaatcttctgaaactaatacacatttatttgttaataaagtgtatggcggaaatttagatgcatcaattgactcatttttaattaataaagaagaagtttcactgaaagaacttgatttcaaaattagaaaacaattagttgaaaaatatggtttatataaaggtacgactaaatacggtaagatcactatcaatttgaaagacgagaaaaaggaagtaattgatttaggtgataaactgcaattcgagcgcatgggtgatgtgttgaatagtaaggatattcaaaatatagcagtgactattaatcaaatttaa

SEQ ID NO: 414918 - DNA, 225 bp, Staphylococcus aureus
atgagtaaaactgcatttacaccaatagaattgacacgcaatgagccaaataagaaagtaacacaggcagccactatacctaggtttgctgctccacttcctagtccgtttaaactaatcgcagttgcaatcgctactaacgatattggtgttaccattaataatgaaaatgccacactaataagtatagacattaacaacggatttaagtctgtaaaagaatga

SEQ ID NO: 414919 - DNA, 1023 bp, Staphylococcus aureus; identical to SEQ ID NO: 410917

SEQ ID NO: 414920 - DNA, 1293 bp, Staphylococcus aureus; identical to SEQ ID NO: 410086

SEQ ID NO: 414921 - DNA, 903 bp, Staphylococcus aureus
atgaaattcttatcattcaagtataatgacaaaacttcatatggcgttaaagtaaaacgcgaagatgctgtatgggatttaacacaagtatttgctgactttgcagaaggagatttccatcctaaaacattgttagctggtttacaacaaaatcatactttagattttcaagaacaagtacgtaaagcagttgtagcagcagaagatagcggcaaagctgaagactataaaatttcatttaatgacattgaattcttaccaccagtaacacctccgaataatgtgattgcttttggtagaaattacaaagatcatgcgaacgaattaaatcatgaagtagaaaaattatatgtatttacaaaagcagcgtcatctttaacaggagataatgcaacaattccaaatcataaagatattactgatcaattagattatgaaggtgaattaggtattgttattggtaagtttggtgaaaagattccaaaagcattagctttagattatgtttacggctatacaattattaacgatatcactgatcgcaaagcacaaagtgaacaagatcaagcatttttatcaaaaagtttaactggcggttgcccaatgggtccttatatcgttactaaagacgaactaccattacctgaaaatgtaaatattgttacaaaagttaacaatgaaattagacaagatggtaacactggcgaaatgattcttaaaattgatgaattaatagaagaaatttcaaaatatgttgcactacatccgggagatattattgcaactggtacaccagcaggcgttggtgcaggtatgcaaccacctaaatttttacaaccaggtgatgaagttaaagtgactattgataatattggaacgctgacaacttatatcgctaaataa

SEQ ID NO: 414922 - DNA, 453 bp, Staphylococcus aureus; identical to SEQ ID NO: 405967

SEQ ID NO: 414923 - DNA, 834 bp, Staphylococcus aureus; identical to SEQ ID NO: 406098

SEQ ID NO: 414924 - DNA, 954 bp, Staphylococcus aureus
atggatacaaaagactttaaacgtttagaaaaaatgtattccccgcgatacttacccggattagatggattgagggcattcgcagttataggaatcattatttatcacttgaatgcacaatggttaagtgggggctttttaggagtagatacattcttcgttatttcaggttatttaataacaagtttgttgataagtgagtattatcggacgcaaaaaatcgatttgctagagttttggaagcgacgattgaaacgactcattccggcagtgttatttttaatctgtgtcgtgcttacgttcacactgatatttaaaccggaattgattatacaaatgaaacgagatgctattgcagctatattctatgtttcaaactggtggtacatttcacagaatgtagattattttaaccaatttgctattgaaccactcaaacatttatggtctttagccattgaagaacaattttacttgcttttcccattggttatcacgttcttattacatagatttaaaccgagaaatattattcaaacgctatttattgtatcgttgatttctttaggacttatgatagtgattcatttcatcactggagataattcacgtgtgtattttgggacagatacacgactgcaaactttattgcttggttgtatattagcatttatttggcctccgtttgctttgaaaaaagatatttctaaaaagattgtcgtatcattagatattatagggatatctggttttgcggttctaatgactttgttctttatagttggcgaccaagatcaatggatctataatggaggattttacattatatcatttgcaactttattcattattgcaattgcggtacatccttctagtttatttgctaaatttttaagtatgaaacctttactaattataggtaaacgatcatatctgtctcttatacacatctga

SEQ ID NO: 414925 - DNA, 903 bp, Staphylococcus aureus; identical to SEQ ID NO: 409250

SEQ ID NO: 414926 - DNA, 390 bp, Staphylococcus aureus
ttgttaaaatcaaaatttgaaaacaatcgacaaacattcgataagatttataacatactaaacatcgaagcaataccgtctaacgtactactaaaaaacttgagtgatggtcaaaaacaaaagcttaaattattaagtttcttattggaagatcatgatttaatcatattagatgaagttacaaacgctttagacaagaaaacagttaatgaaatttatgaatttttaaatgattttattcaaagccatcaaactaaaactattatcaatattacacataatttatccgatttaagtgctttgccgggtaaatactttatttttaaagaccttcaaatagaagagtaccaatcaaaagaagaagtcataaatgattacattaatttataa

SEQ ID NO: 414927 - DNA, 543 bp, Staphylococcus aureus
atgaatcaagtgaataacaacatattgcctgctataagaaacattaaagatttagagaaactgattaaaacagattataaaatgtgtgtgcttctagatatgcatataggacatataaaaagtattatggaattgctgaagcaaaatcatatagagtgttttattcatatagatttgataaaaggtttaagccacgatgaatttgcaagtgaatttattattcagcaatacaagccaaaaggtatcgtatcgactaaatctaaagtaataaaaaaagctaaatcattaaatactttaacgatttttagagtatttattattgatagtcaagcattgaaacgcagtatagatttgataaaaaaagtggaacctgattttgttgaagtacttccaggtgttgcgagtaaagcgattcatcatattcagaaagaaacaaacacacaagtcattgcaggtggcctaattaatacaatagatgaagtcaatgaagctgttaaaaatggagcgaaatatgtaacaactagttatgataaactttggtaa

SEQ ID NO: 414928 - DNA, 243 bp, Staphylococcus aureus; identical to SEQ ID NO: 411711

SEQ ID NO: 414929 - DNA, 594 bp, Staphylococcus aureus
atgcaattattagattatatatcacctcacactatttttatgagattaaactttgtgaatatatcatttgtgattattacaatagctttatttatagcgttatattattttaataaaatagggttttggtatagaaaagaagatatctatctatcttcaacaaatattaatttttcgttgccaatttcaataaaagctataacaacaatacagctaaaacactggataagtaacaaagaagaagttaatttacataaacctttcttctatattagttattcaatatggttctttttagggtgtttaatctatttttcacagatggcatataatcagttagctaatgcagttatttttattttgatattaaacactataactcgtgatagtttttctgcggggacggatttttttactaaatcattacgttttgattcagatagaaaaagtatcggtttgtataggatgtcaaacactgattttaaacaaatttacgattctaaattatctctaattcgctttattggttttaaagaaacaatacttgctattattttctgtctcttatacacatctgacgctgccgacgaatag

SEQ ID NO: 414930 - DNA, 327 bp, Staphylococcus aureus
atggcattgctaacaatactaattttatgtgcggactttttagctaataaatattttgtgaatcgcttcggtggttctaagtttggagagtatgcagctttaattggtgtggttattggatgttttgttttaccgccatttggaattattattataccttttattttggtattcatagttgaattaatacaaggctattcatttgaaagagcagttaaagtaagtataggttcaatcgtagcatttttaacaagtagtatagctcaagcaatcattatgtttataatgattgtatggttctttatagatgctttattgattaattaa

SEQ ID NO: 414931 - DNA, 270 bp, Staphylococcus aureus; identical to SEQ ID NO: 406976

SEQ ID NO: 414932 - DNA, 204 bp, Staphylococcus aureus
atggataaagaatctgtcgtagcaagtttagctagaaacaaaaagattgctgtagaaacaatggccggtcaaagatacatcatagaacgcattttacatacaaatgatgaaaaacatattcatattttgaaacctaaagatgtcgtgttagatgtagatagcatcaaagaaattgacgaaaatcatttaaatgatgcaacataa

SEQ ID NO: 414933 - DNA, 519 bp, Staphylococcus aureus
atgtgtataagagacagtttatatacaggtataatgctaattgctggtatcagttatgtattttatcaaagagatattgaatctaagcggttgcttacatcaattggtgttggtattattacggcaattattttaattatgcttcaacttttattctcacttataacttctaatttaagttatagttcattaattaaagaattagcaagaacaggtgtcaattggaagtggcaaatgttagtaactttactttttgtcattccatgtcacgagttatatatgagaactgttttacaaaaagaattaacacatttttcaataccgaaatggatagctatattaataactgcaatttgttctagttcattatttatttatttagataattggtggatagtaacatttatatttgttgcacaagtgatattatcattaagttatgagtatactcgacgcatagcaacaacatccgttgcgcaaattgttgctattatattgttattaatttttaatgcttaa

SEQ ID NO: 414934 - DNA, 429 bp, Staphylococcus aureus; identical to SEQ ID NO: 414000

SEQ ID NO: 414935 - DNA, 1101 bp, Staphylococcus aureus
atgaaaatagctgatttaatgacattgttagatcatcatgtgccatttagtactgctgaatcttgggataatgtaggattgttaataggtgatggagatgttgaagttactggtgttttaacagcattagactgtacgttggaagtagtaaatgaagcaatcgaaaaaggttataatactattattagtcatcatcctctaatctttaaaggcgtaacatcattaaaagctaatggttatggtttgatcattagaaaactaattcaacatgacattaatttaatagcgatgcatacaaatttagatgtaaatccgtatggtgtcaatatgatgttggcgaaggcgatgggtttgaagaacatttcaataataaataatcaacaagatgtatactataaagttcaaacatatatacctaaggataatgttggaccatttaaagataagcttagtgaaaatggattagcgcaagaaggtaattatgaatattgtttctttgaaagtgaaggaagagggcaattcaaaccagttggtgaagctaatccaacaataggacaaattgataaaattgaagatgtagatgaagttaaaattgaatttatgatagatgcatatcaaaagtcaagggctgagcaattaattaaacaataccatccatatgaaacaccggtatttgattttattgagataaaacaaacatccctttatggacttggcgttatggcagaagtggataatcaaatgacattggaagatttcgcagctgatattaaatctaaattaaatatcccaagtgtccgttttgttggtgagtctaatcagaaaattaaacgtattgcaattattggtggttcaggtattggatatgaatatcaagctgtccaacaaggcgcagatgtctttgttacaggtgatattaaacatcatgatgccttagatgctaaaattcatggtgtgaatttaattgatattaatcattacagcgaatatgtgatgaaagaaggtttaaaaacgttactaatgaattggttcaatatagaaaaaataaatatagatgttgaagcatctacaattaatacagatccatttcaatatatttaa

SEQ ID NO: 414936 - DNA, 186 bp, Staphylococcus aureus
atgagtactaaaaatacacctaatgaaaatatcattgctgttttttgtgatgcaagtgtgattaagaataaaaacaagccaaagaatagtaaaaagattaggaagaaccataaattatctacatatttagaaaacgccaaattttttccattactagatgcctgcacaacaatcaaaatcacataa

SEQ ID NO: 414937 - DNA, 720 bp, Staphylococcus aureus
atggctacgggcgtattagaggacgatattgtcaaagagatatatggcagctcaaaggaatgggtttcagttgaagtgaaattatcacagtcactagacccgagcacattatttcatctcactgacaatgaggcaggagatcgcttttatatgcgtttgaatgataatcgaacgtcatattttggctacaaagcaattcaattattcaaaaataattctaaaaataaacaatctatttttaaagactgggaaaaattaaaacataacatcacatttatacatccgcaatctgagaaacatcatcttcgagttgttggagggtttcaattttcaagtcataaatcagatgatgaatggcgagagtttggactaaatcattttgtattacctgaagttttaatttcaactgataataatgggacatttttaacttatacagttaaaagggaaagttttactgttgaggcattgaacgatttaatggatttgttcaacaatatatcggatatagatgtggacgagcaaattggggaaattactagaaatgaagatatttataaagatgactggcgtcaacttgtagtagaagctatagaatctattaataatgaagaaaaaattgtactagcacgtagacggttaataaagttcgataaagatatcagtattccatctgtctcttatacacatctgacgctgccgacgaagaggatagtgtag

SEQ ID NO: 414938 - DNA, 435 bp, Staphylococcus aureus; identical to SEQ ID NO: 405334

SEQ ID NO: 414939 - DNA, 357 bp, Staphylococcus aureus; identical to SEQ ID NO: 409083

SEQ ID NO: 414940 - DNA, 303 bp, Staphylococcus aureus
atgactaaaaaatataaagacatgactcaggaagaagtaaaagacttattatctgaaaaaagcggagaattgtatgaattagcgaaagaaattaagggagaaagtaaatttgatattttgcttttctcatcaataggagttatcgacggagattatttagcaggttcaagttctgtgattggtcatactttcgatcttgcttccttattggatagcactaagagttataaagacattgtcaatgttctccaaatgtgtaaatcacaaaaatttcacggtattgatgataacaaggagggctaa

SEQ ID NO: 414941 - DNA, 786 bp, Staphylococcus aureus; identical to SEQ ID NO: 408180

SEQ ID NO: 414942 - DNA, 390 bp, Staphylococcus aureus
atgcctctttactccctaacactactttttaaactttatagtgaatttgatgcaacattggaaacaaacagggttgaaccttacagcgagaagggaaagaggtgttgtatcatttgttgcatcaatgttgcatcactaaaaatgatgcaacacctacgattactttttacactcacgtgttgcatcactcaaaaaatgatgcaacatctgatacaacactctaaaatgtatatttattcaatatttattatattaaatcttctaaactttcatctcttacataagctatctgtacaccataatcttttccaaatcgaattttcccacttttattaccatcatatacagaccaattgtctaattgtcttaagatgtttgaaatctttctaa

SEQ ID NO: 414943 - DNA, 888 bp, Staphylococcus aureus
atgacctttcttaaaagtattactcaggaaatagcaatagtcatagttatttttgctttatttggcttaatgttttacctgtatcatttgccattagaagcatatttactagcacttggcgttattttattattattactcatattcataggtattaaatatttaagttttgtaaaaactataagccaacaacaacaaattgaaaacttagaaactgcgttgtatcagcttaaaaatgaacaaattgaatataaaaatgatgtagagagctactttttaacatgggtacatcaaatgaaaacacccattactgcagcacaactgttacttgaaagagatgagcctaatgttgttaatcgtgttcgtcaagaggttattcaaattgataactatacaagtttagcacttagttatttaaagttattaaatgaaacttctgatatttctgtcactaaaatttcgattaataatatcattcgcccaattattatgaaatattcaatacagtttattgatcaaaaaacaaaaatccattatgaaccttgtcatcacgaagtattaactgacgttagatggacctctttaatgatagaacaattaataaataatgcacttaagtatgcgagaggtaaagatatatggattgaatttgatgagcaatccaatcaattacacgtaaaagataatggtatcggtattagtgaagcggacttgcctaaaatatttgataagggctattcaggttataatggccagcgccaaagtaactcaagtgggattggtttatttatcgtaaaacaaatttcaacacacacaaaccatcctgtttcagtcgtatctaaacaaaatgagggtacaacatttacgattcaatttccagatgaataa

SEQ ID NO: 414944 - DNA, 363 bp, Staphylococcus aureus; identical to SEQ ID NO: 409245

SEQ ID NO: 414945 - DNA, 237 bp, Staphylococcus aureus; identical to SEQ ID NO: 408128

SEQ ID NO: 414946 - DNA, 795 bp, Staphylococcus aureus; identical to SEQ ID NO: 408177

SEQ ID NO: 414947 - DNA, 573 bp, Staphylococcus aureus
gtgtataagagacagacattagtagcaagtgctttagtattaacaacattaggaacaggtttacattcttcatacttaggattaaatacaaataaagttgttaaaacagcaaaagcagaagaaaaaatgacaaatggtcaattgtggaaaaaagttaaagattcattaattgattcaaatattattagtggtaacgaaaatgaagagattacagtaacatatgttaataaaaccggatattcttcaagtgtttctgcctatggtaataataatgacgatttttcaagtactccaagtaatttttctaaacttaaggaaattgacttgaaaaaagataatgtaccgtcagatgattttaatactactgttagtggtgaagatagttggaaaacacttacatctaaattaaaggaaaaaggtttggttacagatggacaaacagtaactattcattgtaatgataagtctgacaatacaaaatcatctgtttcaggtaaagtaggagcagatctgacaagtggcaatggaactacattcaaaaaacgctttattgataaaatcacaattgattaa

SEQ ID NO: 414948 - DNA, 1434 bp, Staphylococcus aureus
atgaagccattacatttaaagttgaataatttcggcccctttttaaaagaagaaattgatttttctaaaattgataataatgaattgtttttaataagtggtaagactggatcgggtaaaacaatgatttttgatgcaatgacttatgccttgtttggtaaagcatcaactgaacaaagagaagaaaatgatttgagaagtcatttcgctgatggtaaacagccgatgtcagtaacatttgaatttcaattaaatcatcgaatttataaagtgcatagacaaggcccttatatcaaagaaggtaatacaacaaaaacgaacgctaaatttgatgtatttgagatggtggatggcaagtatgaaattagagaaagtaaagtaatttcaggtacccaattcattattgaattattaggagtaaatgcagatcaattccgacaattgtttattttgcctcaaggtgaattcaaacgctttttaatatcaaacagtcgtgaaaagcaagggatattaagaacactgtttgacagtgaaaaatttgaagctatacgagaaatattaaaagaagaactaaaaaaagaaaaagctcaaatcgagaatagatatcaacaaattgaccttttatggcaagaaattgaatcatttgatgatgacaaaataaaaggcttattagagcttgccactcagcagatagacaaattgattgaaaatataccacttttacaagctaggtcgaaagaaatactagcatttgtaaatgaaagtaaagaaactgctattaaagaatatgaaataatagaaaagaaaacactagaaaataatatattaaaagataatattaaccaactcaacaaaaataaaattgatttcgttcaattgaaagagcaacaacctgaaatagacgaaattgaagctaagttaaagttgttacaagatattaccaacctattgaattatattgaaaatagagaaaaaattgaaactaaaattgctaatagcaaaaaagatatttctaaaaccaataataaaatattgaatcttgattgtgataagcgaaacatagacaaagagaaaaaaatgttagaagaaaacggagatttaattgaaagtaaaacctcttttattgataaaactagagtattatttaacgatattaataagtatcaacaaagttatctcaatattgaatgcttgataactgagggtgaacaattaggtgatgaattaaataatctaattaaaggtttagaaaaggtcgaagattcaataggtaataacgaaagtgattacgagaaaattatcgaactaaataatgcgataactaacataaataatgaaattaatataattaaagaaaatgaaaaagctaaagctgaattagataaactattaggtagtaagcaagagttagagctgtctcttatacacatctga

SEQ ID NO: 414949 - DNA, 540 bp, Staphylococcus aureus
gtgtataagagacaggatatatccgtacttaaaacttctagtttgaaagttgagtttaactcatcagatttagcaaatcaatttaaaggaaaaaatatagatatttatggactgtattttggaaataaatgtgtaggcttaactgaagaaaaaacatcatgcttatacggaggagttacgatacatgatggaaatcaattagatgaagagaaagttataggcgttaatgtatttaaagatggtgtccaacaagaaggttttgttataaaaaccaaaaaggctaaagtaacagtacaagaattagacactaaagttcgatttaaattagaaaatttatataaaatatacaataaagataccggtaacatacaaaaaggatgcattttctttcattctcataatcatcaagatcaatcattttattatgatttatataacgtaaaaggttcagtgggagcagagttttttcaattttatagtgataatagaacagttagctcatctaattatcatattgatgtatttttatataaagattaa

SEQ ID NO: 414950 - DNA, 762 bp, Staphylococcus aureus
gtggactatcaaactttcgaaaaggtcaataaattcataaatgtagaagcgtacatattttttctcactcaagagttaaagcaacaatataaattatcattaaaagaattgttgatattagcatatttttattacaaaaatgaacacagtatttcactaaaagaaatcattggtgacatactttacaaacaatctgatgttgtaaagaacattaagtcactatctaaaaaaggatttataaataagtctagaaacgaagcagatgaacgccgtatttttgtttcagttactccaatacaacgtaaaaagattgcttgtgttattaatgagttagataaaataattaaaggatttaataaggaaagagactacataaaatatcaatgggctccaaaatatagcaaagaattttttatactttttatgaacattatgtactcaaaagattttttaaaatatcgatttaatttaacatttcttgatttatctatcttatatgtaatatcatctcgaaaaaatgagatactaaatttaaaagatttgtttgaaagtattagatttatgtatcctcaaattgttaggtcagttaatagattaaataataaaggtatgctaatcaaagaacgatcccttgcagatgaaaggattgtgttaatcaaaataaataaaatacaatataacactattaaaagcatattcacagatacttccaagactgtctcttatacacatctgacgctgccgacgatctactctgtgtag

SEQ ID NO: 414951 - DNA, 600 bp, Staphylococcus aureus
gtgccacaaattcatggattcaataagcataatgaaattattgaagaagatacaaacaaagataaacctaattatcaattcggtggacacaatagtgttgactttgaagaagatacacttccaaaagtaagcggccaaaatgaaggtcaacaaacgattgaagaagatacaacgccgccaacgccaccgacaccagacgtacctagtgagccggaaacaccaaccccacccacaccagaagtaccgagtgagccaggcgaaccaacgccaccaaaaccggaagtaccgagtgagccggaaacaccaacgccaccaacaccagaggtaccagctgaatctggtaaaccagtaccacccgcaaaagaagaacctaaaaagccttctaaaccagtggaacaaggtaaagtagtaacacctgttattgaaatcaatgaaaaggttaaagcagtggcaccaactaaaaaagcacaatctaagaaatctgaactacctgaaacaggtggagaagaatcaacaaacaaaggtatgttgttcggcggattattcagcattctaggtttagtattattacgcagaaataaaaagaataacaaagcataa

SEQ ID NO: 414952 - DNA, 405 bp, Staphylococcus aureus
atgaacgagcaaataataggaagcatatatactttagcaggaggtgttgtgctttattcagttaaagagatttttaggtattttacagattctaacttacaacgtaaaaaaatcaatttagaacaaatatatccgatatatttagattgttttaaaaaggctaaaaagatgattggagcttatattattccaacagaacagcatgaatttttagatttttttgatattgaagtctttaataatttagataagcaaagtaaaaaagcgtatgaaaatgttattggatttagacaaatgattaatttatcaaatagagttaaggcaatggaagattttaagatgagtttcaacaatgaatctgtctcttatacacatctgacgctgccgacgatctactctgtgtag

SEQ ID NO: 414953 - DNA, 1431 bp, Staphylococcus aureus
atgaaatttaagtcattgattacaacaacattagcattaggcgttatagcatcaacaggagcaaactttaatactaacgaagcatctgccgcagctaagccattagataaatcatcaagtacattacaccatggacattctaacatccagattccatatacaattactgtgaacggtacaagccaaaacattttatcaagcttaacatttaataagaatcaaaatattagttataaagatatagagaataaagttaaatcagttttatactttaatagaggtattagtgatatcgatttaagactttcaaagcaagcggaatatacggttcattttaaaaatggaacaaaaagagttatcgatttgaaatcaggtatctacacagctgacttaatcaatacaagtgacattaaagctatcagtgttaacgtagatactaaaaagcaacctaaagataaagctaaagcaaatgttcaagtgccatatacaatcacagtgaacggcacaagccaaaacattttatcaaacctaacatttaataaaaatcaaaatattagttacaaagatttagagggtaaagttaaatcagttttagaatcaaatagaggtattactgatgttgatttaagactttcgaagcaagcgaaatatacagttaattttaaaaatggaacgaagaaagttatcgatttgaaatcaggtatttacacagcgaatttaatcaattcaagtgatattaaaagtatcaatattaacgtagatacaaaaaaacatatcgaaaataaagctaaaagaaactatcaagttccatattcaattaatctaaatggtacatctacaaacattttatcgaatctttcattttcaaataaaccttggacaaattacaaaaatttaactagtcaaataaaatcagtactgaagcatgatagaggtattagtgaacaagatttaaaatatgctaagaaagcttattatactgtttattttaaaaatggtggtaaaagaatcttacagttaaattcaaaaaattacacagcaaacttagttcatgcgaaagatgttaagagaattgaaattactgttaaaacaggaactaaagcgaaagcagacagatatgtaccatacacaattgcagtaaatggcacatcaacaccaattttatcaaaactaaaaatttcgaataaacaattaattagttacaaatatttaaacgacaaagtgaaatctgtattaaaaagtgaaagaggtatcagtgatcttgacttaaaatttgcgaaacaagcaaaatatacagtatatttcaaaaatggaaagaaacaagtagtgaatttaaaatcagacatctttacacctaatttatttagtgccaaagatattaaaaagattgatattgatgtaaaacaatacactaaatcaaaaaaaaaataa

SEQ ID NO: 414954 - DNA, 360 bp, Staphylococcus aureus
atgagtatcgtaaagattaacggtaaaccatataaatttaccgaacatgaaaatgaattgataaaaaagaatggtttaactccaggaatggttgcaaaaagagtacgaggtggctgggcgttgttagaagccttacatgcaccttatggtatgcgcttagctgagtataaagaaattgtgttatccaaaatcatggagcgagagagcaaagaacgtaaattggaaagacagcgaaagaaagaagctgagctaagaagaaagaagccacatttgtttaatgtacctcaaaaacattcacgtgatccgtactggttcgatgtcacttataaccaaatgttcaagaagtggcaggaagtataa

SEQ ID NO: 414955 - DNA, 156 bp, Staphylococcus aureus; identical to SEQ ID NO: 409125

SEQ ID NO: 414956 - DNA, 672 bp, Staphylococcus aureus
atgcaatacattacaagataccagaaagacaatgacggcacttattccgtcgttgctactggtgttgaacttgaacaaagtcacattgacttactagaaaacggatatccactaaaagcagaagtagaggttccggacaataaaaaactatctatagaacaacgcaaaaaaatattcgcaatgtgtagagatatagaacttcactggggcgaaccagtagaatcaactagaaaattattacaaacagaattggaaattatgaaaggttatgaagaaatcagtctgcgcgactgttctatgaaagttgcaagggagttaatagaactgattatagcgtttatgtttcatcatcaaatacctatgagcatagaaacaagcaagttgttaagtgaagataaagcactattgtattgggctacaatcaaccgcaactgtgtaatttgtggaaagcctcacgcagacctagcgcattatgaagcagtcggcagaggaatgaacagaaacaaaatgaatcactacaacaaacatgtattagcgttatgtcgcgaacatcataaccagcaacatgcgattggcgttaagtcgtttgatgataaatatcacttgcatgactcatggctaaaagttgatgagaggctcaataaaatgctgaaaggagagaaagagaaatga

SEQ ID NO: 414957 - DNA, 624 bp, Staphylococcus aureus
atgactgaacaaacattatttgaacagttgaacagtaaaaacgtgaatgatcatacagaacaaaaaaatggattaacttatctagcatggtcatatgcacaccaagagctgaaaaagattgacccaaactacacagtaaaagtacacgagtttccacatccagatattaacacagaaaattattttgtaccttatttggctacaccagaaggctattttgtacaggtatctgtgactgtgaaagatagtacagagactgagtggcttccagtattggactttagaaataaatcgcttgctaaaggtagtgcaacaactttcgatattaacaaagcgcaaaaacgatgttttgttaaagcttcggctttacacggtttaggcttatatatctacaacggcgaggaactaccaagtgcaagtgacaacgatattacagaattagaagagcgtatcaatcagttcgtgaacttatctcaagaaaaagggcgagatgcaactatcgataaaacgatgagatggctaaaaatatctaacattaataaattaagtcaaaaacaaatcgcagaagcacaccaaaaattagatgcgggattaaaacaattggatagtgaggagaaacaataa

SEQ ID NO: 414958 - DNA, 174 bp, Staphylococcus aureus; identical to SEQ ID NO: 407440

SEQ ID NO: 414959 - DNA, 168 bp, Staphylococcus aureus
atgggcgaaaatgtaagatatatgctaagaagtcaaaataaaactaactataaaacatctagtacgattattaaagtgacagataataaaattgaattattaagagaaggagatataaagtttgaagaaataaaagaaagactaggtacaggtattatttatgaataa

SEQ ID NO: 414960 - DNA, 207 bp, Staphylococcus aureus; identical to SEQ ID NO: 409232

SEQ ID NO: 414961 - DNA, 1230 bp, Staphylococcus aureus; identical to SEQ ID NO: 408124

SEQ ID NO: 414962 - DNA, 783 bp, Staphylococcus aureus; identical to SEQ ID NO: 408857

SEQ ID NO: 414963 - DNA, 732 bp, Staphylococcus aureus; identical to SEQ ID NO: 409080

SEQ ID NO: 414964 - DNA, 663 bp, Staphylococcus aureus; identical to SEQ ID NO: 408855

SEQ ID NO: 414965 - DNA, 180 bp, Staphylococcus aureus; identical to SEQ ID NO: 408994

SEQ ID NO: 414966 - DNA, 786 bp, Staphylococcus aureus; identical to SEQ ID NO: 408180

SEQ ID NO: 414967 - DNA, 423 bp, Staphylococcus aureus
atgaaaatttctactaaagggagatatggacttacattgatgatttctcttgctaaaaaagaggggcaaggatgtatatcattaaagtcaattgctgaagaaaataatttgagtgatttatatttagaacagcttgtaggtcctttaagaaatgcggggttaattcgaagtgtacgcggtgctaaaggtggataccaattaagagtaccagcggaagaaatctcagcaggggatattataagactgttagaaggtccaattacatttgttgaaagtattgaatcagaaccacctgcgcaaaaacaactatggattcgcatgagagatgcagtgagagatgttttagataatacaacattgaaatatttagcggaatatgtagatacaagtgaagatttagacggatacatgttttatatttaa

SEQ ID NO: 414968 - DNA, 267 bp, Staphylococcus aureus
atggctaggttaaatattacgttttcgcctcaagcctttgaagattataagtattttcagcagaacaataaaaaaatggtgaagaagattaatgagttacttaaaagtattgacagaaatggtgcattggaaggtataggtaagcctgaaaagttaaaatcgaatctgactgggtattatagtagacgtatcaatcacgaacatagattggtttatacagtagatgacaatcatataaaaatagcatcatgtaaataccattattaa

SEQ ID NO: 414969 - DNA, 243 bp, Staphylococcus aureus; identical to SEQ ID NO: 411711

SEQ ID NO: 414970 - DNA, 243 bp, Staphylococcus aureus
atgtttgttgataaaggttataggaatttaaaaataggtaaaaaacttttagataaagttataatgacatgtaaagaacaaaatatcgatggtatttatttaggaacaattgataaatttattagtgcacagtatttttattctaataatggcttccgtgaaattaagcgaggagatttaccaagtagttttcctaaattagatgtagataataggttttattacagaaatttaaaagattaa

SEQ ID NO: 414971 - DNA, 1338 bp, Staphylococcus aureus
atggagaacaatgaactacaaaggggattgagtgcccgtcaaattcaaatgattgcacttggtggtacgattggcgtggggcttttcatgggtgccacaagtacaattaaatggacaggcccatcagttatccttgcatatttaattgcgggtatctttttatttttaatcatgagagcaatgggggaaatgatttatttaaaccctacaacaggatcatttgcaacatttgcaagtgattatatacatcctgcagcaggttatatgacagcatggagtaatatattccaatggattgtagttggtatgagtgaggtcatcgcagtaggagaatatatgaagttttggttcccggaattgccaacttggattcctggtgttattgctattttattattaatggcagcgaatttattctcggtaaaagcgtttggagaatttgaattttggtttgctttaattaaagttgtaacaattattttaatgattattgctggttttggtcttattttctttggttttggaaatggtggccatgcggtaggtatttctaatctatggacaaatggcggatttatgccaaatggtattgttggtttcttctttgcattatcaattgtaattggttcataccaaggtgtggaactgataggtattacggcaggtgaaactaaagatcctcagaaaaatatcgttaaagcagtgaatggtgttatctggagaattttaattttctatttaggcgctatttttgttattgtttcagtgtatccttggaatcaattaggagacattggaagtccgtttgttgcaacatttgctaaaatcggtattacatttgcagctggattaattaactttgttgtattaactgcagcaatgtcaggatgtaactcaggtattttcagtgcgagtcgtatgatttatacacttgctcataaaggtgaaatgccaaaaatatttactaaaatcatgagaaatggtgtaccattgtacactgttgtagcagtatctcttggtattttaattggtgctttattaaacgtaattttacctttatatatcgatggagcgaagagtattttcgtatacgtttatagtgcgtctattttaccaggtatgattccttggtttatgattttattcagtcacttacgttttagaaaattacatcctgaagaattggaaggtcacccattcaaaatgcctggtggcgcagtaactaactatttaacaatcttattcttaatattagtattggttggtatggtatttaatgttgaaactagaatatcagtgctaattggtgtcatcttcttaacgattgtaacgatttaa

SEQ ID NO: 414972 - DNA, 1041 bp, Staphylococcus aureus
atgacaaccaacacagttacattacaaacagcacatattgtaagtttaggagatatcgaagaagctaaagcaagcattaaaccatttattcgtcgaacaccactaattaaatctatgtatttaagtcaaaatatcactaaaggtaacgtatatttaaaacttgaaaatatgcagtttacaggttcatttaaatttagaggtgctagcaataaaattaatcatttgtcagatgaacaaaaagctaaaggtattattggcgcatcagccggaaatcatgcacaaggtgtagctttgacagcaaaactattaggtattgatgcaacgattgtgatgccagaaacagcaccaattgctaaacagaatgctaccaaaggatatggtgcaaaagtcattttaaaaggtaaaaactttaatgaaactagactttatatggaagaattagcgaaagaaaatggtatgacaattgttcatccatatgatgataagtttgtcatggctggtcaaggaacaataggattagaaattttagatgatatatggaatgttaatacggtcattgttccagttggtggaggtggcctaattgcaggtattgccaccgctttaaaatcattcaacccatcaattcatataatcggcgttcaagctgaaaatgtgcatggcatggcagagtcattctataagagagctttaactgaacatcgtgaagatagcacaattgcagatggttgtgatgtaaaagtaccaggtgaaaaaacatacgaagtagtaaaacatttagtagatgaatttattcttgtatcagaagaggaaatagaacatgcaatgcaagatttaatgcaacgtgccaaaatcattacagaaggtgcaggagctttacctacagcagctattttaagtgggaaaattgataaaaaatggctagagggtaaaaatgtcgttgcattagtttcaggaggaaacgttgacttaactagagtttctggtgtcattgaacatggcttaaatatcgcggatacaagtaagggtgtggtaggttaa

SEQ ID NO: 414973 - DNA, 231 bp, Staphylococcus aureus
atgtctttagtaatggtgcctgcaacgcccgtaaatgttaaagcacctataaagttcatcactgctgccattaaaattgccgttttaggcgttaacgctctagtagatacagcagtagctactgcattggctgtatcatggaatccattgataaagtcaaatatcagcgagaaaataactacagctatagtgacgatgattatatatgacataaatatatactccccttag

SEQ ID NO: 414974 - DNA, 573 bp, Staphylococcus aureus
atgaggggtgagacgttgaaactaaagaaagataaacgtagagaagcaatcagacaacaaattgatagcaatcccttcatcacagaccatgaactaagcgacttatttcaagtgagtatacaaacaattcgtttagatcgcacttatttaaacataccagaattaaggaagcgtattaaattagttgctgaaaagaattatgaccaaataagttctattgaagaacaagaatttattggtgatttgattcaagtcaatccaaatgttaaagcgcaatcaattttagatattacatcggattctgtttttcataaaactggaattgcgcgtggtcatgtgctgtttgctcaggcaaattcgttatgtgttgcgctaattaagcaaccaacagttttaactcatgagagtagcattcaatttattgaaaaagtaaaattaaatgatacggtaagagcagaagcacgagttgtaaatcaaactgcaaaacattattacgtcgaagtaaagtcatatgttaaacatacattagttttcaaaggaaattttaaaatgttttatgataagcgaggataa

SEQ ID NO: 414975 - DNA, 1266 bp, Staphylococcus aureus
ttgagtagacaatctcaaccaaatatacatatcaaagtttcaccaacaactaaatttaaaacaactactatagtttttaaatttatggcacctttagaatatgacacaattacagctagatcattattaagcaaattattagttcgagcaactaagaaatggccaaccgataagtcgtttaataatcacttagccgatttatatggtgcgtatgtgaatagtacaatttcaaaattcaaagatcagcatgtcattacattttcattagaaattgttaatgaacgttatttaagaaacggtgaatcattatttaatcaaggattagatttattacaagaaatcatttggaatccattaattgaaaataaagcattcaatgataattttgttaaccaagagaaaacattattagccaaaaaaatagaagcaatggtagataataaagcacaatattcgtttttaaaattactcgaccatatgtttgaaaatgaagcatataaatacttatctacaggacaactagaacaaatcccacatattactgctgaaacactatatcatacatatcaatcaatgattaataatgatcaatgttctgtttatgttgtcggcaatgtagaacctgaaagtgttgagaaacaaatacgtgaaaaatttgcacttaaaccattcgataaacatcaattccaacattctactcatcatttacacgatgaagaagttgattatattgttgaatatgatgacgtggatcaagctaaattaaatatgggataccgttttccaacacaatatggacaaagtggatatgctgcgtttgttgtatttaacatgatgtttggaggagatccttcatctgttttatttaatgaagtgcgagaaaagcaaagtttagcgtactctatacattcacaaattgatggcaaaaatggctatttatttgttttgagtggggtttcaagtgataagtacgaaactgcaaaagacactattataagtgaatttgaaaaaataaaagcaggagatttcactgaagaaaaattagagttagctaaaaaagtaatcatttctcatcgatatgaatctgaagatcgtccgaaaagtattatagagattatgcataaccaaatattattagagcaaccacaaagcaaagaaacatttataaatgatatacagaaggtaagtcgcgaagatattgtttctgttgctgaaaaagcatttttagatacaatctatgtgttgacaaaaggaggggataaataa

SEQ ID NO: 414976 - DNA, 699 bp, Staphylococcus aureus
ttgtcttcaatttttactatgataatttatttcgtaatattaatggtgcttcctttatgggcacaacacaaagttaaatctaactatgagaaatattcacaagttagatcaactagtggtaaaacgggtcgtgaagttgcattagaaattttacatgcaaacggtatttatgatgtcgaagttgttaaaggtgaaggattcttaacagatcattacgatcctaaaaagaaagttgtttcactatctcctgcaaactatgacagaccatcagttgctggaactgcaattgcagcccacgaagttggtcatgccattcaagatcaccaaggatattggttcttaagattcagagcagcattagtacctgttgcaaacctagggagttcattaagttatatgatcatcatgttaggtattatcttaacagcgataggtagtgcatttggttcaactgctttatggattggtgctggtttaatgtcattagcggtattattctcaattgttacgttaccagttgagtttgatgcgagttcaagagcgatgaaacaaattacggcattgaacattgtaaatgaaaaagaatacaagcatgcgcgtaaagtattatctgcagcagcaatgacttatgttgcagcaactgctgtcgctgtagcagagcttgtacgtattattttgattgcgcgttcaagtgattaa

SEQ ID NO: 414977 - DNA, 588 bp, Staphylococcus aureus; identical to SEQ ID NO: 410937

SEQ ID NO: 414978 - DNA, 588 bp, Staphylococcus aureus
atggggtatttgatgtcagagacactcaatcaaattaaagaaagttttattgaatatttactttttcaatatcgatttaagtcgcgtattgcagtttgggtgcttaactatataaaagtgaatgaggcgaaattggcaaacattcattttgtagatacaaaaattaatcatcatgaaacattagaaattgcagaagtgggaagtcacgcttctgcaattcaatttactaagcgtaatataaagttaatgaatacaaatgaaatatttgattatatcgctaatcataactgtgcttttgatattcaaattcacttcgcaaacgtgtcaaagcgtgagcaaaggctagatgatttaatagttgctcaactaacggaatcgcccagttatcaaacttatcttcatgacttaaatagtatggctatagatcggcataaacatgcgttattaatagattacttgttacacaatattgatttaagtttacagatgaatgaaaagcaacgtttttatcaactaacgcaaattttaaatacactcaagctagtaaataaacataatcaatttgaggacttagcagatgacgattaa

SEQ ID NO: 414979 - DNA, 1245 bp, Staphylococcus aureus
atggaagatatctataaattaatagacgatatcaatctacaaaaactagaaaatttagactctcgtgttaatgaagcaataactactgacaacgatgacgcattatttattctaggagagacactttacaattttggattaatgccacaaggtttggaagtattccgcgtgttatatcacaaatatccagacgaaagtgaattgctgatttattttattgaaggtttaatgtctgaaaatcaaactgacgaagcgttagaatatttaagttatgttgaaccatcacctgaaaagttgatgttagaagcagatttatatcaacaaattaatatgatggaagttgctattgataaattacaagaagcacttgaactagagccaaatgatccaataatccattttgcattggctgaaatgttatattatgatggtcaatatttacgtgctacctctgaatacgaaaccgttttagaaactggtgaatatcaagttaatggtgtaaacttattctctcgtatggcagattgtagtttacaaagtggtaactatagtgatgcgattcgcttatacgatgaaattaatgaagatgaaatgacttcagaagattatctcaaaaaagccatttcttacgataaaaatgacatcactcaagaagcaattaaaataatgactacattactttctaaagatcctgattatattcaaggctacttgtatttacaatcattatatgaaaatgaaaaaaattatccagatgccattgagacgggtaaagaaggattacgactaagtcaattttataaagagttaatgtatacaactggatgtttggaaatagaacacggcgatgctaatgaaggtgtattattgttaaaacaagcattagaggttgataatgcttaccaagaacctttattgattttaagcgatttatatcgtaatgaagaagattatgaagcaatcattgaattattaacatatgtagatgaagaagatttggatcctacattcatgtggcatttagcgttcgcctatggtcaagaagagcgagataaagaagctcaacatttctttgaattagcatatccaacgatgaaaacaaatattgattttatgagtgattattatttctatttaattgaaattggtcaaaaggaacaagcaattactattttaaatcaattgttggaactagagccaagtaacgaaaattggcatgacgaattatcaagattgcaatcttaa

SEQ ID NO: 414980 - DNA, 1299 bp, Staphylococcus aureus
atggtaagtgaacaaattatcgatatttcagggccacttaaaggtgaaatagaagtgcctggagataagtcgatgacacatcgagcaatcatgttagcatctttagctgaaggaacttccaatatttataaaccattacttggtgaagattgtcgtcgtacaatggatatattccgattattaggcgtagatattaaagaagatgaagataaattggttgtgaattcacctggatataaagcttttaaaacacctcatcaagttttatatactggaaactctggcacaacgactcgattgttagctggtttgttaagtggtttaggtattgaaagtgttttgtctggcgatgtttcaattggtaaaaggccaatggatcgtgtcttgagaccattgaaacttatggatgcgaatattgaaggtattgaagataattatacaccattaattattaagccatctgtcataaaaggtataaattatcaaatggaagttgcaagtgcacaagtaaaaagtgccattttatttgcaagtttgttttcaaatgatacaacggtaataaaggaattagatgtaagtcgaaatcatactgagacgatgttcagacattttaatattccaattgaagcagaaaggttatcaataactacaacccctgatgccattcaacatattaaacctgcagattttcatgttcctggcgatatttcatctgcagcgttctttattgttgcagcacttatcacaccagaaagtgatgtaacaattcataatgttggaatcaatccaacacgttcaggtattattgatattgttgaaaaaatgggcggtaatatccaacttttcaatcaaacaactggtgctgaacctactgcttctattcgtattcaatacacaccaatgcttcaaccaataacaatcgaaggagaattagttccaaaagcaattgatgaactgcctgtaatagcattactttgtacacaagcagttggcacgagtacaattaaagatgccgaggaattaaaagtaaaagaaacaaatagaattgatacaacggctgatatgttaaacttgttagggtttgaattacaaccaactaatgatggattgattattcatccgtcagaatttaaaacaaatgcaacagttgatagtttaactgatcatcgaataggaatgatgcttgcagttgcttctctactttcaagcgagcctgtcaaaatcaaacaatttgatgctgtaaatgtatcatttccaggatttttaccaaaactaaagcttttagaaaatgagggataa

SEQ ID NO: 414981 - DNA, 1065 bp, Staphylococcus aureus
atgaaattacaaacaacctatccttcaaacaattatccaatatttattgaacatggtgcaattgaccatattagcacgtatattgatcagtttgatcaaagttttatattaattgacgagcatgtaaatcaatattttgctgataaatttgatgatattttatcatatgaaaatgtgcataaagtcattattccagctggtgaaaagacgaaaacatttgagcaatatcaagaaacattagaatacattttgtcacatcatgtaacgcgtaatacagcgattatagctgttggtggtggtgcgacaggagattttgcaggatttgtagcagcaacactattaagaggtgtccattttatacaagttcctacaacgattttggcgcatgattctagtgttggcggtaaagtgggtattaactcaaaacaaggtaaaaaccttatcggtgcattttatcgtccaactgctgtgatttatgatttagactttttaaagacgttaccatttgagcaaatattaagtggctatgcagaagtttataagcatgcgttattgaatggtgaatcaacgacgcaagaaatcgaacagcactttaaagatagagagatattacagtcattaaatggtatggataaatatattgctaaaggtattgaaacgaagctggatattgttgttgcagatgaaaaagaacaaggtgtacgtaaatttttaaatttaggtcatacatttggtcatgccgtggagtataaccacaaaattgcacacggtcatgccgtaatgataggcataatatatcaatttattgttgcgaatatattgttcaattctaatcacgatatccaacattatattaattatttaacgaaattaggttatcctttagaaacaataaccgacatagatttcgaaacgatatatcaatacatgctaagtgataaaaagaacgacaaacaaggagttcaaatggtattgattaaacattttggcgatattgtagtgcaacacattgatcaaacaacactgcaacatgcgtgtgaacaactaaaaacatattttaagtag

SEQ ID NO: 414982 - DNA, 1167 bp, Staphylococcus aureus
atgagatatctaacttcaggagaatcacatggacctcaattaacagttattgtcgaaggtataccagcaaatttagaaattaaagttgaagatattaataaagaaatgttcaagcgtcaagggggttatggtcgtggccgacgcatgcaaattgagaaagatacagtagaaatagtatcaggcgttagaaatggttatacattaggtagtccaattactatggttgtaaccaatgatgactttacgcattggagaaaaattatgggagcagctccaataagtgaagaagaacgtgaaaatatgaaacgtactattacaaaaccaagacctggtcatgcagatttggttggaggtatgaaatataatcatcgtgatttacgaaatgtgctagagcgatcatctgctagagaaacagcagctcgagttgcagtcggtgccttatgtaaagtgttattacaacagttagatatcgatatatacagtcgtgttgttgaaataggtggcattaaagataaagatttttatgattcagaaacatttaaagcaaatcttgatcgtaatgatgttcgtgtaattgatgacagtatcgcacaagcaatgcgagataaaattgacgaagctaaaaatgaaggagattcaattggcggtgtcgttcaagttgtagttgaaaatatgcctgttggtgttggtagttatgtgcattatgatcgtaagttagatggtaagattgcacaaggtgttgtcagcataaatgcttttaaaggtgtaagctttggagaaggatttaaagcagctgaaaagccaggtagtgagattcaagatgaaattctatataatagtgaaattggttattatcgtggatctaatcatttaggtggtttagagggtggtatgtcaaatggtatgccaattattgtaaatggtgtaatgaaacctattcctacgttatataaaccattaaattcagttgatataaatactaaagaagactttaaggcaacaattgaacgttctgatagttgtgctgtacctgcagcaagtatagtgtgtgaacacgttgttgcatttgaaatagcgaaagcattacttgaagagtttcaatcaaaccatattgaacaacttcaacaacaaattgctgaccgcagacaattaaatgttgagttttaa

SEQ ID NO: 414983 - DNA, 987 bp, Staphylococcus aureus; identical to SEQ ID NO: 414777

SEQ ID NO: 414984 - DNA, 153 bp, Staphylococcus aureus; identical to SEQ ID NO: 414662

SEQ ID NO: 414985 - DNA, 792 bp, Staphylococcus aureus
atgagcaataaatataaagaacaagcccaagacattcttacagctgtaggtggtgtcgaaaacattgttgatgcaacgtatgatacgaagtgcattacaattcatatgcaacatacaattccttctacagcaaatgaagtgaaacaaatagttgatgtgacatctgtagcagaaaatgatgcgcagttagtcataaaattaaatggaaatgtcgatgaagtgtatcagcaattacagcgattaattaagaatgctaatgtcgaagagagtgagaatactgacaatattaatagccaagatacaagttatacacctcaagtaaaagtaacaacaccaattttagtgaaagcaccaatcgctggtcgtcgtattttacttaaagaagtaagagattcaatttttagagagaaaatggtaggtgaaggcttagcaatcaaagctcatgaagaatccaaagtaatcgcaccgttcaatggtttaatatctatgattgtaccaactaagcatgcagttggtattcaatcagaagacggtgtggacatagtcattcatattggcgtgaatacagttgacttggaaggtaaagggttcaagtgctttgtaaagcaaaatgatcatgttgaagcagggcaaacgttgttgcaattcgaccagcaatatatacaacaacaaggctacaatgctgacgttattgtcgttattagcaactctgccgatttaggaaaagtagaactgacaatgaatgaaatcattacgactgaagatgttatttttaaaatatttaaaaactag

SEQ ID NO: 414986 - DNA, 1437 bp, Staphylococcus aureus; identical to SEQ ID NO: 413351

SEQ ID NO: 414987 - DNA, 1053 bp, Staphylococcus aureus
atgttaacgtcatcatttagaaacagcaatgaataccctgaaattgtatttgttggtaatcacttatcatcaacatatacgaaagagttagttgattatttagcagacaaagatttctctgtaaacgttatttctaaatctggtacaactacagaaccagcagttgcatttagattgttcaaacaattagttgaagaaagatacggtaaagaagaagcacaaaaacgtatatttgcaacaacggataaagaaaaaggtgctttaaaacagttggctacaaacgaaggttatgaaacgtttatcgtacctgatgatgtaggtggaagatattctgttttaacagcagtaggattattaccaattgcaacagctggaattaacatcgaagctatgatgattggtgctgcaaaagcacgtgaagaattatcttcagataaattagaagacaacattgcataccaatatgcgacaattcgaaacattttatatgcaaaaggttatacaacagaaatgttgattaactatgaaccatctatgcaatactttaatgaatggtggaaacaattatttggtgaatcagaaggtaaagacttcaaaggtatctatccttcaagtgccaactacacaactgatttacattctttaggtcaatatgtacaagaaggccgtcgtttcttattcgaaacagtggtaaaagtaaatcatcctaaatatgatattactattgaaaaagatagtgatgatctagacggattaaattatttggctggtaaaacaatcgacgaagttaacacaaaagcattcgaaggtacattattagcgcatactgatggtggtgttcctaacatggtagtgaacattccacaattagatgaagaaactttcggttatgtcgtatacttcttcgaacttgcttgtgcaatgagtggataccaattaggtgtaaatccatttaaccaacctggtgtagaagcatataaacaaaacatgttcgcattattaggtaaacctggttttgaagacttgaaaaaagaattagaagagcgtttataa

SEQ ID NO: 414988 - DNA, 150 bp, Staphylococcus aureus; identical to SEQ ID NO: 405938

SEQ ID NO: 414989 - DNA, 252 bp, Staphylococcus aureus
atgtgtataagagacagagattatactgctaatagtaatacagtagcaacgttgtttagtacgaatgataaaaaaaatagaaaagaaaagataaataatgtaatagatttatccgagaaaattgaaagaacaaaagatatgccaatcaagaatactataactactcaattaggaaataaacttattggcacaaaaaaagctcgttttgatgataagaaagtagtgtcgtttggagcatttgaagatgaataa

SEQ ID NO: 414990 - DNA, 873 bp, Staphylococcus aureus
atgtcaaacgtactaacagaaatagatagtcaatatccatatatgactaaaaatgaaaaaaagatagctaaatttatactaaattcacctcaaaaggtgattaaaatgaggtctcaagacttagcaagcttattagatattagtacatcatcagtcattcgattcagcaagaaaattactgatggcggttttcacgacttgaaaataaatatatctaaatatgttcctaaagcatcatcaatttacaatgttgaattaatgaataacgaaagcacagaatctttaagaactaaactccatacacgtactacacgcgcacttaatcatgcaaataacgaattaaatgataaaactattgatcaaatatgtcattgtttaaaacgttctgagacgatttttatatatggttttggcgcatcttttgtagttgctaccgacttataccaaaagttatcaagaataggtcttaatattcaacttgttcaagaaacacatatttttgctacattattagcaactcacaattcgaacgacagtgttattcttattactaacaatggtacgcaaagtgaaatgcaatcaatggttaaagttattgatgactaccatatacctataattacaattactagtacaagggataatcccgtagcacaggcatcaaatattgttttaacttatgggaaaactgatgaaaatgagatgcatatgggagcaacaacttcattatttgctcaaatgttcactattgatattttatattatcgttatgttgcattaaattatcacgcatcattagatttcataacacaatctaaaatggctttagataactatcgtaaacatttatcaaatattaactttaaacattaa

SEQ ID NO: 414991 - DNA, 1548 bp, Staphylococcus aureus
atgaaaaagaaattaggtatgttacttcttgtaccagccgtaactttatcattagccgcatgtgggaatgatgatggaaaagataaagatggcaaggtaacaattaaaacgacagtttatccattgcaatcatttgcagagcaaattggtggaaaacacgtgaaggtatcatcaatctatccagcagggacagatttacatagctatgaaccaacacaaaaagatatattaagtgcaagcaagtcagacttgtttatgtatacaggggataatttagatccggttgctaagaaagttgcatctactatcaaagataaagataaaaaacggtctttagaggataaattagataaagcaaagcttttaactgatcaacacgagcatggtgaagagcatgaacatgaggggcatgatcatgagaaagaagaacatcatcatcatggtggatatgatccacacgtatggttagatcctaaaattaaccaaactttcgctaaagaaattaaagatgaattagtgaaaaaagatccaaaacataaagatgactatgagaaaaactacaaaaaattaaacgacgatcttaagaaaattgataacgatatgaagcaagttacaaaagataagcaaggtaatgcagtatttatttcacatgaatcaattggatacttagctgatcgttatggttttgttcaaaaaggtattcaaaatatgaatgctgaagatccatcacaaaaagaattaactaaaattgttaaagaaattagagatagcaatgctaaatatattctttacgaagataatgttgcgaataaagtgactgaaacaattcgtaaagaaacagatgcgaagcctttaaaattctacaacatggagtctttaaataaagaacaacagaaaaaagataatattacgtatcaatcattaatgaaatcgaatattgaaaatatcggtaaagctttagacagtggtgttaaagtgaaagacgacaaagctgaaagtaaacacgataaagcaatttctgatgggtattttaaagatgagcaagttaaagaccgtgaattaagcgattatgctggtgaatggcaatctgtttacccttacttaaaagacggtacgcttgatgaagtgatggaacataaagctgaaaatgatccgaagaaatctgctaaagatttaaaagcttattatgacaaaggatataaaactgatattactaacattgatataaaaggaaatgaaattacatttactaaagatggtaagaaacacactggtaaatatgaatacaatggtaagaaaacattgaaatatcctaaaggtaaccgtggcgtgagatttatgtttaaattggtcgatggtaatgataaagacttaccgaaattcatccaatttagcgatcacaacattgcacctaaaaaggcagaacacttccatatctttatgggtaatgataatgacgcgttattaaaagaaatggataactggccaacatattatccttcaaaattaaataaagaccaaatcaaagaagaaatgttagcacattaa

SEQ ID NO: 414992 - DNA, 189 bp, Staphylococcus aureus; identical to SEQ ID NO: 408212

SEQ ID NO: 414993 - DNA, 630 bp, Staphylococcus aureus; identical to SEQ ID NO: 409261

SEQ ID NO: 414994 - DNA, 267 bp, Staphylococcus aureus
atgtgtataagagacagttctaaagcagtggaatattattttgcaaaaaacaaggaaatatatggagatggatatgaaaagtatttagacgagtattttagaaatgttttaggcgaaaaaagttatttaattttgatagatgatttttcagggacaggaaaatcaatcagcgactttattgatgcaataaaaaagtatatactaacattaaaaatagagattattatattttgcatacatataaccgaagatgcagaaaaaaaataa

SEQ ID NO: 414995 - DNA, 1014 bp, Staphylococcus aureus
ttgattgattatgacttcggaattgattttgcagaaagagcaatcaaaaatgaagacatagttaataaaaatgttaatttttttcaacaaaacaggcttaaagagattgttaattatagaaggaatagtgtagattacgttagaccttcagaatcttatatatcagtccaaggacatccacagaatcctcaaatttttggaaaaacgatgacttgtggtacaagtatttcattgcgtgtaccgaatagaaagcagcaattcatagataaaattagtgtgataatcaaagaaataaacgctattattaatcttcctcaaaaaattagtgaatttcctagaatagtaactttaaaagacttgaataaaatagaagtattagatactttattgctaaaaaaactatcgaattcttcaactacagaaaatatatctatagatatatcaagatttttagaactaagtaatatgatactcttgttagatgatatgctcgacgtcaatatatatataaattcttttaaaaataatacattagagacatttgatgcgactgatcctgaagttgattacatcactgaaataggagattacttattaaaatatgacgttaattctataaatgatgtcagaattgaagtgatagataatttggggcattcaaataatatgctactaaaaacgatactacatgcagaagttgaaatggaagatggaaagaaatatttattacaaaatgggaaatggggttattttaatagagaattttttgaccttttgaatgatcatttgaatgagatagaaattaggtataacacactaactcccacaggtttagtatttaaagaaggagaagaaggatatataaaagaaatagtaggaagattgccagaagaatatttaatgttacataaaaaattcataaaaccaataaataagaattttatagtaaaaggaaatggaatagagttggcagacttatacaatattaaaaacctgtctcttatacacatctga

SEQ ID NO: 414996 - DNA, 1110 bp, Staphylococcus aureus
atgtcagattatttaagtgtttcagctttaacgaaatatattaaatataaatttgatcaagatccacatctccaatctgtattgattaaaggtgagctttcaaatttcaaaaagcattcaagtggtcatttatactttaatgtgaaagataaagagagcgttataagtgccatgatgttcaaaggtagtgcttctaaattaaacttcgaacctaaagaaggagatgaagtcttattagaagcacgtgtttctgtttttgaacgtcgtggaaactatcaaatttatgtaaataaaatgcaattagatggtatagggaacttatatcaaaaattagaagcattaaagaaaaaattaactgaagaaggttgttttgataaagcgaataagaaatcaatacctaagtttcctaaaaaaattgcagttttaacagcgagtacaggtgccgcaattcgagatatccattcaacgataaatagtcgttttccattagctgaacaaatacaaattagtactttggttcaaggtgaaaaagcaaaagacgacattattgaaaaaattgaatatgcagatagtttaggtgtagataccattattgtaggtcgaggtggtggatccatagaagatttatggaatttcaacgaagaagctgtcgtccgtgcaatatataattgtaagacaccgattatatcagcagtaggtcatgaaacagactttacattaagtgattttgctgcagacatcagagctgcgactccaactcaagctgctgttattgcaacaccagaccaatatgaattgctgcaacaaatacagcaatatcagtttacattgactcgtttcatcaagaaacatttagaacaacaacgtaaacatgttgaacatttgtcatcgtattacaagtttaaacaaccaactttattgtatgatcaacagatacaacgtcgagatgatttagaaaagagactgaaacaacaaattcaggcaacttttgaacaacagagacatcgattaatgctgttgcaacaacgttataatttaaaagcattactaagtagtgttaatcaagaacaacaaaataatcttcaattgctgtctcttatacacatctga

SEQ ID NO: 414997 - DNA, 507 bp, Staphylococcus aureus
atgataattaaaattttaacaattctattactactttgtatattgagctatttggttacaaatagaaagaagccttttctgttcttaaagacactctttatgggtgtggtatttatctttataggatatatttcactggcaatatctgccgtaattatttatggtattattcaatttatcacaattgattttggtagttttttcttaatgggtattatattgatcttgatttcaagtatattccaattatttatagttagattactttttagaaaaaagaatgtcgatttgacagaggttgtcgttttagagcatttaattcaatggttcttagtttactttgcgatctatcaagcagtaaatgaaaaaatggacattaatgatattaatatcgacaatttccaatctgtcttttttgacgtgtctaatttgaatttagtaattctaccaacgttaatcattagctgggtcacaatatttaactatagaatgagaagttacaaataa

SEQ ID NO: 414998 - DNA, 822 bp, Staphylococcus aureus
atgtgtataagagacagctatgatatttctatctttttcttagttatcggtatcatgtactttattattactcttatattaatgactcaagtttatggattctttgcagtgattttcattattccatttacaattcatataggatatatcgtctataaagatgaattgaatcaggaaaatgtaaaaaatcatttcatgtggataattgtgagttatggtataagttacttaattacacaaattgcattgtatggcagaattgatgctaatgaaatagagtcaattgatatcttaagtgtcaatgctttctttataattatgtggttacttggtcaaatggctatttggaatttcttgttcttgcgccgagctttacctttaacaaagcaagaattaggtgaagaggagccagaattatcaagaacaagtaaagggaatgtcacgaatcaaactaaaattcacttgaaacaactccaagataagactacagaatatgcacgtaagacaagaagaagtgtcgatttagataaaattagagctaaaagagataaattcaaaaagaaagttaatgatattatcgatattcaagaagacgatattcctgattggatgagaaaaccgaaatgggttaaaccaatgtatgtcgaactattttgtggtgtcgtcatctttttattcacatttttagaatttaataatcgtaatgcattatttgtatctggtgattggaaattatcacagacacaatatgttattgaatgggttacattattaattctgttattcattattatcgcatatatcgctacaactatttactag

SEQ ID NO: 414999 - DNA, 135 bp, Staphylococcus aureus; identical to SEQ ID NO: 405310

SEQ ID NO: 415000 - DNA, 492 bp, Staphylococcus aureus
atgacaccattagtagaaccaaaaccaaaaacagtgtcttcaaataataaaagtaatagtaatagcagtacattaaattatttgaaaacattagagaatagaggatgggatttcgacggtagttatggatggcaatgtttcgatttagttaatgtatattggaatcatctttatggtcatggattaaaaggatatggagctaaagatataccatatgcaaataattttaatagtgaagctaaaatttatcacaacacaccaactttcaaagctgaacctggggacttagtggtttttagtggaagatttggtggaggatatggtcatacagctattgtcttaaatggtgattatgatggaaaattaatgaagttccaaagtttagatcaaaactggaataatggtggatggcgtaaagcagaggttgcacataaagttgttcataattatgaaaatgatatgatttttattagaccatttaaaaaagcataa

SEQ ID NO: 415001 - DNA, 204 bp, Staphylococcus aureus
atgggcgatgcagtaattgaaggttacataaatgaaaataaagaagatgattttgttgcatatgggtctccagaacataattatcaatttggtggaagtttaatcaaaagtaaaaatttaagcacgttattaaaaccagtacatcaaaccaaatcacctgatgagataaaaaaggaattagagtctaaaaagaacgaccgctaa

SEQ ID NO: 415002 - DNA, 249 bp, Staphylococcus aureus
atgttgaatttattaagtaatgttgaaacgtcactatatgaaattcaaatgttaaattataaatatgaaaatattcaattacgtaatttcccattcggaggagacatcatcttcgtgcgtattatccgtaataatgagtcgattgttccgcatggagatacacaattgcgatatggagatcgcttaattgttaccggtgctaaagaatacgttgatgaattgaagcaagagttagaattttatttttaa

SEQ ID NO: 415003 - DNA, 222 bp, Staphylococcus aureus; identical to SEQ ID NO: 408076

SEQ ID NO: 415004 - DNA, 150 bp, Staphylococcus aureus
atgaactatttcagatataaacaatttaacaaggatgttatcactgtagctgttggctactatctaagatatgcattgagttatcgtgatatatctgaaatattaagtgaacgtggtgtaaacgttcatcattcaacggtctaccgttag

SEQ ID NO: 415005 - DNA, 333 bp, Staphylococcus aureus
atgggtaaaatttattatgaaaactttaatgaagcggttattatgctaatatgtgtagcactatgggcattgattggaattttgtttacttatggtaatttgatatttacagataccgattggagtataacaaaacagactgtagttcactttatattgatgataatcctattcttcccactcgctattctagcaggttggttccatctgaactttgagaatattattagtttcatcataatatttattgtagtgtatatcacgatgtggtttgggacatatcaaagaaataaaaagataattcatgaggcaaataataaattaggtcattaa

SEQ ID NO: 415006 - DNA, 378 bp, Staphylococcus aureus
gtggcgtataaaatagatgataaacaagaccaacgtttagttaatgatacattaaatcaaatcgatatacctgaggggtatatattacatagtgatcaaggcagcgtttatacatcttatgcttattatcaattatgcgaagaaaaaggcattatcagaagtatgtcccgaaagggaacacctgccgataacgccccgatagaaagtttccattcctcgctaaagtctgaaactctttacatcaataatcagcttaatagctctaatcatattgtaatagatattgtcgaaaagtacattaaaaactataataataatcaaattcaacaaaaactaggctacttatcccctgtaaaatacagagaattaatagcctag

SEQ ID NO: 415007 - DNA, 354 bp, Staphylococcus aureus; identical to SEQ ID NO: 414837

SEQ ID NO: 415008 - DNA, 315 bp, Staphylococcus aureus; identical to SEQ ID NO: 409251

SEQ ID NO: 415009 - DNA, 1086 bp, Staphylococcus aureus; identical to SEQ ID NO: 408860

SEQ ID NO: 415010 - DNA, 627 bp, Staphylococcus aureus
ttgttagatgaatctttatccgcattagatttgaaattgcgtactgaaatgcaatatgaattacgagaattgcaatctagattaggtattacatttatatttgtaacacatgatcaagaagaagcgttagcattaagtgactttctttttgtattaaaagatgggaaaattcaacaatttggcacaccaacagatatatatgacgaaccagtgaatcgatttgtagctgattttattggagaatctaatattgttgaaggacgcatggttagagattatgtcgtgaatatttatgggcaagatttcgaatgtgtcgatatgggtattcctgaaaataaaaaagtagaagtcgttattcgaccagaagatatatcattaatcaaagctgaagaaggattatttaaagcaactgttgattctatgttatttagaggggtccactatgaaatatgttgtatagacaataaaggttatgaatgggtaatacaaacgactaaaaaagctgaagtaggcagtgaagttggtctttattttgatcctgaagccattcatattatggttcctggagaaacagaagaagaatttgataaacgtattgaaagctatgaggaagtagacaatgcgtaa

SEQ ID NO: 415011 - DNA, 411 bp, Staphylococcus aureus
gtgtataagagacagcatataaaagagcacagaaatcaaatcaatgattgtcactttacaaatatattaaataaagatgcagaaaaaactaatagttcaagtatcttaacttcattatttttaactgcaaacaatataccaaataatctatcatctaatttttctaaagcagtggaatattattttgcaaaaaacaaggaaatatatggagatggatatgaaaagtatttagacgagtattttagaaatgttttaggcgaaaaaagttatttaattttgatagatgatttttcagggacaggaaaatcaatcagcgactttattgatgcaataaaaaagtatatactaacattaaaaatagagattattatattttgcatacatataaccgaagatgcagaaaaaaaataa

SEQ ID NO: 415012 - DNA, 201 bp, Staphylococcus aureus
ttgaaacatctaacaaaaatatttgttattgaagtagacaatgcaagattaaatggtagtgtcatttcattttattcaactgctagtaatacaatactcagtgttatttctgaagactggttgataatggacatgcatatttacaaaactgtgtatattgtgtatattgtatatatacagaagttgatagggggacgttga

SEQ ID NO: 415013 - DNA, 546 bp, Staphylococcus aureus
atggtgtttccacctaagtattatggtcaggtcgaagaaaaattaagtaagacagatgccttgatgtataaattattttacaatcgctgccaagaacttatcttatcaagactgcaatctgataaaagcgaaaaagcatataaaaatattttcaatttaaacaatcaagttgaaacgttaataagttatcaacgtgatgaattaagctatcataagaaaaaagaatgtgattggaaattactcaatcaattaactaaacgtgcatatacgaatcgtttgtttatcactcatttatcaaatatcatttacttgcctaaaaatactcgtgttaacttttcaggtgacgaaaaaatggcattgctaaaaattagtagtagcatcaaagatatattttatgatggtacttttaagagagaagatgattctgtagaaactttacgttcgactataaaagcacttgaaattagtggtgaaaatcaaattaaaagtcatatactatacgaagttctaatgatttatcgactgctagacagcagatatgcttaa

SEQ ID NO: 415014 - DNA, 243 bp, Staphylococcus aureus; identical to SEQ ID NO: 411711

SEQ ID NO: 415015 - DNA, 783 bp, Staphylococcus aureus; identical to SEQ ID NO: 408857

SEQ ID NO: 415016 - DNA, 357 bp, Staphylococcus aureus; identical to SEQ ID NO: 409083

SEQ ID NO: 415017 - DNA, 186 bp, Staphylococcus aureus
atgtcaaaaaaggaaaatacgacaacaacactatttgtatatgaaaaaccaaaatcaacaattagtgaaaagtttcgaggtatacgttcaaacatcatgttttcaaaagcaaatggtgaagtaaagcgcttattggttacttctgaaaagcctgtgcaggtaaaagtacagttgtatcgaatgtag

SEQ ID NO: 415018 - DNA, 879 bp, Staphylococcus aureus
atggagaaaattgagaatgaaatagttaataagacatatcttgcaattaattctttggaagaattaagaaatatgattggtattaaatcagactatttttataaatgtctttatgtgaatgaccatttttataatgttatcaaaatacctaaacgaaaaaaagatgaatatagagaattgatgattcctaatatggctctcaaaaatatccaaaggtggattttagataatgtattgtacagaaggcaagttcataaatgtgcaactggttttgttcctaggaaatcaatagtgaacaatgcaatcccacacgttgggcagaaatatatattgaaaatggatatagaaaacttttttccgagtatcacatttaagcaggttagaaaaatattttctgagatgggctataaatttgaacttgcgacagcactcgcaaatttgtgtacagtgaataatcagttgcctcaaggtgcaccaaccagtccatatatagctaatatcatcttttacaatatagataaaagaatcttttcttattgtcaaaaaaataatttgagatatactcgatatgctgatgatattactatttctggatctaataaagtaagttttagtaaagaaattatcagggaaatagtaaaccaatataattttagaattaatgaaagtaagacaattatgtttaaaccaggagacagaaaaaaagttactggtattatagttaatgaaaaaatatcggttcctaaaactttaataagagaggtcaggaagcaaatttattttgtaaataagtttggattagaagaacacttaattcgaaataattattcattggattatgagcagcaatttattatgctgtctcttatacacatctga

SEQ ID NO: 415019 - DNA, 630 bp, Staphylococcus aureus; identical to SEQ ID NO: 409261

SEQ ID NO: 415020 - DNA, 777 bp, Staphylococcus aureus
atgaagaaattatctactgtaattattattttgattctagaaatagtttttcataatatgaattatgtgaatgctcaacccgatcctaaattagacgaactaaataaagtaagtgattataaaaataataagggaactatgggtaatgtaatgaatctttatacgtctccacctgttgaaggaagaggagttattaattctagacagtttttatctcatgatttaatttttccaattgagtataagagttataatgaggttaaaactgaattagaaaatacagaattagctaacaattataaagataaaaaattagacatttttggcgttccatatttttatacatgtataatacctaaatctgaaccggatataaaccaaaattttggaggttgttgtatgtatggtggtcttacatttaatagttcagaaaatgaaagagataaattaattactgtacaggtaacaatcgacaatagacaatcacttggatttacaataactacaaataagaatatggttactattcaggaactagattacaaagcaagacactggctcactaaagaaaaaaagctatacgagtttgatggttctgcatttgaatctggatatataaaatttactgaaaagaacaatacaagtttttggtttgacttatttcctaaaaaagaactagtaccttttgttccatataagtttttaaatatttacggagataataaagttgttgattctaagagtattaaaatggaagtatttcttaatactcactga

SEQ ID NO: 415021 - DNA, 792 bp, Staphylococcus aureus
atgcattcaaagaaattaatgctcggtatatgtttggtattactcattatattgattgtaggttatgtcattatgacaaaaataaatagtcgaagcgcccaaattaaagacacatttaatcaaacattaaaattatatccaaccaaaaatcttgaagacttttatgataaggaaggctttcgagatcaagagtttgaaaagggcgacaaaggcaattggattgttgattctgagatggtaattgagctgaaggataaaaaaatggaatctagaagtatggtgctctatataaatcgtaatactagaacaacgaaaggtaattttattgttagagaattgtgggaagatagtaaagggtatgcacaaagtaaagatacaaaatatccagtgaaaatggaacataatcgaattatcccaacgaaaccgatagctgatgataaattaagaaaagaaatcgaaaactttaaattctttgtacaatacggtgactttaaagatattaatgattataaagatggtgacatttcatataatcctaatgttccaagttattccgcaaaatatcaattgaaaaacgatgattacaatgtgaagcaacttcgaaaaagatataatattccaaccaacaaagctccgaaactattattgaaaggtgatggtgatttaaaaggttcatcaataggatcaaaaaatctagaatttacctttgtagaaaataaagaagaaaacatttattttacagattctgtacaatatacttcaagtgaggatacaagttatgagtcaaactga

SEQ ID NO: 415022 - DNA, 1194 bp, Staphylococcus aureus; identical to SEQ ID NO: 408107

SEQ ID NO: 415023 - DNA, 1086 bp, Staphylococcus aureus; identical to SEQ ID NO: 408860

SEQ ID NO: 415024 - DNA, 708 bp, Staphylococcus aureus
atgaataaaaatgtaatggttaaaggtttaactgctttaactattttaacatctcttggtttcgctgaaaatatttctaatcagcctcattcaattgccaaagcagaaaagaatgtcaaagaaattaccgatgcaactaaggcaccatacaattcagtggtagcatttgcgggtggtactggtgtagttgttggtaaaaatacaatcgtaactaacaaacatatcgctaaaagtaatgatatttttaaaaatagagtagcagcacattattcgagtaaaggtaaaggcggaggaaactacgacgttaaagacattgtagaatatcctggaaaagaagaccttgcgatagttcatgttcatgaaacaagtacagaaggtttgaattttaataagaacgttagttatacaaaatttgcagaaggagcaaaagcgaaagatagaatttctgttattggttatccaaagggtgcacaaacaaaatataaaatgtttgaatcgacaggaacgattaaccatatcagtggaacgtttatagaatttgatgcgtatgcacaaccaggtaattcaggatctcctgtattgaattctaaacatgaactgattggtattttatatgcaggtagtggaaaagatgaatctgaaactaatttcggtgtttatttcacaccacaattaaaagaatttattcaaaataatattgaaaaataa

SEQ ID NO: 415025 - DNA, 420 bp, Staphylococcus aureus; identical to SEQ ID NO: 407204

SEQ ID NO: 415026 - DNA, 612 bp, Staphylococcus aureus; identical to SEQ ID NO: 407203

SEQ ID NO: 415027 - DNA, 579 bp, Staphylococcus aureus; identical to SEQ ID NO: 407202

SEQ ID NO: 415028 - DNA, 381 bp, Staphylococcus aureus; identical to SEQ ID NO: 407201

SEQ ID NO: 415029 - DNA, 1758 bp, Staphylococcus aureus; identical to SEQ ID NO: 407200

SEQ ID NO: 415030 - DNA, 846 bp, Staphylococcus aureus; identical to SEQ ID NO: 407199

SEQ ID NO: 415031 - DNA, 870 bp, Staphylococcus aureus; identical to SEQ ID NO: 405540

SEQ ID NO: 415032 - DNA, 294 bp, Staphylococcus aureus
atgacggaagttaagagaaaagcaaaagcatttgatgagatagataatctgatgaataaccgcgaacaaatagaacaatccgtaatcagtgctagtgcgtataacggtaatgacacagagggattactgaaagagattgaagacgtgtataagaaagcgcgagcgtttgatgaaatacttgagggaatgacaaatgctattcaacattcagttaaagaaggtattgaacttgatgaagcagtagggattatggcaggtcaagtggtctataaatatgaggagtgtgaagaataa

SEQ ID NO: 415033 - DNA, 207 bp, Staphylococcus aureus; identical to SEQ ID NO: 407991

SEQ ID NO: 415034 - DNA, 186 bp, Staphylococcus aureus
atgaaaaatagaattagagaatatagaaaacaaaaaggaatttctcaagaaactttaagtaaagaattaaaagtgtctaggcaaactattaatgcaatagaaaacaataaatatgatcctacattgacattagcatttaagttggcaagattgtttgatacaactgtggatgaattattttcttaa

SEQ ID NO: 415035 - DNA, 339 bp, Staphylococcus aureus
atgaatttaattccttttattattattttaattttttcttgtttatggacggctataactaacaaatatttaccttcagaaacattagataaaaaaggacaacaagatcgatacgatgaaagacaacgtaaaatgtttattgaaatactggctaaaagttttatttggattgtatattgtatgttatttacactagtgcttaaatttacaggtttgtcaccaagtattgaaggatcttggttttctcaatatccagaaattttctttataattgtagcactatttcttatgctgtttaattactatactacaaataaaaaatatacatctaaaggttaa

SEQ ID NO: 415036 - DNA, 369 bp, Staphylococcus aureus
atgaaaaagaaagatacttgtgaaattttttgttatgacgaagaaaaggttaatcgaatacaaggggatttacaaacagttgatatttctggtgttagccaaattttaaaggctattgccgatgaaaatagagcaaaaattacttacgctctgtgtcaggatgaagagttgtgtgtttgtgatatagcaaatatcttaggtgttacgatagcaaatgcatctcatcatttacgtacgctttataagcaaggggtggtcaactttagaaaagaaggaaaactagctttatattctttaggtgatgaacatatcaggcagataatgatgatcgccctagcacataagaaagaagtgaaggtcaatgtctga

SEQ ID NO: 415037 - DNA, 2184 bp, Staphylococcus aureus
atgtctgaacaaaaggttaaactaatggaagaagaaatgaacgtctatcgggtccaaggatttacatgtgcaaattgtgcaggaaagtttgagaaaaatgttaaaaagattccaggcgttcaggacgcaaaagtaaactttggcgcttctaaaattgatgtatatggaaatgcatcggttgaagaacttgaaaaagcaggtgcttttgagaatctaaaagtatctcctgaaaaactagcgaatcaaacgatacaaagggttaaagatgacactaaggctcataaagaagagaaaacaccattttataaaaaacatagtacattgctgtttgccacactactaattgcttttggttacctttctcactttgtaaatggagaagataacctcgtaacttccatgttatttgtaggttcgattgtaattggcggatattcactatttaaagttggttttcaaaatttgatacgctttgatttcgacatgaaaaccctgatgaccgtagcagttattggagctgccatcattggtgaatgggcagaggcatccattgttgtcgttctctttgcaatcagtgaagcacttgaacgtttttctatggatagagcaagacagtccattcgttcattgatggatattgccccaaaagaagcacttgttatgcggaatggtcaggaaataatgatccatgtggacgatattgccgtgggtgatattatgatcgtcaaaccaggggagaaaattgccatggatgggatcattataaatggtgtgtcggctgtcaaccaggctgctataacaggagaatctgtccctgttgccaaaacggtagatgatgaagtatttgcaggtacgcttaacgaagagggactacttgaagtaaaaatcaccaaatacgtagaggatacaactatctccaagattattcatctggttgaggaagcacaaggggagcgcgctccagcgcaagcattcgtagataaatttgcgaaatattatacgccgatcattatggttattgcggcgctcgttgcagtcgttccacctttattctttggtggaagttgggatacttgggtttatcaaggattagcggtacttgtagttggatgtccgtgtgcattagttatttctactccaatctcgattgtctcggcaattggaaatgcagctaaaaaaggtgtgttgattaaaggcggtgtctatctagaagaattaggagccattaaggcaatcgcatttgataaaacaggaacactgacaaaaggtgtaccagtggtaacagattttgaagtattaaatgaccaagtggaagaaaaagagctattctctatcattacagctttagaatatcgttcacaacatccacttgcttcagcaataatgaaaaaggcagagcaagataatatcccttattctaatgtacaagtggaagaattcacttcgattactgggcgaggtataaaagggattgtaaacggaactacttactatattggaagcccaaaacttttcaaggaattaaatgtttccgattttagccttgggtttgaaaacaatgtgaaaatcctacaaaaccaaggaaaaacagccatgattattggaacggaaaaaacaattctcggcgtaattgccgttgcagatgaggttcgtgaaacaagtaaaaatgtgattcaaaaacttcatcagttaggtatcaagcaaacaattatgctgacaggtgataatcaaggtactgcaaatgcaatcggtacacatgtaggcgtttctgatattcagtctgaattgatgccacaggataaattagattatattaaaaaaatgcaatcggagtatgataatgtagctatgattggcgatggcgttaatgatgctccagcacttgctgcatctactgttggaattgcaatgggcggtgctggaacggatactgcaattgaaacagctgatattgcattaatgggagatgatttaagtaagcttccatttgcagtaagactcagtcgaaaaactttaaatatcattaaagctaacatcacttttgctatcggaattaaaataattgccttactattagttatcccgggatggttaaccctttggatagcgattctttccgatatgggagctactattttggtagcattaaatagtttacgactgatgagagtgaaggataaatag

SEQ ID NO: 415038 - DNA, 183 bp, Staphylococcus aureus
atggagaaaattaagatgatttatccaactttcaaggacattaaaactttttatgtgtggggttgctataaaaatgagcaaattaagtggtacgtagacatgggtgtaatcgacaaagaagaatatgcattgatcactggtgaaaaatatccagaggcaaaagatgaaaagtcacaggtgtaa

SEQ ID NO: 415039 - DNA, 300 bp, Staphylococcus aureus
atgattcaaacggttgtcactgctgctattctttatattgctacagcatttgatttattagtaattttattaatattttttgctagagcaaagactaaaaaagaatatagagatatttatattggtcaatatttagggtctattattttaatattagttagtttgtttttagcttttgtattaaattatgtttcagagaagtggatattaggtttattgggtttaataccaatttatcttggaattaaagtggctatttatgtgattgtgaaggagaaaagagagctaaaaaagaactga

SEQ ID NO: 415040 - DNA, 396 bp, Staphylococcus aureus
atggaaggtaattttaaaaatgtaaagaagcttatttacgaaggcgaagaatatacaaaagtatatgctggaaatatccaagtatggaaaaagccttcatcttttgtaataaaacccttacctaaaaataaatatccggatagcatagaagaatcaacagcaaaatggacaataaacggagttgaacctaataaaagttatcaggtgacaatagaaaatgtacgtagcggtataatgagggtttcgcaaactaatttaggttcaagtgatttaggaatatcaggagtcaatagcggagttgcaagtaaaaatatcaactttagtaatccttcagggatgttgtatgtcactataagtgatgtttattcaggatctccaacattgaccattgaataa

SEQ ID NO: 415041 - DNA, 366 bp, Staphylococcus aureus
atgcttaaattcgaacgtgtcattgacattttcaataagaaaaacaacggagcatggaatttctgtccgcaaaacgccggttattgggaacatatccctaagagtattacaaaattatcagatttaaaaatcgttggtttagatttctatatcactactgaagaatcaaaacgatttactgattttcctaaagactttaaaggtattgcaggttggatattagaagtaaaatcgaatacaccaggtaacacaacacaagtattaagacgtaataacttcccgtctgcacatcaatttttagttagaaactttggtactggtggcgttggtaaatggagtttattcgaaggaaaggtggttgaataa

SEQ ID NO: 415042 - DNA, 366 bp, Staphylococcus aureus
atgctcaaatttgaacgtgttatcgacatctttaacaagaaaaacaacggctcatggaattttaacccacaaagtgctggttattgggaacatatccctaagagcatcacgaaattgtctgatttaaaaattgttggtttagacttctatatcaccactgaagaatcaaaacgtttttctgacttccctaaagattacaaaggtattgcaggctgggtgttagaagtaaaatcaaatacaccgggtaacacaacacaagtgctaagacgtaataactttgcttctgctcaccagtttttcgttagaaactttggtactggtggtaatagtggttggagcataatagaaggtaaggaggttgaataa

SEQ ID NO: 415043 - DNA, 159 bp, Staphylococcus aureus
atggtaaccaaagaatttttgaaaattaaacttgagtgttcagatatgtacgctcagaaactcatagacgaggcacagggcgatgaaaataagttatatgacctatttatccaaaaacttgcagaacgtcacacacgccccgctgtcgtcgaatattaa

SEQ ID NO: 415044 - DNA, 663 bp, Staphylococcus aureus; identical to SEQ ID NO: 408855

SEQ ID NO: 415045 - DNA, 243 bp, Staphylococcus aureus; identical to SEQ ID NO: 411711

SEQ ID NO: 415046 - DNA, 195 bp, Staphylococcus aureus
atggatcaatatttagcacgtaaaaagaaaaattctgttcattatgaagaagtgccagaagttgaatttaaacgcacatatgtatgtgaagatatgtctaaatgtatttgtttatacaacgcacctgatgaagaagcggtacgtcgcgcgcgaaaagcagttgatacaccgattgatggcatcgaaaaactttaa

SEQ ID NO: 415047 - DNA, 1179 bp, Staphylococcus aureus; identical to SEQ ID NO: 414279

SEQ ID NO: 415048 - DNA, 129 bp, Staphylococcus aureus
atgacaagagaattaaggaaaaaattaactctctatcttaacattgcaactttaatattatttattattaatttaactagaaaaaataaattattctttcattttgacaaaaattatgaaccagtttaa

SEQ ID NO: 415049 - DNA, 1746 bp, Staphylococcus aureus; identical to SEQ ID NO: 408112

SEQ ID NO: 415050 - DNA, 666 bp, Staphylococcus aureus
atgaaaaaaattattaatattctattaattgcaatactatccatcacatttattggtttagcactatttgtagtaaattttgctaaagatacgttcatcaatgacaacacaaaagctgatactgtaagtaaaaaacaagataaagataagaaagatgagaataaatcaccaaaatctgataaccaaaaagatcttgaatctaatgattcaaatcaagacactactcaacacactacaagtaacagccaatctctagaaacagagtctcaagatttaaacaacgataaccaatcatcagaaatgaatcattcagatagctctaaaaataataatgataatcaaacggcttctgacgaagattatattgatgtaatgcaatatgataaaaatggtgatggcttcgtatctactagtgaattaactccagaagctcaaaaactagtagatgaaggtaaattgcaaccaacatcagatgctatggctaaagaatggagtactgcaaaaaaacaaagagaacaatctggaatgactcaagaggaattagataatttatcagaagatgaacaagcattcataggttataatccaaacaatccacgcggagatgtaggtagtcctaaacctgtatattcagatgatgataccgactctagtgaagaagattaa

SEQ ID NO: 415051 - DNA, 1362 bp, Staphylococcus aureus
atggaagaagctattgcttatgtacgtcaaagtacactcaaacaacaaagcttagctactcaaaaatcgctcattatggataccgctaagcaatatggatggtctaatgtgacgttttatgatgataagaaaacaggtcgacatacaaaacgttcgggttatcaaaggatggtagaagcgattcgttctggaagatgtaaagtattgtgttgctatcgcctaaatcggctccatcgtaatttgaaaaatgccatacaactctttgaaatttgtaaaacgcatcatatcacgatcatcagtgttaacgatggctattttaacttagctaaagagtttgattgttttcgcttaaacatacttatgagtctagcggaaatggaatctaacaacatcagcgaacaaacgcgaaatgggataagagaaaaagccaaacaaggcaagctaatcacaactcatgctccgtttggctatcgttatagacaaagtcattttattgtacatgaagaagaagcccatactgtcaaagcggtttatcgctggtacttacaaggtctaggttacaaaaaaatttcccaacatttagataacaatcctaaccttattcctcgtaagccctatcaagttcgaaatattctcttgaaccctaactattgtggtcgtgtcattaataaatatggcacgtttaatgatatcgttccacctattattgatgttgatacatttgaagaagcacaagagcgtcgtattcataaacaacacaatcgatccaattctagaaataagctaaagcgacgaatcaaatgtccttactgtcaatcaacattaacaaacttaacgataaaaaaagagaaacactctctacgttactacgtttgtcctaaaaatatgaatgaagcctatcatacgtgtccatttaaaggtatcaatgcgcaagaatttgagagtaaagtgctcaatacttgtaaagcatattgtgacaatcaatcatttcatgacaaattaaatgaaacagtactaaacgttctaaaacaccaacaaatgaaacacagacaatcacatctaacacaagaacaactcatcgaaaaactggcacaaaatcaaattgatgtcgcaacgtttaaacgtttatctgctgactctgaaagtgaagaacattcctctaattattcatctagtcaaattgctcaagtaatccgtcatataactaaagataaattgacattagaaaccatagtccctttgattgataacatcataataacgcaaacaaaacaattacaaggaatctactttaaaaacagtccactcaatatcgttgaacaatcgtatttaataactcttgaaaggaatgaagtaatatga

SEQ ID NO: 415052 - DNA, 291 bp, Staphylococcus aureus
atgacttataaaagtcaagaatttataaatttaaaaaatacagatttagctattgcaaataatttaccgaaaggcactgaatttacaattggtgatttaactaaaaaatcaggccttaactgttctagaaatgttcaacgcgaggtaggacgttggttcgcttatttcgtaaaacatacacctagcattccttttattattattggtaaaaaaaatggtagtttattgtatcaaaaaataggacctaatccactcaatgatagcaacccttcgaaaggaggtgttcgctaa

SEQ ID NO: 415053 - DNA, 735 bp, Staphylococcus aureus
atgtatgactttttagaatatttacatcactattgtataaaatcgatagaaaattggaaggctgtaccgaacttatcgtgtgaaattgaaagaggaaatattgttgaaagtacagaagctatgataggttatcatgtcattttcaaacaaaataaagttataatttatgataatgatatagcttcaattagtaatataagcggaaattatatagcagcagatttattagttactagatatttagatgcaataggtgaatttataggagtatcggaattagatcaacaaagtcattatgagtggctagtgttttttgagaaaacaagaagaatttttaatggtaaaaatattgtttataagtttttatattacttattcattcatacttatggacaaggaaaccaagatgaaaaaataaaaaaatatatgaaaaatatcatagtgcaaactacattttacggactagataatgctattaatgtaagtttagacgaaagtgatggcaagttgtggtataactttgatactcaagacacaaatattttgtttgaaaaaatagatgaagatgagttacttagaattctagatgaaataagtgatactaataagtatgaatcattatttaatattgtgaccgataaacaaaaagaatttttaaattcaagtattagaccaattttaagtgaagatttagaaggtatgaacaatttggataaagtccgtataattgtgtaa

SEQ ID NO: 415054 - DNA, 501 bp, Staphylococcus aureus
atgaattttgaagaaaaattaagtcaaatgtacaacgagattgcgaatgagattagtgggatgataccagtagaatgggagcaagtatttacaatagcttatgtaactgatcaagctggggaagtcatttttaattatactaaaccaggtagtgatgaattgaattattacacatatatccctagagagtataatgtctctgaaaaagtattttatgatttgtggacggatttatatagattgtttaagaagttaagaaacgcatttaaagaagaagatttagaaccatggacatcatgtgaatttgactttacaagcgaaggtaaattaaaagtttcatttgattatattgattggataaatacagagtttgatcaattaggccgtgaaaattattatatgtataaaaaatttggggttataccagaaatggaatacgaaatggaagaagttaaagaaatcgagcaatatattaaagagcaagatgaagctgaactatag

SEQ ID NO: 415055 - DNA, 1320 bp, Staphylococcus aureus; identical to SEQ ID NO: 408215

SEQ ID NO: 415056 - DNA, 504 bp, Staphylococcus aureus
ttgtatcaaatttggaagaaaaagcataaaaaagcttattacaaatggcgtattgatgagacgtacatcaaaataaaaggaaaatggagctatttatatcgtgccattgatgcagagggacatacattagatatttggttgcgtaagcaacgagataatcattcagcatatgcgtttatcaaacgtctcattaaacaatttggtaaacctcaaaaggtaattacagatcaggcaccttcaacgaaggtagcaatggctaaagtaattaaagcttttaaacttaaacctgactgtcattgtacatcgaaatatctgaataacctcattgagcaagatcaccgtcatattaaagtaagaaagacaaggtatcaaagtatcaatacagcaaagaatactttaaaaggtattgaatgtatttacgctctatataaaaagaaccgcaggtctcatcagatctacggattttcgccatgccacgaaattagcatcatgctagcaagttaa

SEQ ID NO: 415057 - DNA, 300 bp, Staphylococcus aureus
atgtatggattacaaacatatgcagaatcaaataatagtgatgtgtttaagtacttagaaaatggatttgatacagatacacttgagggcattcaatcgagtaatactgatgtgatagcgaatattgaaatgttgtatcagatagctacgggaatcaatgaaccagcaccagagttagttgagggattaaaattagtaactgagtttgtacaagatgagaaggctacacaagaggattacaaggctttagaacgtaagttaactgagttgaagtcatcttattacagtttgaataagtaa

SEQ ID NO: 415058 - DNA, 300 bp, Staphylococcus aureus
atgtatggattacaaacatatgcagaatcaaataatagtgatgtgtttgagtacctagaaaatggatttgatacagatacacttgagggcattcaatcaagtaatactgatgtgatagcgaatattgaaatgttgtatcagttagctacgggaatcaatgaaccagaaccagagttagttgagggattgaagttggtaactgagtttatacaagatgagaatgcgacgcaagaggattacaaggctttagaacgtaaattgaatgatctaaaagcgtcttactatagcttgagtaaataa

SEQ ID NO: 415059 - DNA, 258 bp, Staphylococcus aureus; identical to SEQ ID NO: 414774

SEQ ID NO: 415060 - DNA, 1398 bp, Staphylococcus aureus
gtgtttggtattttaggtggtccaataacaatagttatcggtgtaatcgctgcattaatagctatattcgttttattgtggaataaaaatgaaggattcagaaactttattataaatgcttggaatgcgataaaaacgtttatggttacagtttggaatgtgttgaaaactgtagcttcggttgtatggaatgctattttaaaagctatcactacagcagtaactaatgtatacaattttataatgattgtttggaatcaaatagccgcttatttacaagggttatggaatggaattatcgctattgcaacaacggtatggaaccttttagttacaatcatcacaactgttttcacgacgataatgacaatagttatgacgatatggacagctatttggacattcttaagtacaatctggaacacgataattacaatcgctactacgatttggaatttgttagtcactgtaataactacagtatttaccacaattatgactatcgcaatgacaatttggaacgctatttggacgttcttacaaacgttgtggaacactatagttactgtggcaactaaggtttggaacgctatcactacaactatatctactgcgttacaagcggcatggagttttatttctaatatatggaatacgatttggagtttcttatctggtatattaacgacaatttggaataaagttgtaagcatattcacacaagttgtatcaactatatcagacaaaatgtctcaagcttggaacttcatcgtgactaaaggtatgcaatgggtatctactataacaagtacgctaattaactttgttaatagagttattcaaggattcgttaatgttgtaaacaaagttagtcaaggtatgacaaatgcagtaaataaaataaaaagctttataggagattttgtgtctgcaggtgctgatatgatccgtggtttaattagaggtattggacaaatggctggtcaattagtagatgcagctaaaaatgttgctaagaaagctttagatgcagctaaaagtgctttgggtattcactcaccttcacgtgaattcatggatgttggtgtgtattcaatgctaggtttcgttaaaggtatagataatcattcaagtaaagttatccgtaatgtttctaatgttgcagataaagtagttgatgcatttcaacctacattaaacgcacctgacatttctagtattacaggaaacttaagtaatttaggtggaaatataaatgcgcaagtacaacacacacattctattgaaacatcaccgaacatgaaaactgttaaagttgaattcgatgttaataacgatgcgcttactagtattgttaacggcagaaatgctaaacgcaattctgagtattacttataa

SEQ ID NO: 415061 - DNA, 411 bp, Staphylococcus aureus
atgttaactgacgatataaaacaaatgcttattaaaaaaggattagatgatgtagatattgcagccgattatggggctggtggagatagagtaatcagtgaattgaaatctaaggggattaaaggtataagaaaagcgttgaaaggcgctaatactattttaccaggcattcaattcattcaaggctttgaagttattatacatccatcatgtgaacatgctattgaagagttcaacacttatacatttgaccaagataatgacggtaagtggttgaacaagcctatagatgctaataaccatattatcgatgcattacgttatagtcttgagaaatatcatatcgtacgtaaaaaacgcaaaaagaatatagaaagcaaaacaaaagctattaaatctctaggattatag

SEQ ID NO: 415062 - DNA, 441 bp, Staphylococcus aureus
atgaaacaagaagtagaagaaataattgctaatgtagttattagaggtcgacatcctaatgaatatgttaaagatatgcgcaagcacttaaataaattcgaaggcacagcacgacaaaagaccgcagcaattaaatcattgctttatacggaatcggcacgtgttcacgcacaatcaagcattgacagcatgaaagaaatttcaccggaaggatattatatgtatattgcaaaaatcgataatagaacaactaaagtatgcaaagggcttaatggagaaatattcaaagttaaagacgctaaaattggtgttaatttctatcctatgcatatcaattgtcgttcagattgcgctttactacctaaatctatgtggccgaaaaaaccaagcaagaaacgaaaaacaaaatacttcggagggaaagtgaaaagcggtgattga

SEQ ID NO: 415063 - DNA, 171 bp, Staphylococcus aureus; identical to SEQ ID NO: 407281

SEQ ID NO: 415064 - DNA, 345 bp, Staphylococcus aureus
atgtcaacacttggtattacagatttaaatgttattgagcaaatgacattaacagaatataactatcgaatgtatgcgaaagagtatgaaatgctaacccaagaattcgaacgttacaaacttgcgtttgctattcgtgatgctgcagctactaaaaatgttgggacagaaaataaacctaaagaggaatatgtttttaacaacgcaaacgacgtattgccttatgaagaaaatatccaacggcttaacgaaggtaaagatataagatttagtagcgaacgtgatgaatacgaaccacaaaataatgaattctttaaagttatagcagaatttaataagcaatag

SEQ ID NO: 415065 - DNA, 246 bp, Staphylococcus aureus
atgttgcctgtaggtttagaaagtggaaatcctgttgtgattggcgaagttttaattgcagctacatctcacttaaaaaaacaagcaattactattaataacattgatgaagcgctagatgaaatcgcagaaaatatcggactagaagaattcggttcagatattttaacggagttgggaaagcgacctatgacccgaaacctagtagaagtagtggaagcggaagagaaaccagcggaagcgtaa

SEQ ID NO: 415066 - DNA, 288 bp, Staphylococcus aureus
atgtcaggtaaagaagtgttgtatagactaactagaacagctagaggagaacactcagaagttgaagcagtcgtaacaaaaactggagactataaagagaatcccgacactggcaaaatgcaattggtatacgatgaacacatacaacttgtttctaagtcacctaaaataagtgaccaaaacaaagctttagagatgttaggtagacaccataaattatttacagacaaacaagaagttgactacaaaataccaatgtttgtcgataatattccggaagatgattag

SEQ ID NO: 415067 - DNA, 195 bp, Staphylococcus aureus
atgaaaattgaggggattaaactaaaagctggagacaaaattgtttatgatagctttcgagtttataaaaacggtgtcgaaataagcactgaaacgaacatagcccaaccaaaatttaaatacggagctaataaatttgagtttaatcaaacagttcaaaaagttcagtttgatttgaaattttattataagtag

SEQ ID NO: 415068 - DNA, 372 bp, Staphylococcus aureus
atgccgctcttttttatgtactacataccgattttcaaccatctctttctacttagtaataagacaatagtattaactataaatagaagaacgaagaatgatactgtatttataatttcagtaggacatataaatgttgactcgttattcaatattttttctacggcacgatacatcgtgttgctcgcctcaaacggagcaacgataccaaatatatttttattaatggcaactaagatgactgaaccaatccaatatacaatgctgatacctaagctgattaaaatgttaggtgaaaccatactaatcgttccaacaactaagatatattgtaagataacgagtgaaaataagattattaatagtaagtaa

SEQ ID NO: 415069 - DNA, 501 bp, Staphylococcus aureus; identical to SEQ ID NO: 410354

SEQ ID NO: 415070 - DNA, 1485 bp, Staphylococcus aureus
atgatagacactattaaagtgaacaacaaaacaattccttggttgtatgtcgaaagagggtttgaaataccctcttttaattatgttttaaaaacagaaaatgtagatggacgttcggggtctatatataaagggcgtaggcttgaatcttatagttttgatatacctttggtggtacgtaatgactatttatctcacaacggtattaaaacacatgatgacgtcttgaatgaattagtaaagttttttaactacgaggaacaagttaaattacaattcaaatctaaagattggtactggaacgcttattttgaaggaccaataaagctgcacaaagaatttacaatacctgttaagttcactatcaaagtagtactaacagacccttacaaatattcagtaacaggatataaaaatactgcgatttcagaccaagtttcagttgtaaatagtgggactgctgacactcctttaattgttgaagcccgagcaattaaaccatctagttactttatgattactaaaaatgatgaagattattttatggttggtgatgatgaggtaaccaaagaagttaaggattacatgcctcctgtttatcatagtgagtttcgtgatttcaaaggttggactaagatgattactgaagatattccaagtaatgacttaggtggtaaggtcggcggtgactttgtgatatccaatcttggcgaaggatataaagcaactaattttcctgatgcaaaaggttgggttggtgctggcacgaaacgagggctccctaaagcgatgacagattttcaaattacctataaatgtattgttgaacaaaaaggtaaaggtgccggaagaacagcacaacatatttatgatagtgatggtaagttacttgcttctattggttatgaaaataaatatcatgatagaaaaataggacatattgttgttacgttgtataaccaaaaaggagaccccaaaaagatatacgactatcagaataaaccgataatgtataacttggacagaatcgttgtttatatgcggctcagaagagtaggtaataaattttctattaaaacttggaaatttgatcacattaaagacccagatagacgtaaacctattgatatggatgagaaagagtggatagatggcggtaagttttatcagcgtccagcttctatcatagctatctatagtgcgaagtataacggttataagtggatggagatgaatggattaggttcattcaatacggagattctaccgaaaccgaaaggcgcaagggatgtcattatacaaaaaggtgatttagtgaaaatagatatgcaagcaaaaagtgttgtcatcaatgaggaaccaatgttgagcgagaaatcgtttggaagtaattatttcaatgttgattctgggtacagtgaattaatcatacaacctgaaaacgtctttgatacgacggttaaatggcaagatagatatttatag

SEQ ID NO: 415071 - DNA, 402 bp, Staphylococcus aureus; identical to SEQ ID NO: 408187

SEQ ID NO: 415072 - DNA, 378 bp, Staphylococcus aureus; identical to SEQ ID NO: 415006

SEQ ID NO: 415073 - DNA, 315 bp, Staphylococcus aureus; identical to SEQ ID NO: 409251

SEQ ID NO: 415074 - DNA, 1077 bp, Staphylococcus aureus
atgaatcagtcagtcaaattacttaaacatttaacagatgtaaacggcattgctggttatgaaatgcaagttaaagaagcaatgcgtaactatatagagcctgtcagtgatcaaattattgaagataacttgggtggcatttttggaaagaaaaatgctgagaatggtcaatactcaattatgatttctggtcatatggatgaagttggttttatggtaacaaagattgataaacatggttttatttcatttacgccagttggtggatggtggaatcaagtcatgctatctcaaaaagtaacgattacaacagattcgggcaaagaaattagaggtatcatcggttctaaaccgccacatgtcttaacgcctgaagaacgtaaaaagccaatggaaatcaaaaatatgtttatagatattggtgttagtagcaaggaagaagctgaagaagctggcgttgaagtaggcaatatggtaacgccatatagtgaatttgaagtgcttgcaaatgataaatatttaactgcgaaagcatttgataatcgctatggctgtgcattagctgttgaggtattaaaacgtttaaaagatgaaaatattggaattaacttatacagtggtgccacagtgcaagaagaagttggtttgcgtggtgcgaaagtggcagcgaatacaattaaaccagatttggcgatagctgtcgatgtaggtattgcttatgataccccaggtatgtcaggtcaaacgagcgatagtaaactaggcggtggtccagttgtcattatgatggatgctacaagtattgctcaccaaggtttgcgtaagcatattaaagatgtagctaaggaacataacatcgaagtacaatgggatacgacaccaggtggaggtacagatgcgggaagtattcatgtcgcaaatgaaggtattccaacgatgacaatcggtgttacgctgcgatacatgcattctaatgtttcagtgctcaatgtagatgattatgaaaattctatccgtcttgttactgaaattgtccgttcattgaatgatgaaagttataaaaatatcatgtggtaa

SEQ ID NO: 415075 - DNA, 1638 bp, Staphylococcus aureus
atgaataaagacaagcaattgcacaacgacaaaatcaatctatcccaattagtcttattagggttaggctctttaataggatctggttggctatttggtgcgtgggaagcatcatcaatagctggaccagtagcaatcatatcatgggttcttggattcctagtcattggaaccattgcctataactacattgaaatcggcacaatgtttcctcaatcaggtggcatgagtaactatgcccagtatacacatggctcattattaggctttattgctgcttgggcgaattgggtgtctttggtgacaataatacctatcgaagctgtgtcagctgttcaatatatgagttcttggccgtggcattgggcgaaaccaatgagatatttaatggaaaatggctctattagcacatacggattgctagctgtatatctcatcattgttattttttcattattaaactattggtccgtaaaacttttaacatcatttacgagtttaatttctgtatttaaattaggcgtacccatgttaaccatcatcatgttgatgttatcaggattcgacacttcaaattacggccattcggcaagcacatttatgccttacggaagtgcaccgatttttgctgcaacaacagcatcagggattattttttcattcaattcattccagacaattattaatatgggttcagaaattaaaaatcctgaaaaaaatatcgcaagaggcatcgctatttcactgtcaatcagtgcagtgttgtacatcattttacaaagtacgtttatcacttctatgcctcaatcaatgttacaacatagtggatggaatggcatcaacttcaattcaccatttgcagatttagctatcttattaggaattaattggctcgcaattttactatatattgaagcttttgtatcaccattcggtactggcgtgtcatttgtcgccgttacaggtcgagttttacgagcaatggagaaaaatggacatatccctaaatttcttgggaagatgaatgaaaaatatcatatcccacgtgtagcaatcatctttaatgccatcattagtatgattatggttacattatttagagattggggtacgctagcagcagttatttctactgcaactttagtagcctatttaactggcccaacgacagtgattgcattaagaaaaatgggaccaacaatgactcgtccatttagagcaaaaattttaaaagtaatggcaccattatcatttgtattagcttcattagctatatattgggcaatgtggccaacaacggctgaagttattttaatcattatacttggattaccaatctacttcttctatgaataccgtatgaattggcgtaatacaaagaaacaaattggtggtagcttatggattattgtatatttaatcgtgctatcaatactgtcatttataggaagcaaagaatttaaaggcttaaatatgattcactatccatttgactttatcgttattattgttgtggcgcttatattctattacatcggtacaacgagttcatttgaaagcgtctatttccgtcgcgcaacacgaatcaatacaaagatgcgcgagtcactaaataatgaatcaaagtcatctcattaa

SEQ ID NO: 415076 - DNA, 600 bp, Staphylococcus aureus; identical to SEQ ID NO: 413348

SEQ ID NO: 415077 - DNA, 1227 bp, Staphylococcus aureus
atgttaagtattaagcatttaacgaaaatttattctggtaataaaaaggcagtagatgacatctctttagatattcaatctggggaatttatcgcatttattggaaccagtggaagtggtaaaacaactgctttaagaatgataaaccgtatgattgaagcgacagaaggacaaattgaaattgatggtaaagatgttcggagtatgaatcctgtcgaattacgtagaaatattggttatgttattcaacaaattgggttaatgcctcatatgacgattaaagagaatattgtattggtacccaaattgttgaaatggactaaagaagaaaaggataaacgtgcaaaggaattaattaaacttgtggatttaccggagtcatttttagagcgttatccagcagaactatcaggtgggcaacaacaacgtatcggtgtcgtaagagcacttgcggccgaacaagatattattttaatggatgaaccttttggtgcattggatcctattacgagagatacgttacaagatttagttaaaacgttacaacgaaaattaggcaagacgtttatctttgtaacacatgatatggatgaagcgattaaattagcagacaaaatttgtattatgtcagaaggtaaggtggtgcaatttgatacaccagacaatattttaagacatcccgcaaatgattttgtacgtgattttataggacaaaatagactgattcaagaccgtcccaatgacaagactgtagaaggtgtaatgattaaaccaatcacgatacaggcagatgcaacgcttaatgatgctgttcatattatgagacaaaagcgtgttgatactatttttgtagtagatagtaataaccatttactaggtttcttagacattgaagatataaatcagggtatacgtggacacaaaagtttacgagacaccatgcaacaacatatttataccgttcaaattgattctaaattacaagattctgtacgtacgattttaaaaagaaacgttaggaatgtacctgtcgtagatgataagcaacgtttagtaggactgattacgcgtgccaatgttgttgacattgtatatgacacgatttggggcgatagtgaggatgcagtgcaaacagaacatgtgggggaagacactgtgtcctcaaaaatgcatgagcaacacactactaatgtcaaagtacgtgacataggagatgataaatcatga

SEQ ID NO: 415078 - DNA, 636 bp, Staphylococcus aureus
atgattgagttcctacatgaacatggtggacagttgatgtcgaaaacactggaacatttttatatttctatagtggcattattacttgccatcattgttgcagtacctataggcattttattatcaaaaacaaagcgaactgccaatattgtattaactgtggcaggtgtcttacaaactattccaacactagctgtacttgctattatgataccgatttttggtgttggtaaaacgcctgcaattgtagcgctatttatttatgtattattacctattttaaataacacggtactcggtgttcaaaatattgatagcaacattaaagaagctggaaaaagtatgggaatgacacaatttcaattgatgaaggatgttgaattgccgttagcattgccgcttatcattggtggcattcgtttgtcatctgtgtatgtaattagttgggctacacttgcaagttatgtaggtgcgggtggattaggtgatttcattttcaatggtttaaatttatatgatccactgatgattgtaactgcaacggtactcgttactgcactagcattaggtgttgatgccttattagctttagttgaaaaatgggtagttcccaaaggcttaaaagtatctggataa

SEQ ID NO: 415079 - DNA, 942 bp, Staphylococcus aureus; identical to SEQ ID NO: 413347

SEQ ID NO: 415080 - DNA, 852 bp, Staphylococcus aureus
atgagtaaaatttttgtaactggtgcaacgggccttattggcattaaattagttcaaagactaaaagaagaggggcatgaggttgctggttttactacatctgagaatggtcaacaaaagctagctgctattaatgtaaaagcatatattggtgatatattaaaagctgatactattgatcaagcgttagcagattttaaaccagaaatcattatcaaccaaattacggatttaaaaaatgttgatatggcagcaaatacgaaagtacgtattgaaggttctaaaaacttaattgatgcggcgaaaaagcatgacgttaagaaagtaattgcccaaagtattgcctttatgtatgaacctggcgaaggattagcaaatgaggaaacttcacttgattttaactcaactggtgatagaaaagtaacggttgatggtgtggttggtctagaagaagaaacggctcgtatggatgaatacgttgttttacgttttggttggttatatggcccaggtacttggtacggaaaagatggcatgatttataatcaatttatggatggtcaagtgacactttcagatggcgtaacatcatttgtgcatcttgatgatgcagttgaaacatctattcaagctattcattttgaaaatggtatctataatgtagcagatgatgcacctgttaaaggttctgaatttgcagaatggtataaagaacaacttggtgttgaaccaaatattgatattcaacctgcacaaccatttgaacgtggcgtaagcaatgagaagtttaaagcgcaaggtggtactctgatttataaaacttggaaagacggcatgaatccaattaaataa

SEQ ID NO: 415081 - DNA, 1497 bp, Staphylococcus aureus
atgactactaaaaaactgtattttctatccatttctattatcattttagtcgccatttcaattgctatatatataacattaaatagcaatacgaagacacggttaaccaatgattcgcaacaacaaatagataaaattatcgagcatgatttacaaaagggacacattcctggagcatcaattttaatagtaaaaaatggcaaagtttttttaaataaaggttatggttatcaagatgttgataaaaaagtcaaagcttctcccacaacaaagtatgaaattgcttctaatactaaagctttcacaggtcttgcaattttaaaattagctcaagaaggtcgattaaacttaaatgatgacgtatccaaacatgtgcctcattttaaaatgaactataatggtcaaaatgaaactattacgattaagcaacttttggctcaaacaagtggtatacctagtgatattacaagcgaagacgccgtaacaaataaaaataatcgtttaaatgatgtaacccgtgcaattatgggtgatgaattacatcataagcccggagaagaatttgaatactcaaatatgaactatgatttattaggtttaattatccaaaacgttacgaagcaatcctatacaaaatatattacaaattcatggctcaagcctttgcatatgacacatacatcattcaaacaaaccaataacaaatcaaaacatgatgctattggctacgaattacaaggttcgacacctgtcgtctctaaacctgaatttaacctttgggatacaccatcagcatatatgatgacatcaactgaagatttggaacattggataaaattccaacttaatccacctgataaatacaaatcattagttcaacaatcacataaaaatttatcatcaacaattggtgaacctaatgccaatgcatatgcttcgggctggtttaccaataatgatgaacatttagtgtttcattcaggaacgctcgataacttttcatcatttattttactaaatccaaaacaaaattatggaattgttgtgcttgcaaatctaaattcggaatatgtacccaaattagttgagcatcttaatacacaaattgtaaatcacaagcgatattcgacggttgcgtctatactcaatcaatataaagaccaatttaatattgttaccgttttgatgacaacacttattttattagcatttatattctcagcttatcgtgcttggcaaatgcgccatggtcaaattcttttgcgtagatcaaaacggattgctgtattgagttggctaactttatgtttatgtatcgctatagcgctcatattatatgcattaccatatctcattctcggtagcaataattggtcttttgtactgacttggctaccaatagaaattaaattagcactaatcacaacattaattgcattattcagtacattaattgtaattctgttattccttcatacaaagataacgaagacataa

SEQ ID NO: 415082 - DNA, 1830 bp, Staphylococcus aureus
atgttcaatcaatttaaaagacttattatagggcaacctaaaaaaaacagagaactaaaagacgaaaagatatcgaagtttaaagggttagcgattctttcgtcggatgcattatcttcagtggcttacggtcccgaacaaatactgattacattatcagtagtgggtgcagttgcaacttggtatactttaccgattgcaggtgctgttctgatcttattagctgctttaattatgtcttataggcaaattatttatgcatatcctaaaggtggcggcgcgtatatggtgtccaagaccaatttaggagaaaaatggggattgcttgcaggaggctcattattagtcgattacatactgactgtcgctgttagtatatcatctggtgctgatgcatttgttgctgcattcccaagtttatatgggcataaagtactgattgcatgtttacttgtactttttattttaatattaaatttacgtggtttaactgaatctgccaccgtattatcctatccagtatatcttttcattatagggttagtgatattaatatttataggtactttccgtgtggcgacaggagatattcaaccacatatgcatgcatcagtaggaactgcggttcctggagtaacattattcttgctattaaaagctttttcatcaggggcttcatcattaacaggtgttgaagctatttcaaatgcggtaaccaattttagagaaccaagtgctaataatgctgtaaaaacgttaattgctatgggttcaattttagcgtttttattagttggtatcgttggtttagcatatgtttatggaattatgccacaaacggaaacgacagttttatcacaattagctatgcaaatatttggtgataatgctgccttctattttgtacaggcaacgaccgtgatgattttggtattagcagccaacactggatttacagcttttccgatgttagcggcttcaatgtctaaagataaatatatgcctagaatgtttactgttagaggtgatcgcttaggctactctaactcaattattattttaggtgtattagccattattttaattattgtatttgatggtatgactgaagatttaattccattgtatgctgttggtgtatttattccatttacactagcacaattcggtatggttattaaatggattcatgaacgtcctaagaattggttaagtaagttgtctgtgaacttactaggtggtatcgtgacatttattgtttttatgattttactcataactaaatttagccaagtatggccgatacttattttcttgccgttcgtggtgattttcttcttgaaaattaacaaacattatcgagatatcgcagaacaattacgttctgacattgatgttcttaatgtggacgtggtagatcgtaatttagcaattgtgccgataacaagtattacaacagcagttgataagtctatttattacgcacaaatgcttgcgaataatgatgtcatagcagtacatgtatcatttggagatgaagatgaaaaagcattccaagagaaatggaaacgtcatttcccagatgtaagattagttattttacattcggaatatcgcagtattatacgaccaatttcacgttttatcgataagattaatcgtaaagcaaacgatcaaaactatatgattacagtagtgataccagaatttattactaagaaacgttggcataatttattacacaatcaaactagtttgcgtatgaaattgtatttaatttatcaaaagaatgttaacgtatgtacaattccatttaaacttaaaaaatag

SEQ ID NO: 415083 - DNA, 2079 bp, Staphylococcus aureus
atggcactattagaagcatttttaatttttatttttgctgtgattattagttcggttatcaataatcgattcccacaaattcctactgcctttattcaaattgcattaggtgtcgttattttcattattccaatacaagttgatttccaattcaattctgaagtgtttatgtttgccgttatcgcgccactactttttgtagaaggtacccacgtctctcgaacaaaattattagaatatcgtaaacctatactattaatgtcaatggcactagtgtttgcaactgtagtcggtgttggctattttatacattggatttggcctgccttaccaatgccagccgcttttgcaatagcagcaattttatgtcctactgatgcagtagcagtatctgctattacacgcggaaaattattacctaaaggttctatgacgattttagaaggtgaatctttactcaatgatgcagcaggtatcatttcatttaaaattgctgttactgcattagtaactggtaccttttcattattccaagctgttgaacaatttatcatttcaacaatactaggtgtacttattggtgcaattattggattcgttgtcgttagaatacgtatagacttaaccgctaataaaggtttaaaagataacaataccttaacttttattcaattattaactccttttgtcgtatactttttagcagaagaagttcatgcttcaggtatcattgcagttgtaatcgcaggtctaatccatggtttagaacgcgaccgtttaattagagcacaaacggaactacaaatgaattaccatcaaatttggaacacatttagttatgccttaaatggttttgtatttgttgtattaggttttatgattcctactgtagtcatagatattttccaaacagagcctgacaacttttcatttttaatagtgatcactatattaatcgctattgcaatttatgcatgtcgatttgtttgggtttatttctggtacaaagatttttatttcccgaaaaatatacaatcttatctagacgaagaacatgattcacatgaaacaccaccttctcgtgtgcgttacgcatttattatgacgatgtgtggtattcacggtacaatttcactttcaatggcacttacattaccatttatcattacaaaaggacaagcattcgaataccgtaatgatttattgtttattgcatctttcatggtattaattagtttaatcttagcgcaaattgttttacctttaattacaccatctgccgaagatactacttttaaaggtatgacttatcaatctgccaaaattttcattgttcaaaaagtgatacagcattttaaaaacgaaagtaaaaaagacaaaaacgatacaaattatcgcccagtattaaaccaatactatggagaattgttatttttattaaattcagaacctaataatcaaaatacaaaagaactcaaacgtttagaagatattgcaaaagtaatcgaaacatctacacttgagcgtttaattgataaaggtaaggcaacgtatcaggatattaataattaccgcaatattgtcgaattaacagagacacaccgtactgcatcatttgttgaaaaatttgcaaacttcttcaagatgttatggcttagacttaaagcgatgaagcactacaaagccttaaacaaagaatctaagaagcaagaatttgaaaattcattcaaagatgttcaaaaaattatgcgtattgtgaatcacaatattattttacgcttaaaagaagaacaaaatagtacaaatgtacttgaggttagcttagtcattaatcattactatgatatgagtcgctcattaaagtggcgtgcacaacgtcgaaaagaacgtcaagaaaacagcaatcaaatcataccgcaagctatgttccataaccacaaattggaagcattgtacttacaacgtcaccttttagatgaattaattcgcaaaaataaaatcaacaatatcgttgcagctcaaattcgagaaaatatcaattacaacgaaattgtcttgtctttacagtccaaacattaa

SEQ ID NO: 415084 - DNA, 807 bp, Staphylococcus aureus
atgaagatagggacaatcgccgatttacatattgatcgtcataataaaaaaacatccgaagattacttagaggcattggttgaaatagttaagtataagaaattggatatattgttgattgcgggagatatctcaaatcattatcaattgacgcaccaatttataacgcaattgacaaaacaattagatatacctgtgaaatttgttcctggaaaccatgatttatgggaagttgaaagtatgactacgcaagacatttggaataattataagagcatgtcacagtgcttggtaggaaaaccatttatagtaaatgaagaatgggcaataataggacatacaggttggtatgattatagctttgcagcacaacgattttcattagaacatttacaaaaaggaaaacattatggtgcgacttggcaagataaagaacgaatatcttggggcatatcagatcaaaatttatctaaaatagcggctgaacaagtgaagaaagatatattagaagtaggaaatagacgagtgattttagtcacacatgttgtgacgcaccctgatttcattgttcctatgccacatcgtatattcgatttttataatgcatttattgggacaagtgatttcaatcctttgtatgcgatgttcgatataccatatagtattatgggccatgttcattttcgtaaaagtgtgatggatgatggcagatgttatctctgtccgtgtctaggctatccaagacaatggcgttcagaagatatttaccaggaaataaatgagacgatacaaataatagaaatttaa

SEQ ID NO: 415085 - DNA, 657 bp, Staphylococcus aureus
atgaaccgaaaaatattaccagttaaacctatcagtcagctatttcctatccctatggtcatggggtgtgaaggtgtttccgcagccatgatgttgcaatacaataaccaacatatccctgctacagaaattatgagacattggccgacacatccgaacaatccacataaaggttatgttggacatcacttattcattaagcttggcaattatcatcaaacgatatttccagaagcatatgtaccatttttacaaaaatacaatcctaatatcgtagacggcactggtaaatccttagaagatcttaaaggtattatcgatcaaggtcaacctgtgttaatataccatactaatcttggctctaaaccattactacgtgttttccgctttgataacaagccagcgaaacaagtttcaaatattcacgtaacgttactcattgggtacgatgattactattactattatatcgatccactttggagtcatattcgtcgtggcctagttttacctgccatcattccaaatcgcaaacaaattattaaaattcgtaaagagaaaatggaatacagctttaattcaccaggaagaaaatgcatttatgtgcaaccacattcatatacaattgaaaatcaacaacaaaataaacacacgtaa

SEQ ID NO: 415086 - DNA, 1212 bp, Staphylococcus aureus
atgcaatcaacgaaaaccaaaacgaagcatttttcatttttattgctaattacgttaggcgtcatgaccgcttttggcccactaactatagatatgtacgtaccatcattacctaaagtgcaaggtgattttggttctactacatcagaaattcaattaacattatcattcacaatgattggtcttgcactaggccaatttatctttggacctttatccgatgcttttggtcgcaaacggattgctgtatccattttgatcattttcattttggtatcaggtttgtctatgtttgttgatcaattgccattattcttaactttacgatttattcaaggtttaactggtggtggcgtcatcgtgattgccaaagcctctgctggtgataaatttagtggcaacgcactcgctaaatttttagcatctttaatggtagtaaatggcatcatcactattcttgcaccattagctggtggattagctttatccgtagcaacatggcgttctattttcacaattttaactattgtggcactcatcattttaattggcgtcgcttctcaattacctaaaacatctaaagatgaattaaagcaggtgaattttagtagcgtcattaaagactttggaagtcttttgaaaaaaccagcatttattattccaatgctattacaaggtttaacttatgtaatgctttttagttattcatctgcatcgccatttattactcaaaaattgtataatatgacaccccaacaatttagtatcatgtttgctgttaacggtgtaggtttaatcattgtcagtcaagtcgttgctttattagtagaaaaattacatcgccacatattattaatcattttaactattatacaagtggtgggtgttgctttaattatcctgacacttacattccatttaccactttgggtcttactcatcgcattcttcttaaatgtgtgtcctgtgacgtcaattggaccacttggtttcacaatggctatggaagaacgaacaggtggcagtggtaacgcatcaagtttacttggcttattccaatttatcttaggtggcgctgttgcaccattagttggcttaaaaggcgaatttaatacatcaccatatatgattattatcttcattacagccattctattagtcagtctacaaatcatttactttaaaatgattaaaaagcaacatgtcgcataa

SEQ ID NO: 415087 - DNA, 660 bp, Staphylococcus aureus; identical to SEQ ID NO: 404967

SEQ ID NO: 415088 - DNA, 1143 bp, Staphylococcus aureus; identical to SEQ ID NO: 410321

SEQ ID NO: 415089 - DNA, 387 bp, Staphylococcus aureus
atgaaactaacacaaacgcatgctgaaattttaaaatttatcattgttggcggcattaatacgttaaattattatgttgtctatttattgctgttaaaattattacacattgaatatatgattagtcatattaccggatttctagtcgcttttgtgatttcgtattatttgaattgttattttgtttacagggtaaaacctacttggagaaaattcattagttttccaattacgcagattgtcaacgtaagcttacaaacagttttattatatgtttttgtatcctggctaaatttgccagcggaaattgcgccatttgcaggtttagtgattacgatacccatcacatttgtattatctaaatggattttaaaagatagtaattaa

SEQ ID NO: 415090 - DNA, 1764 bp, Staphylococcus aureus
atgaacaatcagacaaattggataaagatactcagcggatttgcttctgatagtaaatggaaaattatgttatcaattttgttgtctatcatcagtgtcttttctggattagttccatattgggcagtctttaaaattattttaatgatgattaacaatgcatatacgattaattcgattatggtttatatctttattgctttaatcacttatatttcacaagtgtgttgttttggagcgtcaacgatgctatcacatattacggcatatgaaattttatctgaaattcgtaaaaaattagctcaaaaattaatgcgcctccctttaggcgtagtggaatctaagaaaataggtgaattaaaaaatatatttgtcgataaggttgaaacaatagaattacctttagcacatatgattcctgaagttataggaaacttacttttgtcagctgctatctttttatacataatgctcattgattggcgtatggctagtgccttattagtaacgataccaatttcaattttcgcttttaaaaaagttatgtctggatttaatgagacatatgctgaacaaatgaaatcaaataattatatgaatagcgcgattgtagagtttatcgaaggcattgaagtgattaaaacatttaatcaatctcaaagttcatataaaaaatataaagatgcagtagataattataagattcacactttgaattggtttaaaaatacatgggggtatatgaatttaggagctagtgtattaccttcaacatttttagggattttaccggtcggcatgtatttgatatctatcaaccaattaaactatgcggaatttttcctatgcatcgtattatctttaggtgtagtagcaccgattaagaattttactaattatgtaaatcatttaaagtctatacaatacgcattaactgaagtgaatcaaatattaagtctagaagagttagtattgtcaacaaaatttaagaagcctcaacattatgaaattgcttttaataatgttggattttcatataacaaagataaggacgatctggtctttaagcatttatcatttacagtaccagaaaataatttcacagctatcgtcggggcttctggtagcggtaagtcaaccattgccaagcttatatcacgatactgggatgtgacttcaggtgaaattacgattggcggtataaatataaaagatattgaatcgaaacaacttaacgatttagttggttttgttggacaagataactttttattaaatcttacttttaaagaaaatattaaacttggcaatccagaagctacggatgaggcagttgaaaaagctgccaagttagcacaatgtcatgaatttattgaaaagttgccagatggatatgatacgaatgttggtacagtgggagataaattgtctggtggtgaaaaacaacgagtcactattgcaagaatgatattaaaagatgcgcctatcattgtattagatgaagcgactgcttacgttgatccagacaacgaacaaaaaattcaagaagcattaaatgtgttgacgcaggataaaacattgattgttattgcacatcggttatctacgattcaacatgcagatcaaattattgttttaggtaaacaacaaattttagaaaaagggtcacatcacttattgctaaaattaaacggtaattataagaaaatgtgggatacgcacatgcatacaaaagattggggaatcaatactggacataattaa

SEQ ID NO: 415091 - DNA, 1734 bp, Staphylococcus aureus
atgtttcaaattacatttaaaattttaaactggataagaccatataaagcaagaatgattttaggatttagcatgtcatttttaaatgctatttttattgcgttacctatctttttagctgcaaaaatatttaataatgtgctatctcataaacctatttatatgaaagatatattgaatgttgtaattatcatggttttattagtgattggacgatttattacagcatatttcaaaagcaaaagccatgagagcatcgcttatgaaatgagtgcgaaagaacgtttagatataggggataaattgaaaaatgtaaggttaggttattttaattcgcatcattcaaatgagttaacaacaatagtaacaacagatttaacatttctagaaaactttgccatgaaaatggtagatattgttgttaatggatacatattaattacagtactcatattgtctctacttgtagtttcgtggcaagtatcattattagcatgcattggcgtattactatcattttttgcgattcaattattagaaagaaagagtcgacaaaatgcgccagcgtatcataatgtacaaaaccaattagtggaaaaggtattggaggttattcgtggtattcaagtaataaaatcattcgcgaaagaaaatacgagtcttaaaagttttaaccaagcagtcaatgaaagtaaacgtataaatacaaaaatagaaatgcaatatatcccattcaatttattgcatttacttagtttaaaagttgtttcaataatgattgtattagttgcatgcttattatatatgaatcatagtattgatttacctacccttattatgatttcaattttttcatttgtgatatttgatagtgttgaaaatattaatagtgctgcacacgtacttgaaatgatagatatgacgatagatgatattgaaaagataaaaaatgctccagaactggatgagaatggaaaaaatttgacgattaaaaatgaaaatatcgcttttcaaaacgtgaacttttcatatgatgataaacaagtgataaagaatgtgaattttgagatacctacacaaacatcaacagcaataattggaccttcaggaagtgggaaatctacattatgtcacttactcttgcgcttttatgatatcgatgatggaaatattcgcatcgatggtgttgatattaaagatatgacattaagtacgttaatgtcgaaaattagtgcagtatttcaaaaggtgtatttatttaatgatacgattgaaaataacatattgtttggcaatccaggtgcaacgaaagaagaaattattcgtgcagcgaagcaagcatgttgccacgacttcatcatgtcattacctgagggatatcaaacaatgctaaatgaaaaaggtagtaatttatctggcggagaaaagcaaaggatttctattgctagggcgatattaaaagatgcaccaataattattttagatgaagcaactgcaagtattgaccctgaaaatgaacagctgattcaaacggcaattaatgaattaagtaaaggcaaaacagtaattacaattgcacataaacttgaaactattaaaaatgcagatcagattatagtgctcaatgaaggtgaaataattcaaaaaggtagtcatgatgaattaattcgaaaaccaggaatgtatcaagactttataagaataaaaagtaaatcagcaggctggaaattataa

SEQ ID NO: 415092 - DNA, 687 bp, Staphylococcus aureus; identical to SEQ ID NO: 413345

SEQ ID NO: 415093 - DNA, 1359 bp, Staphylococcus aureus
atgaattacacacaacaacttaaacaaaaagactcagaatatgtttggcatccatttacacaaatgggtgtatatagcaaagaagaagcaatcatcattgaaaaaggaaagggtagttacctttacgatacgaatggcaataaatatttagatggttatgcatcgttgtgggtcaatgtgcatggtcataataacaaatacttgaataaggtaattaaaaagcaactcaataaaattgcccattctacgctgctaggatcatcaaatattccgtcaatagaacttgcggaaaaattaatcgaaatcacgccaagtaatctaagaaaagtattttattctgatacaggcagtgcgtctgttgaaatcgcaataaagatggcatatcagtattggaaaaatattgatagagaaaaatatgccaagaaaaacaagtttataacgctaaatcacggttatcatggggatacgattggtgcggtaagtgttggtggtatcaagacctttcataaaatatttaaagacttaatatttgagaatattcaagtagaaagcccatctttctatcgcagtaattacgatactgaaaatgaaattatgacagctattttaacgaatatagagcaaattctaattgaaagaaatgatgaaatcgcagggtttatattggaaccgttgattcaaggtgcgacaggcttgtttgttcatcctaaaggctttttgaaagaagtcgagaaattgtgcaaaaaatacgatgtcttattaatttgtgatgaggtagcagttggttttgggagaactggaaagatgtttgcatgcaatcatgaagatgttcaaccggatattatgtgtttaggtaaggcgattactggtggctacttaccacttgcagctacattgacatctcaaaaaatatacaatacatttttaagtgattcgcatggtgttaatacctttttccatggtcatacatacaccggaaatcaaatcgtttgtacggttgcattagaaaatataagactttatgaaaaacgtaagttattgtcacatattgaaacgacatcatcaacacttgagaaacagttacatgcgctgaagcgtcatcgaaatgttggtgatgtaagaggacgaggcttaatgtttggagttgaattagttacagataaagatagtaaaacgccgttagaaattgaaaaagttgaacgtattgtacgtaaatgtaaagaaaacgggctaatgattagaaatttagaaaatgtcattacgtttgtgccagtgttaagtatgtcaaataaagaagtgaaaacgatggtacgtatttttaaaaaggcagtacataacattttagataggaagtgttaa

SEQ ID NO: 415094 - DNA, 1008 bp, Staphylococcus aureus; identical to SEQ ID NO: 410061

SEQ ID NO: 415095 - DNA, 468 bp, Staphylococcus aureus
atgacatcaaaagatattactcaaattagtgtcattgctgcgattttaaccattttggcagttttgaaaataccgtccattataccaggattagattttcaattatctgcaccggcagcattattgatattagctttctttggaattaaaaagtactttttaggtgggcttttatcaagcgtattattactgatatttggcgtatttaatccaattaatgtgattatttctattatatttagagttatagctattgcagttgtttatttattgaaaataaatgtactatcattagttttatcaagtgtattaggcagtttggtatctaggctactattatctattattttaaatttacctgtgtgggtagtgttgttaaacgcgattccaggcgtaatattcactttaattgtagctattcctttatatctcacattgagaaaaagaatggcagtcttactaagataa

SEQ ID NO: 415096 - DNA, 978 bp, Staphylococcus aureus
atgaaaatgaataaattagtcaaatcatccgttgctacatctatggcattattattactttctggtactgctaatgctgaaggtaaaataacaccagtcagcgtaaaaaaagtcgatgacaaagttactttatacaaaacaacagccacagcagattctgataagtttaaaatttcacagattttaacatttaatttcatcaaagataaaagttatgataaagatactttagtacttaaagctactgggaatattaactcaggctttgtgaaacctaatcctaatgactatgacttttcaaaattatattggggagctaaatacaatgtatctataagctcacaatctaatgattcagtaaacgtcgttgattatgcaccaaaaaatcaaaatgaagagtttcaagttcaaaatactttaggctatacatttggtggtgacattagtatctctaatggtttatctggtggacttaatggaaatacagctttttctgaaacaattaattataaacaagaaagttacagaacaacattaagtcgcaacacaaattataaaaatgttggctggggagttgaagcacataaaattatgaataatggttggggaccttatggaagagatagcttccacccaacatatggtaatgaactcttcttagctggcagacaaagcagtgcatacgctggccaaaacttcatagcgcaacaccaaatgccattattatctagaagtaacttcaatccagaatttttaagcgtactatcacacagacaagatggcgctaaaaaatctaaaattacagtaacttatcaacgtgaaatggatttataccaaattcgttggaatggcttctactgggcaggcgcaaattataaaaactttaaaactagaacatttaaatcaacatatgaaattgattgggaaaatcacaaagtgaaattgttagatacaaaagaaactgaaaacaataaatag

SEQ ID NO: 415097 - DNA, 966 bp, Staphylococcus aureus
atgaacttaaaattaaatagaaagaaagtgatttctatgattaaaaataaaatattaacagcaactttagcagttggtttaatagcccctttagccaatccatttatagaaatttctaaagcagaaaataagatagaagatatcggtcaaggtgcagaaatcatcaaaagaacacaagacattactagcaaacgattagctataactcaaaacattcaatttgattttgtaaaagataaaaaatataacaaagatgccctagttgttaagatgcaaggcttcatcagctctagaacaacatattcagacttaaaaaaatatccatatattaaaagaatgatatggccatttcaatataatatcagtttgaaaacgaaagactctaatgttgatttaatcaattatcttcctaaaaataaaattgattcagcagatgttagtcagaaattaggctataatatcggcggaaacttccaatcagcgccatcaatcggaggcagtggctcattcaactactctaaaacaattagttataatcaaaaaaactatgttactgaagtagaaagtcagaactctaaaggtgttaaatggggagtgaaagcaaattcatttgttacaccgaatggtcaagtatctgcatatgatcaatacttatttgcacaagacccaactggtccagcagcaagagactatttcgtcccagataatcaattacctcctttaattcaaagtggctttaatccatcatttattacaacattgtcacacgaaagaggtaaaggtgataaaagcgagtttgaaatcacttacggcagaaacatggatgctacatatgcttacgtgacaagacatcgtttagccgttgatagaaaacatgatgcttttaaaaaccgaaacgttacagttaaatatgaagtgaactggaaaacacatgaagtaaaaattaaaagcatcacacctaagtaa

SEQ ID NO: 415098 - DNA, 867 bp, Staphylococcus aureus
atgtctcataatgaaaatcttaaattggcgcaacgcggtgcttatttgagtttaattgtatatataatcttatctattgttaagtatgtcacgggttttgtctttaactctgcagctgtaagagccgacgcattaaacaatatgacagatattatcgtttctttagctgttattattggattgaaaatttcaattaaacctgccgatcgaaatcatccttatggccatttgaagtctgaaaatatttcttcattattggtgtcatttgtcattatgtttgtaggtatccaagtagttattcaaaatgcacctcgtttgttcaaagaagatgacgttgtacctaacgcaataacaattatcgtcagcttaatcagtggtcttgtaatgttgattgtatttgcagtcaatcaaagactagcgaaaagaacgaaaagtagttctttaaattcggctgccaaagataatttatcagatagtttagtcagcattggaacagcgataggattaatttttacgcaaatcggtttcccaattgtcgatattattttagcaacattactaggcttactaatcgtttatactggttttggtatttttaaagaagcaatttttatgttgagtgatggtttcaatgaaactgaattagaagcgtatcgcaatgatattttagaagttgatgaagtacaagaagttaaaagtattaaagggcgttaccatggaagtagtgtgtttattgatgtcacaattgttgtagatgctaacctttccttagtagaagcgcatcaaatttgtgacaatgtcgaacatcatttgcacaaaaaaggtatttcctcagtatacgttcacccagaaccagaccatctataa

SEQ ID NO: 415099 - DNA, 687 bp, Staphylococcus aureus
atgccaaaattaattttatgtcgtcatggacaaagcgagtggaatgctaaaaacttatttactggatgggaagatgttaatttatctgaacaaggtattaatgaagcgactagagcaggtgaaaaagtaagagaaaataacattgccatcgatgtagcttttacatcgttattaacacgtgctttagatacaacgcattatattttaactgaatctaaacaacaatggattcctgtatataaaagctggcgtttaaatgaacgccactatggtggattgcaaggcttaaataaagatgatgctagaaaagaatttggagaagaacaagtacatatttggcgtcgttcttatgatgtgaaaccacctgctgaaaccgaagaacaacgtgaagcttacttagctgatcgtcgatataatcatttagataaacgtatgatgccttattctgaaagtctgaaagatactttagttcgagtgataccattttggacagatcatatttcacaatatttgctagatggtcaaacggtattagtttctgcacacggaaattcaattcgcgcattaattaaatatcttgaagatgtgtcagatgaagatatcattaattatgaaattaaaacaggtgcaccgcttgtttatgaattaacggatgatttagaagttatagataaatactacttataa

SEQ ID NO: 415100 - DNA, 780 bp, Staphylococcus aureus
atgaaaagacttttatttgtgatgatagctttcgttttcatattggctgcatgtggaaacaattcgtcgaaagacaaggaagctaataaagatagcaagacaattaatgttggtactgaggggacttatgcaccatttagtttccatgataaagatggtaaattaactggttacgatattgatgttattaaagcagtggctaaagaagaaggtttaaaacttaaatttaatgaaacttcttgggattctatgtttgcaggtttagacgcagggcgttttgatgtaatcgcgaaccaagtaggtattaatcctgatagagaaaagaaatataaattttctaagccttacacattctcaagtgctgttttagttattcgtgaaaatgaaaaagatattaaagattttgatgatgttaaaggtaagaagttagcacaaacattcacatctaattatggtaaattagctaaggataaaggtgctgatattacaaaagttgatggctttaaccaatcaatggatttattattgtctaagcgtgttgatggtacatttaatgatagtctgtcatacttggattataaaaaacaaaaacctaatgctaagatcaaagcaatcaaaggtaatgctgaacaaagtagatctgcatttgcattttctaaaaaagcagatgatgaaacagttcaaaaattcaatgatggcttgaaaaaaatcgaggaaaacggtgaattagctaaaataggtaagaaatggtttggtcaagatgtttctaaatctaaatag

SEQ ID NO: 415101 - DNA, 729 bp, Staphylococcus aureus; identical to SEQ ID NO: 404986

SEQ ID NO: 415102 - DNA, 732 bp, Staphylococcus aureus
atgattcaattgaacaatatccataaatcatttaatgatgttgaagtcatcaaaggtattgatttatctgttgaacaaggtgaggttgtaaccttaatcggtcgatctggttcaggtaaaacaacattgttacgtatgattaatgcattagaaattccaactgaaggtacagtttatgttaacggcaaaacatatacatctaaagataaaaaatcacaaatagaagttcgtaaacagtctggcatggtatttcaaagttataacctttttccgcataagacggcattagaaaatgtaatggaaggtcttatcacagttaaaaagttgaaaaaggatgaggcacgtgggaaatcacttgagttacttgagaaagttggtttaacacatgtcaaagatcaacgtccacatgcattatcaggtggtcaacaacaacgtgttgctattgcaagagcactagcaatgaaccctaaagtgatgttgtttgatgaaccaacatctgcacttgatcctgaacttgtgaatgatgttttaaaggttattaaagatttggctaatgaaggcatgacaatggtcattgtgacacatgaaatgcgttttgcaaaagaagtatctaataacattgtatttattcatgaaggcatgatcggagaacaaggggctccagaagagatgttcaatcgtccgaaaacagaagaattaagacgtttcttaaatgttataaatgaagaataa

SEQ ID NO: 415103 - DNA, 363 bp, Staphylococcus aureus; identical to SEQ ID NO: 404989

SEQ ID NO: 415104 - DNA, 600 bp, Staphylococcus aureus
atgactaaaaaattactaacattatttatagtgagcatgttaattttaacagcttgcggtaaaaaagaatcagcaacgacatcctcgaaaaacggcaaaccattagttgtcatatatggcgactataaatgtccttattgtaaagaattagatgaaaaagtcatgccaaagttgcgtaaaaattatatagataatcacaaagtggaataccaatttgtcaatttagctttcttaggtaaagactcaattgttggttcgcgtgcgagtcatgcagtattgatgtatgcacctaaatcatttttagattttcaaaagcaattatttgctgcccagcaagatgaaaataaagaatggttaacaaaagaactattagataaacatattaaacaactgcatttagataaagagacggaaaataaaattataaaagattacaagacaaaagatagcaagtcttggaaagctgcagagaaagataaaaaaatagcgaaagataatcatataaaaacgacaccaactgcatttattaatggcgagaaagttgaagatccatatgattatgaaagttatgagaagttattaaaagataaaataaaatag

SEQ ID NO: 415105 - DNA, 252 bp, Staphylococcus aureus; identical to SEQ ID NO: 404991

SEQ ID NO: 415106 - DNA, 267 bp, Staphylococcus aureus; identical to SEQ ID NO: 414968

SEQ ID NO: 415107 - DNA, 468 bp, Staphylococcus aureus; identical to SEQ ID NO: 414366

SEQ ID NO: 415108 - DNA, 183 bp, Staphylococcus aureus
atggtagaacgttatatcaaagttttaatattatatattttcacaacactactatcttctatttcagtaacgtcaaaatgtgtacctaataaagttataaggtttattttacgtactgcaattggttacagtatatttgcatatggtttacattacttttcaaatttaaaaaagaataagtaa

SEQ ID NO: 415109 - DNA, 732 bp, Staphylococcus aureus
gtgaatgggaatatcattgttgcacatggcatgaggcacggacgacagaatcaagcgttagaagcatttatttctgaattagtaaaagatgatatacatcactatgatattgcgtttttagaaagtgagcatcaggatttagagacggtaatgacgacgttgattcaaagtggggttgaccattttaaaattgtaccattgctaatctttagtgcaatgcattatctcaaggatataccgaatatcgttcatgaaatgaaacgacggtatccagacataaaggtagaagtaagcgagccacttggcacacatcctttaatgagacgattaattgaacaacgtatttgtgacgcattagcaggtgacgaacaacaagttggagttatggttgttgcacacggcaatattaatggaaattttactaaggcacacgaagagttacaaatatgcgctcaacatttgcagattaataaacctacttatgcgagaacgctatatggagagattagttttacacatgatttagaaagcatctcgaaacggtatcaaaaattgattgtcgtaccattatttttatatgacggaagacttgttaacaaagtgaagcagcaaatgaatgacatggttattaatacagatatacacttcacaccttcaattaacttcgacccaattttaaagcaaatcattaacgatagattagaaagcttaatgattccgatgaaaatataa

SEQ ID NO: 415110 - DNA, 2406 bp, Staphylococcus aureus; identical to SEQ ID NO: 413344

SEQ ID NO: 415111 - DNA, 315 bp, Staphylococcus aureus
atggaaacaaaagaaaaaattaaagtgacaactatagatgaattaacacccctaattggaaaaaaggttattgtcaaaggcaaagaggtaggattgtttttaactgaaagtggtacaattcacgcgattcacaatatttgtccgcataaacaaggaccattgtcagagggaacagtgagtggtgaatatgtattctgtccacttcatgatcaaaagattgatttaaatactgggattgtacaagaacctgatgaaggttgtgtagatgtttatgaggtagaagttacagacgggaacgtatatatatgtctgtag

SEQ ID NO: 415112 - DNA, 978 bp, Staphylococcus aureus
atgtctgtagataaatatggcaaggtttacttgataggtgcgggaccaggtaatccgaattatttgactaaaaaggctgagcgtttaatacgtgaagcggatgttatactatatgatcgattagtgaatccgttaattttacaatatgcgaatttgactactgaaattatcgatgttggtaaaaagccgtatgcaaaacacattcagcaagaaaaaataaatgaatgtatcgtggaagcagcacgtcgatataacaaggttgtgaggcttaaaggtggcgacccagcaatatttggacgagttcaagaagaagttgacacactaaacaactttaatattgcgtttgaaattgtacctggtgtgacatctgcgagtgctgcagttgctacgatgcaaacaggattaacgatgcgtgctgttgctaagagtgtgacattttctacaggtcactttaaagattcagaagaaaatgaagtagatgtcaacgctttagtaaatggtggtacgttggcgatatatatgggagttaaacgtttagggaaaattatcgcccagatacaacagtacacagatattgattatccgatagcgattgtctttcaagcatcgtgttttaacgagtttgttgttaaggggcgtttaagtaatattgttgggaaactggagcattacgcaattgaggcgaaaccaggtatatgtattataggcgaagtagtgggttatactgaaaatgtctcaacaacttctaatccgactcagcaattttatgtagtaagtggttctagacatgacgcccttatgctctgtgaacatttatatgacgaaggttatggctgtttgctaaacccaaatgatacatcgaatggcacatatcattcgtcgcaatatgattactatgatgcatttattaagcagcaagaaaatgtaacatatatttcaaccgatcgtgcagatgctaatacagtgttatgtcactaa

SEQ ID NO: 415113 - DNA, 3690 bp, Staphylococcus aureus
atgggaaaatttggattgaatttctttaagccaacagaaaaatttaatgggaattggtcgatcctagaaagtaaaagtagagaatgggaaaaaatgtacagagaacgttggagccacgataaagaagtaagaacaacacatggtgttaactgtacaggctcatgttcttggaaagtatttgtgaaaaatggtgtgattacctgggaaaatcaacaaactgactatccaagttgtggtccggatatgcctgaatatgaaccgagaggatgtccacgaggtgcgtcattctcttggtatgaatacagtccgcttcgaatcaaatatccatatattcgtggaaaactctgggatttatggactgaagcattagaagaaaactatggtaatcgcgttgctgcatgggcgtctattgttgaaaatgaagacaaagccaaacaatataagcaagcccgaggtatgggagggcacgtgcgttcaaattggaaagacgttacagagataatcgcagcacaattactgtatacaataaaaaaatatggtccagatcgaatcgcaggatttacacctattccagcgatgtcaatgattagttatgcagcaggtgctcgattcatcaatttgcttggtggtgaaatgcttagtttttatgactggtatgcagatttaccacctgcctctccacaaatttggggagagcaaacagatgtgcctgaatcaagtgactggtataacgcatcatacattattatgtggggctctaatgtacctttaacacgtactccggatgcacattttatgacagaagtccgctataaaggtacaaaagtcatttcagtagcaccagattacgcagaaaatgtgaaatttgcagataactggctagcaccgaatcctggttcagatgctgcaattgctcaagcaatgacacatgttattttacaagaacattatgttaatcaacctaatgaacgctttataaattacgctaaacaatatacagatatgccgtttcttatcatgctggatgaagatgaaaatggatataaagcgggtcgatttttaagagcgagtgacttaggtcaaacaacagagcaaggcgaatggaagccagttattcatgatgcaatcagcgatagtttagtagtacctaatggcacaatgggtcaacgttgggaagaaggtaagaagtggaacttaaaactagaaacagaagatggttctaaaattaaccctacattatcaatggcagaaggtggatacgaattagaaacaattcaattcccatactttgatagtgatggagatgggatattcaatcgtccaattccaactcgacaagtcactttagcaaatggtgacaaagtccgtattgctacaatttttgacttaatggcaagtcaatatggcgtgcgtcgttttgatcataaattagaatcaaaaggatacgacgatgcagaatcaaaatatacacctgcttggcaagaagccatttcaggcgtaaaacaaagtgttgtcattcaagtagcgaaagaatttgcgcaaaacgctatcgatactgaagggcgttcaatgattatcatgggtgcgggtattaaccattggtttaactcagatacgatttatcgttcaatcttaaacttagttatgttatgtggctgtcaaggtgtgaatggtggcggttgggctcactatgtgggacaagaaaaatgtcgtccgattgaaggatggagtactgtcgcatttgcgaaagactggcaaggaccaccacgtttgcaaaatggaacaagttggttctattttgcaacagaccaatggaaatatgaagagtcaaatgtagatcgtttaaaatctccattagctaaaacagaggatttaaagcatcaacacccagctgattataatgttttagcagctagacttggttggttaccatcatatccacaatttaataaaaatagtttgttgtttgcagaagaagctaaagatgaaggcattgagtcgaatgaggcaattttaaaacgagcgataaatgaagttaagtcaaaacaaacgcaatttgcgatagaagatccggatttgaaaaagaatcatccgaaatcactgtttatatggcgctcaaatctaatctcaagttctgcaaaaggtcaagaatactttatgaagcatttacttggcacaaaatcagggttattagctacaccaaatgaagatgaaaagccagaagaaattacgtggcgtgaggaaacaacagggaaattagatttagtcgtttctttagatttcagaatgacagcaacacctttatattctgacattgttttgccagcagcgacttggtatgagaagcatgatttgtcatctacagatatgcatccatatgtacatccttttaatccagctattgatccattatgggaatcgcgttcagactgggatatttataaaacgttggcaaaagcattttcagaaatggcaaaagactatttacctggaacgtttaaagatgttgtgacaactccacttagtcatgatacaaagcaagaaatttcaacaccatacggcgtagtgaaagattggtcgaagggtgaaattgaagcggtacctggacgtacaatgcctaactttgcaattgtagaacgcgactacactaaaatttacgacaaatatgtcacgcttggtcctgtacttgaaaaagggaaagttggagcacatggtgtaagtttcggtgtcagtgaacaatatgaagaattaaaaagtatgttaggtacgtggagtgatacaaatgatgattctgtgagagcgaatcgtccgcgtattgatacagcacgtaatgtagcagatgcaatactaagtatttcatctgctacgaatggtaaattatcacaaaaatcatatgaagatcttgaagaacaaactggaatgccgttaaaagatatttctagcgaacgtgctgctgagaaaatttcgtttttaaatataacttcacaaccacgagaagtaataccgacagcagtattcccaggttcaaataaacaaggtcgacgatattcaccatttacaacgaatatagaacgtctagtaccttttagaacattaacaggacgtcaaagttattatgtggatcacgaagttttccaacaatttggggagagcttaccagtatataaaccgacattgccgccaatggtatttgggaatagagataagaaaattaaaggtggtacagatgctttggtactgcgttatttaacgcctcatggaaaatggaatatacactcaatgtatcaagataataagcatatgttgacactatttagaggtggtccaacggtttggatatcaaatgaagatgctgaaaaacacgatatccaagataatgattggctagaagtgtataaccgtaatggtgttgtaacggcaagagcagttatttcgcatcgtatgcctaaaggtacaatgtttatgtatcatgcacaagataaacatattcaaacgcctgggtcagaaattacagatacacgtggtggttcacacaacgcgccgactagaatccatttgaaaccaacacaactagtcggaggatacgcacaaattagttatcactttaattattatggaccaattgggaaccaaagggatttatatgtagcagttagaaagatgaaggaggttaattggcttgaagattaa

SEQ ID NO: 415114 - DNA, 1560 bp, Staphylococcus aureus
ttgaagattaaagcgcaagttgcgatggtattaaatttagataaatgcataggatgccatacgtgtagtgtgacatgtaaaaacacttggacaaatcgtccaggtgctgagtacatgtggttcaataacgtagaaacgaagccaggtgtagggtatccgaaacgttgggaagaccaagaacactacaaaggtggttgggtactaaatcgtaaagggaaacttgaattaaaatctggaagtagaatttcaaaaattgctttaggtaaaattttttataacccagatatgccattaataaaagattattatgaaccatggaactataattatgaacatttaacaactgcgaaatcagggaagcattcgccagttgctagagcgtattcagaaattacaggggataacattgaaattgaatggggacctaactgggaagatgacttagcaggtggtcatgttacaggcccaaaagatcctaacatccaaaaaatagaagaagatattaaattccaatttgacgaaacttttatgatttatttaccacgtttatgtgaacattgcttgaatccaagttgcgttgcatcgtgcccttcaggtgctatgtataaacgtgatgaagatggcattgtattagttgatcaagacgcatgtcgtggatggcgttactgtatgacaggttgtccatataagaaagtttacttcaattggaaaacgaacaaagctgaaaaatgtactttctgtttcccgagaatcgaggcgggtatgcctacggtatgctctgaaacttgtacaggacgtatgcgttacttaggtgttttattatatgatgcagatcgagttcatgaagcggcttcagcagtagacgagaaaggtttatacgaaaaacaattagatatattcttaaatccatttgacgaagaagtcattgctcaagctgaaaaagatggtattggttatgattggattgaagctgcacaaaactctccaatttataagttagcaattgaatataaacttgcatttccgttacatcctgaatttagaacgatgccgatggtttggtattgcccaccacttagcccaattatgagctattttgaaggtaaaaatacaactcaaaatccagatgcgattttcccagccattgaagaaatgcgtttacctattgaatacttagctaatattttcactgcaggagatacagagccagtaaaaggagccctacaacgtatggcaatgatgagaagttatatgagatctcaagttactcaacagccatttgacacgtctcgattagagcgattaggtataaccgagcgccaaactaaagacatgtatcgtttattaggactagctaaatatgaagatcgatttgttattccaacatcacacaaagaaacctatttagatacgtatcacgcacaaggtagtacaggatacaattacggcggcgagcattttggagataactgtgaaggctgtggcgttgcagtaggttcagggaaaactggtcaagaaatttataatgagaatttctatggagggattttccgtgattaa

SEQ ID NO: 415115 - DNA, 576 bp, Staphylococcus aureus
gtgattaatttcgataattttaaaaaatatcaagaaagttttggatatatggcacaacagttatgttttccagaaaaattaacttttcatccaaaaacttttgaagaaacaatttcgaaagatcatccagcatatgaagatttagtagcatttagaaatgtaatgatgacattttcattatcagaaatcaaagcgatttatacagatacatttgattttacgaaaaaagcaccattatatatgacgtataacaaatttgatacgcaaaaagaacgtgggcaaatgttagctaaattaaaggtattatatgaaatgtttggactagaaatggtagataatgaactttctgattatctaccgttgatgcttcaatttttgcaagtggcagaatggcgaaatgatccaagagctgaagagaatattcaattaatcattatgattattgaggatggaacatatgtgatggcgaatgcacttggtgaagataataatccatatgcctatgtgattcaagcacttagaaaaacattgaaattatgtttgacatcaccaaaaggagtgaaacatcatgcttaa

SEQ ID NO: 415116 - DNA, 678 bp, Staphylococcus aureus
atgcttaatcagtttttatgggttatatttccgtatttatgtttagttgtctttgtcgcaggtcatattgcacgttatcgttatgataaattttcttggacagctaaatctagtgaactaatagaaagaaaaaggttgatgtggggaagtttattatttcacttaggtattattccagtgttttttggacacgtagttggattgttaataccgaaatcatggatggatgcagtgggggtatctgagcatttatatcatataggcgctgtttatattggtagcatctttggtataataactttgatagggatgtttttattaacagcgagacgtgttactacgaaaagtattcgaagattaagttcagcgtcggatatatttgtaaatttcttattattacttatcgtatttatgggatgttacgcaacattagtaaccaatatacaacatccagattttaactacagaacttcattatcaatttggtttagacaattatttatgttaaaaccagatgcgtcattgatgagtggtgtgccgattgcatttaaaatgcatatattgttaggtttcactattatggcttgttggccatttacacgtttggtacatgtttggagtgtacctttgacatatataaatcgcagatatattatttaccgtaagaataaagtgtaa

SEQ ID NO: 415117 - DNA, 1035 bp, Staphylococcus aureus
atgattaatgaggacagtatacagttagatactttattgaaaaaatattatgagcattcaatcgaaaagatagtttttgctgatgataacggcaaaattattgcaatgaatgatgctgctaaagatatattatctgaagaagataattacagtgctgtggcgaatgcgatttgtcacagatgtgaagggtatacaaatgcctatgatgtacaatcatgtaaagactgtttcttagaatcgatgcaagtacaagctacgaatttccaagtatttatgaagacgaaagatcaaaaagtgatgccatttacagcaacatatcagttgattgatcaagacaggggaattcatgcatttacgcttcaaaatgtttcatcacaaattgaacagcaagagaaattacatcaacaacgtatgatgcgtaaaacaatctcagcccaagaaaatgaaagaaagcgaatttctagagagttacatgatagtgtgattcaagaaatgctcaatgtagatgttcaattgagattattaaaatatcaagaagatacaactaagcttttggaagacgcagaaaatattgaatatattgtcgctaaattaattgatgatatacgtaatatgtcggttgaattaagacccgcttctttggatgatctaggtcttgaagcagcttttaaatcatattttaaacagtttgaagaaaattatggaataaaaatcatatatacatcaaatattaaaaatactcgctttgatagtgatattgaaacggttgtttatcgagtagtgcaagaagctattctaaatgcgttgaaatacgctgatgtaaatgaaataaatgtaggtatccgtcaaactgggcgccatttggtagcagaagtgatagatgcgggaaatggttttgatccaagttctaagcctaaaggttctggactcggtttatatggaatgaatgagcgagctgagttagtcagcggtagcgtcaatattgaaacgaaaattggtgagggtaccaatgttacattgaacattccaatttga

SEQ ID NO: 415118 - DNA, 654 bp, Staphylococcus aureus; identical to SEQ ID NO: 405008

SEQ ID NO: 415119 - DNA, 741 bp, Staphylococcus aureus; identical to SEQ ID NO: 405009

SEQ ID NO: 415120 - DNA, 915 bp, Staphylococcus aureus
atgtataaaatcaatattattagatcagattccgtctataagaatatactcaaggcaccaataaacgaccgtgattcaattttcactaaagaaatattagtaccttttaaaaagaaatttgaggtacaacatatgcctatttataatgatgacaaacagacaatgagtgcgattcaatttttagatgcctttcaaatttctcccaaagatttacgcatgtctgaccaaatgtcaatacaatacctgaataatgatttctggagtaattgcgaaaaatatttaaaagttgctatagatcaattttcaaattatagtatctcatctcaagtttctaactatcatttcacagtattacttggagatagccaaaaaccacttatgtatctaaataaaaatcgcggtggtgatggtggcataccaggttatattatgatttatttagtgccgagtacaagtacaattaattctatgaaaagcttaattgcacatgaagtaaatcataatatgcgctatcaatatattgattgggatggcggaagtttgattgaattgattattgcagaaggattagctgaaaactatgtagaatcattgtatggtaaagcgcatattggaccgtgggtaacaaatactaattggagtcgtgataacgtaaaaattaaaaatactatttataatcatttatatttaaagcatatatttgaatcgatgccttatctctatggtgatgatattaataaacttcaaggtaggcctatcgttggcctatctcatgctgccgggtatgcatgtggctatcacttggtaaaatactttttacaaaaaacaaacatacctattgaagttgctacaacacttccagcacaaaaaataataaatgaggtgactgaattttggcatacacatacactttaa

SEQ ID NO: 415121 - DNA, 423 bp, Staphylococcus aureus
ttgaacttcaatcaattcgagaatcaaaacttttttaacggtaatccaagtgatacatttaaagatttaggtaaacaagtatttaattacttttcaacaccttcatttgtaacgaatatatatgaaacagacgaattatattacttagaagctgaactagcaggtgtaaataaagaagatattagtatcgatttcaataataatacgctcactattcaagctactagaagcgcaaaatacaaatctgaacaactcattttagatgagcgtaacttcgaatcattaatgcgtcaatttgattttgaagctgttgataagcaacatattactgctagttttgaaaatgggttattaaccattacattgcctaaaatcaaaccaagcaatgaaactacttcatcaacatctattccaatttcatag

SEQ ID NO: 415122 - DNA, 447 bp, Staphylococcus aureus
atgtatgtagaaaacagctatcttagcaagcagttgtgttttttattttatgtttcttcaaaagaaataattaaaaaatacacaaactatcttaaggaatatgatttaacctatactggttacattgttttaatggcgattgaaaatgatgaaaaacttaacatcaaaaaattaggtgaacgtgtattcttagattctggaacactgacaccattactaaagaaattagaaaagaaagattacgttgttcgaacacgtgaagagaaagatgaaagaaacctacaaatttctctaacagaacaaggtaaagcaataaaaagccctcttgctgaaatttctgttaaggtctttaatgaattcaacatttcagaacgagaagcatcagatataattaataatttgcggaattttgtttctaaaaattttgactattccgacagaaagtaa

SEQ ID NO: 415123 - DNA, 366 bp, Staphylococcus aureus
atgaagaagaaaaaaaacgcgattaaagttatcattatattatttatttcattaattgttgcagtagcatttttctttggtctgaaaacatatcaaggccataagaatattcaactaattgacagttacttggaagagaaaaatctaaaagataaaattaaatcagaaaaaacagagtatagtgctaaaaaaggtctcttctataaggaagttacgtttaaagatgaacctggtgtaacttatgttgtgcaaccaatcagtactaataaaggattatttgttgaaggctttgatacagagactaagaaaagtttgaaaactgcaaagcataaatatttcaatcaaaattataaaccatcaaaatag

SEQ ID NO: 415124 - DNA, 423 bp, Staphylococcus aureus
atgagtaactcacaagcaattcaagcaattgaaaacgtgttagcaacgtcaaaagttggtgtattatcaactgcatataataacaaacctaatagtagatatatggtcttttataatgatggtcttactttatatactaaaacgaatatccattctgctaaggtcaaagaaattaaagataatccagcagcatatgttttgttaggctataacgacacaactaatcgtagtttcgttgaaatggaagccacgatagaagtagttactgatcaaaaagtaatcgattggttatgggagactcaagataaaagctttttcagttcaaaagaagacccagaactttgtgttttaaaggtgacaccacaatctgttaaattgatgaatgacaaatcattagatacacctatcaaaatcgatttataa

SEQ ID NO: 415125 - DNA, 384 bp, Staphylococcus aureus
atgaaagaacgtggccatatcgaacagctttggcgtgaggaaaaatatcatgtattgttacacagtcaacagtcttaccaaatgataaggaatgctttaaaaacggatttatcacttcatcaagtccaacaaatgattgatgatgctttgttaattgaaccgagtataggaagtgtatgtaatgcttttgatcatatgtggggatattttaaaaaatgtgcgaatgaagaagaaagaaaacaatcaaaactacttaaagctgattttattaatggtaaaatcgacacccaaactttattagattttttagcagaacttgctaataaatatgatgttcaatatttactacaaagtcgtgttttaaacacaaaaagaaagagatag

SEQ ID NO: 415126 - DNA, 1443 bp, Staphylococcus aureus
atgaattataagcaatccgcagaagatattttgaacgcgataggcggagaagagaatttagatgcaatggcgcattgtgcaacgagactacgattagttttaaatgatgaaagtttagtaaatgaagaggcgctaaacaatatggatgtagttaaagggacgttttctactgggggacaataccaaattattattgggtctggtacagtcaataaagtatttagtgaactggaaaaattaactggaaaagaagcatcaaccacttcggaagtcaaagcacaatctgctaaaaatatgaatccgttacagcgatttgtaaaaatgctttcagatatctttgttccgattataccagccatcgttgctggtggtttattaatggggttaaataacattttgactgcgaaagatttattcttttcaggtaaatcattgatagatgtatatagtcaatttgctggattagctgaaatgataaatgtttttgcgaatgcaccatttacattattaccaattttaattggatttagtgcagcaaaacgctttggtggcaatccatttttaggtgctgtattaggtatgatactagttcatccatcgctaatgagcgcatacgatttcccaaaagcagttgaagcaggtaaggctattccatattgggatgtttttggtttgcatattaatcaagtaggttatcaaggacaagtgttacctatgcttgtagcagcttatatcttagcctcaattgaaaaagggttacgcaaagttattccaacggtgttagataatttgttaacaccattgttatctatttttataacagcatttctaacattttcatttgtaggtccaatcactcgacaattaggttactggttatcagatggtttaacatggctttatgaatttggtggtgcaattggtggattaatattcggattattgtatgctccgattgttattacaggtatgcatcatagctttatagctgtagaaacgacattaattgcagatgccactaaaacgggtggatcatttatattcccgattgcgacaatgtctaatgttgcacaaggtggtgcagcaattgcagcgttctttattattaaacaaaataagaagttaaaaggtgtggcatctgccgcaggtatttcagcattacttggtattacagaaccggctatgtttggtgttaacttaaaactaagatatccatttattggcgctatcgttggatcaggtattggttcagcatatattgctttcttcaaggttaaagcaatcgcattaggaactgctggattgccaggatttatttcaatcaatccagtacatgcaggatggttacactactttgttggtatgacaatatcattcatcattgctataacagttactttaattttatctaaaagaaaagcaaataaagaagttgtagaataa

SEQ ID NO: 415127 - DNA, 945 bp, Staphylococcus aureus
atgattacttcattcagacattctgaagatatagataaacatattataaaaacaccattagatcatacagcgtcatggattaatgtagtagaaccagaccgagaagaaattgaaaatcttatggaacaatataatatacctgaagactttatacgtgaccctttggactcagaagaaagttcccgtattgaatatgacgaagatactggttactcattaatcattattgatttacctatcgtcaattcaactaatcgtagcgttctatcttttgtaacgattccattaggcattattattggcaacggtattatcgtaacagtttgtgacgctgaaaatgaatttttagaaaatttacctaagcgtgatattaatttaaaatttcacagcagatttgcattagaaattttaactactattgccgaccattataatcgtaacttacgattacttaataaaagtagaattcgtattgagaaagaactaaaaaataacattactaacaaacaacttttcaaattaatggaagttgaaaaaagtttagtatactttttagctgccttaaaaggtaacgatacaattattaaaaagttattccgtttacctgcaattaaacgttttgaagaagatgaagaattactagaagatttaatcattgaaaataaccaagccatcgaaacaacagaattacatcaacgtatcttagaaagtatcacaacatcatacgcttccttattatctaatgatatgaatacgattatgaagacattaacacttttcacggtactattaacgttaccaacgctcgtatttagtttcttcggtatgaatgtgccgttgccaattgatgaccatagttatatatcttggattattgtggtaggtatttcattaattcttgtcgtaattgttagtattttcttatggcgtaaacagaaattataa

SEQ ID NO: 415128 - DNA, 624 bp, Staphylococcus aureus
ttgaaagaagataggcgaattagaaagacaaagtcctccattaaacaagcgttcactaaattactacaagaaaaagatttagaaaagattaccattcgcgacataacaacacgcgctgatatcaatagagggacattttacttacattacgaggataaatatatgttactcgcagatatggaagatgagtatatttcagaactaacgacatatactcaatttgatttgttacgcggttcttcaattgaagacattgcgaatacttttgtaaataatatactcaaaaatattttccaacatattcatgataatttagagttttatcatactattttacaattggaacgcacgagtcaattagaattgaaaatcaacgaacatatcaaaaataatatgcaacgttatattagtatcaatcattctatcggaggcgttccagagatgtatttttacagttacgtttccggagcaacaatttcaattattaaatactgggtaatggacaaacagcccatttcagttgatgaattagctaaacatgtgcataatattatttttaatggtccattaagaataatggcagaaaaccgtttgcataaatcaaaccttgattcactaacttaa

SEQ ID NO: 415129 - DNA, 1278 bp, Staphylococcus aureus; identical to SEQ ID NO: 409952

SEQ ID NO: 415130 - DNA, 432 bp, Staphylococcus aureus; identical to SEQ ID NO: 405025

SEQ ID NO: 415131 - DNA, 336 bp, Staphylococcus aureus
atgagtccaaagacgcgcgaagcagctgaaaaaggattacctaatgccttatttacagtaaccttgtatgataaagatcggttaattggtatgggtagagtgattggcgatggcggaactgtttttcaaattgttgatattgctgtttcgaaaagttatcaaggtcaagattacggcagtctaattatggaacatattatgaagtatattaaaaatgtatctgtcgaaagtgcatacgttagtctgatcgcagactacccagcggataaattatatgcaaaatttggatttatgcctaccgaaccagattcaggcggtatgtatatcaaatactaa

SEQ ID NO: 415132 - DNA, 516 bp, Staphylococcus aureus
atggctgggataatcaaagaaatttcagaacaaaatgctagtgaattagttgaattagcaactagaacattttatgacacgtttggttcttactatgatgacaaagattttgatcaattttttaaagacaattatactgtagaaaaatttacacaagagattaaccatgtagattcatttcattatttttatcaagaagatggtgcgaatgttggttatataaagatgaatattaatagtgctcaaactgaagaaatgggggagacctatttagaagtgcagcgcatatattttttgaaagactttcaaggtggcggaagaggttcacaattgatagaattggccgaaaaaattgctcaagaacataataaacataaaatttggctaggagtttgggagcataatcctcgtgctcaagcattttataaacgtcatggatttaaagtggttggtgaacatcattttcaaacaggtgatgtaacggatacagatttaattatggaaaaagagttataa

SEQ ID NO: 415133 - DNA, 615 bp, Staphylococcus aureus
atgaaaagattagttacagggttactagcattatcattatttttagctgcatgtggtcaagatagtgaccaacaaaaagacagtaataaagaaaaagatgataaagcgaaaactgaacaacaagataaaaaaacaaatgattcatctaaagataagaaagacaataaagatgatagtaaagacgtaaacaaagataataaagataatagtgcaaacgataaccagcaacaatctaattcaaatgcaacaaacaatgaccaaaaccaaacaaataataaccaatcaagtaataatcaaaaatcaagttacgttgcaccatattatggacaaaatgccgcgccggttgcacgtcaaatttatccgtttattggaaataaaactcaagctttacagcaattgccaaatttccaaacagctttaaatgcggctaataatgaagcaaataaatttggtagtaataataaagtgtataatgattattctattgaagaacataatggcaactataagtatgtgtttagttttaaagacccaaatgcaaatggaaaatattcaattgtaacggttgattatactggacaagcaatggttactgatccaaactaccaacaataa

SEQ ID NO: 415134 - DNA, 1599 bp, Staphylococcus aureus
atgttagtaaatacgtttaacccatttgataatttattattatcgtctttaattgcagcaataccgattgtactgtttttactatgtttaactgtttttaaaatgaaaggtatttatgcagctattacaacacttgttgtaacattactaattgcaataccatttttcaaattgccagttggtatcgcttctggtgcagtagtcgaaggtttcttccaaggtatcattccgattggctatatcgttatgatggcagtattgttatacaaaattactgttgaatctggacaatttttaacaattcaagatagtattacaaatatttcacaagaccaacgtattcaagttttacttattggatttgcattcaacgcatttttagaaggtgcagcaggatttggtgtaccaattgcaatttgtgcacttttattaacacaattaggatttaatccattaaaagctgcgatgttatgtttagtcgcaaatgcagcgtctggtgcttttggtgcgattggtatccctgtaggtgttgtagaaacgttgaaattacctggagatgtttcagtattaggtgtttctcaatcagcaactttaacattggcaatcataaatttcattattccattcttacttatctttattattgatggttttagaggtgttaaagaaacattaccagcaattttagtagtttcaatcacttatacacttactcaaggattattaactgtattcagtggacctgaattagcagatattattccaccgttattaacaatgttagcattagcagtattttctaaaaaattccaaccaaaacacatttatcgtgttaataaagatgaagaaattgaacctgcaaaagcacattctgcaaaagcagtattacatgcatggagcccattcattgtattaacagtcattgtaatgatttggagtgcgccattctttaaaaacttattcttaccaaatggtgctttatcatcattagtatttaaattcaacttacctggaacaatcagcgaagttacgcataaaccattagtattgactttaaatattattggacaaacaggtacagctattttattaactattattattacaattttaatgtctaaaaaggttaactttaaagatgctgttagattattcggcgttacatttaaagagttgtggttaccagttcttacaatttgtttcatcttagcaatttctaaaatcacaacttatggtggtttaagtgcagcaatgggtcaaggtatagctaaagcaggtaatgtcttcccagttctatcaccaatcttaggttggataggtgtgtttatgacaggatcagttgtaaataacaattcattatttgcaccaattcaagcttctgttgcacaacaaattggaacaagtggttcacttcttgtatctgctaatacagttggtggtgtagcggcaaaattgatttcaccacaatcaattgcaattgcaactgcagcagtaaaacaagttggtaaggaatcagaattattaaaaatgacattgaaatacagtgtatgtttactaatattcatctgtatttggactttcatcttgtcattattataa

SEQ ID NO: 415135 - DNA, 1479 bp, Staphylococcus aureus
atgacaacacaacatagcaaaacagatgtcatcttaattggtggcggtattatgagtgcaacattaggaacattacttaaagaattatcacctgagaaaaatattaaagtgtttgaaaaattagcacaacctggcgaagagagttcaaatgtatggaataatgccggtacagggcattcagcactttgcgagttgaactatacaaaagaaggtaaggatggcacagttgattgtagtaaagcaattaagataaatgagcagtaccaaatttcaaaacagttttgggcatatttagttaaaacaggacaattagataacccagatcgctttattcaagcggtgccacacatgagttttgtcattggcgaagataatgtagcttttataaaaagtcgtgttgcaacgttaaagaaaagtgttttattcgaaaaaatgaaattatcgcaagatgaagaagaaatgaaatcttgggtaccgttaatgattgaaggtcgtaagtctgatgaaccaattgctttaacttatgatgaaactggtacagatgttaactttggtgcgttaactgcaaagttatttgaaaatttagagcaacgtggtgtgggaattcaatataagcagaatgtattagacatcaagaaacagaaatctggggcatggctagttaaagttaaagatttagaaactaatgaaacgacaacatatgaatctgattttgtatttattggtgctggcggtgcgagtttaccattactccaaaagactgggattaaacaatcaaaacatattggtggtttcccagtaagtggattattcctgcgctgtacaaatcaagaagtgattgatcgtcatcatgctaaagtgtacggaaaagcagcagtgggtgcgccaccaatgtcagtgccgcacttagatacacgttttgtagacggcaagcgttcattgttatttggtccatttgcaggtttctcacctaaatttttaaaaacaggttcacatatggatttaattaaatcggttaaaccaaataatatcgtgacgatgttatctgcaggtatcaaagaaatgagtcttacgaagtatttagtgtcacaattgatgttatctaatgatgagcgtatggatgatttaagagtctttttcccaaatgctaaaaatgaagattgggaagtgattacagcagggcaacgtgtccaagtaatcaaggatactgaggattctaaaggtaacttacaatttggtaccgaagtcattacgtcagatgatggcacattagctgcattacttggtgcatcacctggtgcgtcaacagctgtagatattatgtttgatgttttacagcgatgctatcgtgatgaattcaaagggtgggaaccaaagattaaagaaatggtgccgtcatttggttatcgcttaacagatcatgaggatttatatcacaaaattaatgaagaagtaactaagtatttacaagttaaataa

SEQ ID NO: 415136 - DNA, 456 bp, Staphylococcus aureus
atgaaaaatttgaaaaactcattatttattagcttaatcattggtttgtccctttcactgttctttagtatgttatttgcagacggcaaatattatccactgaacccacaatcaactattggcattttgtattataatcatttcacagaaactaccgtaatgttgatttctatcattttatggttactcataggcgtcgtctttttccttggagattttatctttaaatacacagattggagcattactaaagcaactataatgcatttcataacaacgtatgtcggattcttgcctttagcaatgcttgccggttggtttccactaacagtgcattatctaatcatattcacaattatcttcattgtgatttatgtattaatttggataattcaattctttaaaaacaagaactacgtagacactattaacgagcaactgaaacaattaaaatga

SEQ ID NO: 415137 - DNA, 444 bp, Staphylococcus aureus
atgatgaaactcaatttatttatcaatgcaaatgagacggaatcttatattgatatacatgcacctaaaatgaatgatcacgttcaaagtattattaatgcagtcaatgatttagacaaatcacatacattagtcggatacatagacaaagaaatccatatcattaatgtatcagatgttataacattccaagttattaataaaaatgtaacagccattacaagcaatcaaaaattcaaactaaaattacgactttatgaactagaaaaacagttaccacaacatttcattcgcatttccaaatcagaaatcgtcaacaagtattacattgaaaaattattattagagccaaatggacttatacgtatgtatcttaaagatgcacactacacctattcttctagacgttatttaaaatctataaaggagcgcttatcaatatga

SEQ ID NO: 415138 - DNA, 1374 bp, Staphylococcus aureus; identical to SEQ ID NO: 408065

SEQ ID NO: 415139 - DNA, 675 bp, Staphylococcus aureus
atggtgcaatgtcttgttgtcgatgacgatcctcgaatcctaaattatatagctagccatttacaaacagagcacattgatgcatacacacaaccaagtggtgaagctgcattaaaacttttagaaaaacagcgtgtcgatattgcagtggtagatattatgatggatggtatggacggctttcaattatgtaatacattaaaaaatgattatgatataccagttattatgttaacagcgcgggatgcacttagtgacaaagagcgtgcgtttataagtggtactgacgattatgtaaccaaaccctttgaggttaaggaacttatttttagaattcgtgcggtattacgtcgatataatatcaattcaaattcagaaatgactattggcaacttaacgctaaaccaatcctatttggaactccaagtatctaataaaacgatgacgttaccgaacaaggaatttcaattattatttatgcttgcagcacgtcctaagcaaatctttactcgtgaacaaataatagaaaaaatttggggctatgattatgaaggagatgaacgaacagttgacgttcatattaagcgactacgccaaagattaaaaaaattaaatgccacacttacaattgaaacagtaagaggacaaggctataaggtggagaatcatgtttaa

SEQ ID NO: 415140 - DNA, 1056 bp, Staphylococcus aureus; identical to SEQ ID NO: 405038

SEQ ID NO: 415141 - DNA, 666 bp, Staphylococcus aureus
atggcattagtcgttaaagatatcgtcaaaaatttcggagaaggtttgtctgaaacaaaagttttaaaaggtattaattttgaagtggaacaaggggaatttgtcattttaaatggtgcctctggttctgggaaaacaacattgctaacgatattaggcggattgttaagtcaaacgagtggtacagtgctttacaatgatgcaccattgtttgataaacagcatcgtcctagtgatttgcgattggaagatattggttttatttttcaatcttcacatttagttccttatttaaaagtgatagagcaattgacactcgtaggccaagaagcgggaatgaccaaacaacaaagttcaacaagagcaatacaacttttgaaaaatattgggttagaagatcgcttgaatgtatatccgcatcagttatctggcggtgaaaagcaacgtgttgcgattatgagagcatttatgaataatccgaaaatcattttagcagatgagcccacagcaagtttagatgccgatagagcaacaaaagttgttgagatgatacgtcaacaaattaaagaacaacaaatgattggtattatgattacacacgatcgaagattatttgaatatgcagatcgagtgattgaattagaagatggcaaaataactgattag

SEQ ID NO: 415142 - DNA, 969 bp, Staphylococcus aureus
atgttattgaatttattattaatatttatacttatcgttatttgtccgttaattttcaactatactctgacgttaaatttaacatgctacatcttagttgtcatatcgatatttttgtcactcatctatagcatcatgacctatactttcccttggtctatgtttgtaacatttataataatcagtattatcatgctattcaaacatagatatttattttctcatacttctagtcgcttatttattaaaaaattattatctttttcatataaatttgtactctacacatcagcacttctatttataagtacgattcagtcacctattgtgaaaggtttgtctatgtggttagctatattatgtctttccctgttactaacctttatttgttatctcgtttggacagtatcatatagacatagatcatacaacaaagaagttgatatcataattgtgttaggtgctggtatttttaccgaatttgtcacaccaatgcttgcagcgcgtttagaccgtgcacttgatatctatcaacaacaagcatcagcaacaaagattattgtatctggcggacaaggaccagacgaaccaatttctgaagctttagctatgcaacgttatttgattgcacatggtgttgataaaacagatatactaatggaatctcactctataaatacatacacaaactttttatattctaaacaaatcatcaacaatttgtatcatgaagcagttaaaattgtttgtgtaacaagtcagtttcatgtattgcgcgccttacgactagcccaaaaattaggtttatctatcgatggtgtcggaagtcatacaccatatcactttttcttacatgtgctcattaaagattatctaggcgtaatgtatcagtatagattgttattaacgttatattgttcaagtagttggtttatatgtctttacgccgcttttatttataatagttaa

SEQ ID NO: 415143 - DNA, 1383 bp, Staphylococcus aureus
atgaaatcttgcccgaagtgcggacaacaagcacaagatgatgtacagatatgtacacaatgtggacataaatttgatagtcgtcaagcattatatagaaagtcaaccgatgaagatatacaaactaataacatcaagatgagaaaaatggtgccttgggcaattggttttttcattttaatcttaattattatattgttctttttactaagaaacttcaattcacctgaagcgcaaactaaaatattagtgaatgcgattgagaataatgataaacaaaaagtagcaacattattaagtactaaagataataaagtagattctgaagaagcgaaagtatacattaactatatcaaagatgaagttgggcttaagcaatttgtcagcgaccttaaaaatacggtacataaattgaataagagtaagaccagcgtagcttcttatattcaaaccagatctggtcaaaatatattacgtgtaagtaaaaatggcacgcgttatatctttttcgataatatgagctttactgcacctaccaagcaaccaattgttaagccgaaagaaaaaacaaaatatgagtttaaatctggtggtaagaaaaagatggttatagctgaagcaaataaagtgacgccaataggtaattttataccggggacatatagaattccagctatgaaatcaactgagaacggtgattttgcaggctatttaaaatttgattttagacaaagtaattctgaaacggtagatgttactgaagattttgaagaagcaaatataactgtaactttaaaaggcgatacaaaattaaatgatagttctaaaaaagtaactataaatgaccgtgaaatggcattttcaagttccaaaacgtatggtccatatccacaaaataaagatattaccatttcagcttcaggtaaagcgaaaggtaaaacatttacaacacagacgaagacgattaaagccagcgatttaaaatacaatacagagataactttgaattttgacagtgaagatatcgaagactatgttgaaaagaaagaaaaagaagaaaacagcttgaagaacaaattgatagaattctttgctggatattctttagcgaataatgctgcgtttaatcagtcagattttgattttgtatcgtcatatataaaaaaaggatcatctttttatgatgatgtaaagaagcgtgtatctaaaggaagtttaatgatgattagttcaccacaaattatagatgctgaaaaacatggtgataagattaccgcaaccgtaagattaataaatgaaaacggtaagcaagtagataaagaatatgagcttgaacaaggctcgcaagaccgcttgcaattaatcaagacatcagaaaaatag

SEQ ID NO: 415144 - DNA, 1209 bp, Staphylococcus aureus
atgaatgatttaacgcattttaacaagcgttcaccgatatttattattattttaggatctttgacggccattggagcattatcgatagatatgtttttgcctggattaccagatattagacatgattttcaaacaacgacgtctaacgcacaattaacattatcgatgtttatgattggtttagcgtttggtaatttgtttgctggtccaatttcagattcaactgggcgcagaaagccgcttattatagctatgattatttttacattagcaagtttaggtattgtttttgtacataatatttggctgatggttgcattaagatttcttcaaggagtgacaggtggcgcagcagcagttatttcaagagctatagcaagtgatatgtatagtggtaatgaactaactaagtttatggcattattgatgcttgttaatggtattgcaccagttgttgcgccaacaatagggggcataattttaaattattctgtctggcgtatggtctttgtcattctgactatctttggtttcgtcatggtcataggttctttattaaaagtacctgaatcattaacagtgacaaatcgtgagtcaagtagtggattaaaaacaatgtttaaaaacttcaaaatattattgaagacgccacgttttgtattaccaatgctcattcaaggtatgacatttgtaatattatttacttatatttctgcgtctccgtttattattcaaaaaatttatggcatgactgcaatacaatttagttggatgtttgcaggaattggtattacgctcattatatcaagtcaacttactgggtaccttgttgattttatagactcacaaaaattgatgagaggcatgacgatgattcagattatcggtgtaattttagtgacgattgtattgcttaatcattggaacttttggattttagcgataggatttatcattttaatagcaccagtgacaggtgttgcgacacttggttttacaatagctatggatgaaagtagtagtggtagagggagttcatcaagtttattaggtttagtgcagtttttatttggtggtgttgcatcgccattagtgggggtaaaaggtgaagataatcctataccttacataattattattatagctacagcagttatattaattattttacagatttataatatgaaggtatttaaaacaaatcgatga

SEQ ID NO: 415145 - DNA, 555 bp, Staphylococcus aureus
atgaaacgacaagccaaaatagaaattcaaaacgcacttgttgatttgatggctgaatatccttttcaagaaatatccactaaaatgatttgcgcgtattgtaatattaatcgttctactttttatgattattacaaagataaatttgatttattggataccatcaactcaaagcataaagaaaaattccaatttcttctaagcgcgctacatcataatttcgaaaatattaaacaggataagcttaaactttataaattcttcattattattgctaagtatatcaagcacaatgagcagtttttcaaagacattttagttacctatccaatgaaaacattattcatagactatataaatttagcgagagattactatcaacaaattatgaatgactatagtactacagtaaccaataaacagctttatgttacatatatcataggcggtcaagctggggtgtttattaattggctttcgaatggttgtaatgaatcacctgaagaagttgctgacattttattggctaatacgattaaacttcaaatccaataa

SEQ ID NO: 415146 - DNA, 648 bp, Staphylococcus aureus; identical to SEQ ID NO: 413341

SEQ ID NO: 415147 - DNA, 1932 bp, Staphylococcus aureus
atgactacgaccttcattattagctacattattttagcgctcattattgttggggttatcaatttatttttaataagatcaagaaaaaaaggcaaacgccaacaaaaggaacaacaatttacgacacgtcaatcaaatcaatctaaatttaaagctagtgatttagacaaaacaactgatcaatcgacacaacgtatgacgcatgaagagttgcgtgttgacaatcaagatgatcatagccaagttagtctaaatggttacacaaaggggtctgagaaagatcaagaagcattcactaataataatggtgaggaagcagttgctgctaaaaatcctgaatcagaagaatataaagtgaatgaaaaaataaaaaaagaacataaaaactttatttttggtgaaggtgtttcacgcggtaaaatattagcggcattattattcggtatgtttattgcgattttaaaccaaacattattaaatgttgctttgccaaaaattaatacggaatttaatatttctgcgtcaacagggcaatggttgatgacgggattcatgttagtaaacggtattttaataccaattacggcgtatctatttaataaatattcatatcgaaaattatttttagttgcgttagtactctttacaattggttcattaatctgtgcgatttcaatgaatttcccaatcatgatggttggacgtgtattacaagccattggtgcaggtgtactaatgccattaggttcaattgttattattacaatttatccacctgaaaaacgtggtgctgccatgggtacaatgggtatcgcaatgattttagcacctgcaattggtccaacattatcaggttatattgtacaaaattaccattggaatgtgatgttttacggtatgttcattatcggtattattgcaatcttagttggttttgtatggtttaagttatatcaatatacaacaaaccctaaagctgatatcccaggtatcatttttagtacgattggttttggtgctttgttatacggcttttcagaagcggggaacaaaggatggggttctgttgagatagaaacaatgtttgcgattggtattatctttattattctatttgtaataagagaattaagaatgaaatcaccaatgttgaatttagaagtattaaaattcccaacatttacattaacaacaattattaatatggttgtaatgttaagtttatatggtggtatgattttattaccgatttatttacaaaatttacgcggattctcagcattagattccggattgttattattacctggttctctaattatgggtctacttggaccatttgcaggtaaattgttagatactattggtttaaaaccattagctatctttggtattgctgtcatgacttatgcaacatgggaattaactaaattaaatatggatacaccatatatgacaatcatgggtatctatgtacttcgttcatttggtatggcatttataatgatgccaatggtaactgcagctattaatgcgttaccgggacgacttgcctctcatggtaatgctttcttaaatacgatgcgtcaattagcaggctctataggtacagcaatcttagttactgttatgacaacacaaacaacacaacatttatcagcttttggggaagagttagataaaacgaatcctgttgtacaagatcatatgcgtgaattagcatcgcaatatggtggtcaagaaggcgcaatgaaagtgttattacaatttgtaaataaactagcaacagttgaaggtattaatgatgcatttatagttgcaacgatatttagcatcatcgctttaattttatgtttatttttacaaagtaataaaaaagcaaaagctacagctcaaaagttagaagcaagctcaaataacaatcatgaataa

SEQ ID NO: 415148 - DNA, 639 bp, Staphylococcus aureus
atgacaaatccaaatcaacgattagaaccatttgatgagacatttcaacaaccgaatattcatcgtggtaagcgatatggtaagaaaaaacgttcattggtaagcatgattattcaaatcattgttgttatattaaccgcaatcgctggatacagcatgtggaaacaacccatttttaatattgtcttcaccaaagaatctgtagattttgatggcattaaaaattttaacgagacaattggaaaaatgcatcaattaaatattaatttgggtaatatcaatgatttacaacaaggaatcgatcgcttaattttagtctttaacggtttctttattctatgtatcgttagcctagtcataacaatactgacaattgtatttaatcgcacagttctaaaagtagtaaatattttagtgttaacaattatgttagtcattactttgtatttcagttatattattaaaacactcgcacaagaaattgcagatgctttaaaaaaatattatttaaatgtaccaccagatcaagtgattacagaagctgacgctattcataacggcatcattttactgggctgtagcatcggtttacttgttataagcttattcttccgtaatcgcatgcctcgtttaaaataa

SEQ ID NO: 415149 - DNA, 420 bp, Staphylococcus aureus
atgacagatgcattacaacaaaagattcatattgaattactagatttattagatgatgttaagtttgaattaacagaattaaatgcacaaaaagggttatacattaacggaccagcaaatcagctacttaagcgtggcgttcatatggcttatgttcaaggacaaaagcaagccatcgataatattatgactattgtggaacagcagcttgaagatcaacatttcctagaagattatgataaatttcaaaatgaggttactcatcgcaattatgataaaacagctaactttgcagaacttagtgatattccacgtcaattcgataattttttagatcaattttatcaaattaaagggcaatactttatcatcacacatatcaatacacttattggtgattttcactcagaagctcattaa

SEQ ID NO: 415150 - DNA, 492 bp, Staphylococcus aureus
atggttattatcaaacaactttttacacatactcaaaccgtaacatctgaattcattgaccataacaatcatatgcatgatgcaaattataatatcatttttagtgacgtcgtgaatcgttttaattacagccacggtctttctttaaaagaacgcgaaaatttagcatatacactatttacactagaagaacatacgacatacctctcagaattgtctcttggcgatgtatttactgttactttatatatttatgattacgattataagcggttgcatttatttttaacattaactaaagaagatggtacactagcatcaacaaatgaagtaatgatgatgggaattaatcagcacacacgtcgttctgatgcttttcctgaatcattctcaacacaaatagcacactattataaaaatcaaccaactatcacttggcctgaacaattaggacataaaatagcaattccacacaaaggagcattaaaatga

SEQ ID NO: 415151 - DNA, 948 bp, Staphylococcus aureus; identical to SEQ ID NO: 412711

SEQ ID NO: 415152 - DNA, 1050 bp, Staphylococcus aureus; identical to SEQ ID NO: 412712

SEQ ID NO: 415153 - DNA, 609 bp, Staphylococcus aureus; identical to SEQ ID NO: 413437

SEQ ID NO: 415154 - DNA, 621 bp, Staphylococcus aureus
atggaacaattacctcaagtaggttttatgaaatcattcgtattattttggaaaaattatgtaaattttaaggggagatcaagacgtagtgaatattggtatatggcactatggcatttgatacttatggttccagctgtgtgtgtgctaataataaacctatttctagtctttatttctatagcggcagataacgaaacattaatagttatgagtatattgatgattatccttacatctgtgtatacttttgtctatagtttggcaacgtttattccaaatttagcgttgtgcgttcgaagatttcacgatatatcaagaacaatgttatttccaatgattatgacagtattcagtattatattttatatagtattacagattatcgatagttattatgacagtgattttacattaatgccgatgggtcttaatattttgttagtacttctttattttgtttatttaggcctaacaattgttatgatagtattcctatgctttgacagtaagccggcaaataaatatggcgaaagcccaaaatacccgtctacaattaaaaatcaaccagtgacatctgaaacaccgaaaacaccggaagaaacagataatcaattgtaa

SEQ ID NO: 415155 - DNA, 1233 bp, Staphylococcus aureus
atgcataagttttgggcgacatttactttgacatatatcaaaaaaattaaagctaaatcatttgtaatttttatgattattattgctgccttaatgattggcctatctaacattgataagattattaacatgtttgatgatggtccagataaaattggtgtagcagcaccgaatgaacaaatctataaggttttcaagcaacaggcgaatacattccatagtgatgctaagtttactaaagtttctatagaagatgctgaaaaagaagtaaaaaaacataaacttgataaagcttatattatcaaggtgaatcaaaatcgcacgttacaagggacaatcattagtgagaagcgagtaagtcatgaagattcacaaaaagtacaagcactgcttacagctattcaaacaaatatggtagccggggaattaaatatcaacaaagaagacttacaaaaattacaagcacaaagtaaagttgataataaggtgatttctaatgatgaagtcgataaagtatcagaaggacaaaagattttcaactatgctttagcttatggtattatctttctaatgttcttcattgttttaaattatgcatctcaaatagctatggaaattgctagtgagaaaacatcgcgtgtcattgaaatgattattacaagtatttcaccaatccaacatatttttgctaaaattttaggcgttatagcagttgccgtgactcagattattttaattgtattgatggcagttatatgcatttttgcctttgacttaaaagacttgctacaaggttttaacgtggaaatgaatcaattgtcttggcaaattattattgtcggaattataagtagtattgttggaattatggcgtatgtattacttgcagccatcctcggatcattaacatctagaatagaagatttaaatcaatctttgatgccactgacattacttggtatgattgcattttatatcgcgatattcacgataaataatcctgatggacaacttgctttaatcacaagttatattccgtttttagcgccatttcaattagttgtacgcgctcaaacttcagggcttcaaatatatgaggtcatcttaagttctttaatctcaattgtaatggtagctgtcttgatatggattgcaattaaaacatataaagattcagtacttacatttgaacgtggcttatttaattcaatgaaacgtgtatttaaaaaataa

SEQ ID NO: 415156 - DNA, 327 bp, Staphylococcus aureus; identical to SEQ ID NO: 406338

SEQ ID NO: 415157 - DNA, 1020 bp, Staphylococcus aureus
atgatagttgaagttgagcaccaaagacaaggtgtagatttaatcaaaattgataatgatgaaactaaaattatttttacgaattatggagcaagagtagtgtcttggaaatatcatgataataatattgttcttggaaatgttgttgaagcggatgagttttatcatagtaatccttttaaatttggtgcttctataggaagatatagcggtagaattgataatgctaaatttaagttgaaaggtaaagaatatcagttagaaaaaaacaacggtgaacatcatttacatggtggatgtcatggtttggacaataagttatttgattatgaaattagaaatgaaattgctcaaattaaagttatatttaagacggtgttgaaatcagctgatgatcatttcccgggtgatatcgatgtgacgattacacatatttatgatgcggatcaccaatggtcgattgaatacgaagcagttgcatcagaagacacattgtttagtcctatgaatcatgtgtacttcaatttgaatcgagataataatgtcgttgataatcatcgcatttcaagtaatcaattagatatgtatgtattagatgagcgaaatattgttacaggtgatattctagatttacatgaagtgtttgaagataacaagataaaattgagtgatatttttacatcacaacatgcgcaattaagccaacaaatgacacgttttggtggtctcgatcacccatttacagttggtgaacataaaatgtatgttgaaaatcatgaatttatgttagaggtcgatacagatatgcctcatgttgtgttctttacttttaaccagcctgatgagtgggatagtccatttaatatttataaaccacattctggctttacattagaaacacaatttttaccaaatgatattaatttatatggtgaaaaagcaccgtcaattttaaaagctggtgaagtgttcaattcgaaaacaagtttccgtatcgaagaaaaagtagaaaatgattaa

SEQ ID NO: 415158 - DNA, 687 bp, Staphylococcus aureus; identical to SEQ ID NO: 406335

SEQ ID NO: 415159 - DNA, 936 bp, Staphylococcus aureus; identical to SEQ ID NO: 406333

SEQ ID NO: 415160 - DNA, 420 bp, Staphylococcus aureus
atgttaaaatctattaatcatatatgcttttcagtcagaaatttaaacgattcaatacatttttatagagatattttacttgggaaattgctattgacgggtaaaaaaactgcttattttgagcttgcaggcctatggattgctttaaatgaagaaaaagatataccacgtaatgaaattcacttttcatatacacatatagctttcactatagatgacagcgaatttaaatattggcatcagaggttaaaagataataacgtgaatattttagaaggaagagttagagatattagagatagacaatcaatttactttactgaccctgatggtcataagctagaattacatactggcacacttgagaacagattaaattattataaagaggctaaaccacatatgacattttacaaataa

SEQ ID NO: 415161 - DNA, 885 bp, Staphylococcus aureus; identical to SEQ ID NO: 410342

SEQ ID NO: 415162 - DNA, 1662 bp, Staphylococcus aureus
atgagaaaaattcaagcaaaaaaaggtttgagtattgagtgtaaaggttgggaacaagaagcagtacttagaatgttatacaacaatttagacccagaagttgctgaaagaccagaagatttagttgtttatggtggtattggaaaagcagcacgtaattgggaagcttttgaagcaatagagaaaacgttacgagaattagaatcagatgagacaatgttagtacaatcaggaaagccagttgctgtatttaaaacacatgaagaagcgccacgtgtattaatttcaaattcagtattagtgcctgaatgggcaaactgggatcattttaatgaattagataaaaaaggtttaatcatgtatggacagatgacagccggtagttggatatatattggttctcaaggtattgtgcaaggtacttatgagacatttgccgagctaggtaatcaacactttaatggagatttagcaggcactgttacactgacagcaggtttaggtggtatgggtggtgcgcaaccgttagcaattactatgaatcatggggtagcaatttgcgtggatgttgatgaaacacgtgttgataagcgaattgatacgaaatactgtgatgttaaaacagctgatttagatgaagcattaaaattagcagaagaggcgaaagaacgtggagaaggattatcaatcgggttagttggaaatgctgtagacatccatcaagcgattctagaaaaaggatttaaaattgacattattactgaccaaacaagtgcacatgatccgctaaatggatatgtgccacaaggatactctgtagaagaagcgaaagtattgcgtgaaaaagatccgaaaaaatatgttgaactgtcacaagcttcaatggcaaagcatgttgaattaatgcttgaattccaaaaacgtggcgctgtagcatttgattatggtaacaatattcgtcaagtagccttcaataacggagtgaaaaatgcttttgacttcccaggctttgtaccagcttacattagaccattattctgtgaaggtaaagggccattccgctttgctgcgttgagtggtgatccaaaagatatcgagcgtgcggatgaagaaatgcgcaaacttttcccagaaaatgaaaagttattaagatggcttgatttagctgaagaaaaaatttcatatcaaggactaccatcacgtattgcttggttaggctatggagaaagagcgaaaatgggcttagctttaaatcgtcttgtacgtgacggtgaaatttcagcaccaattgttattggacgagaccatttagatgctggttcagttgctagtcctaaccgtgaaacagaaagtatgaaagatggcagtgacgcggttggtgattgggctgtattgaatgcactcattaacacagctgcaggtggttcatggatttcattccatcacggtggcggtgttggcatgggatattcacttcatgcgggtatggttgttgtagcagatggatcagagcgtgctgaaagaagattggaacgtgtattgacgactgatccaggtatgggtgttgcccgacatgttgatgctggctatgacatcgctattcaaacagctaaagaaaaaggtattcatattccaatgattgataaagcaggtgataaataa

SEQ ID NO: 415163 - DNA, 1239 bp, Staphylococcus aureus; identical to SEQ ID NO: 413337

SEQ ID NO: 415164 - DNA, 1314 bp, Staphylococcus aureus
atggaagtacataaaaagagcaatgcttgggcattattccccttgttattatttgtggcgttgtttttaggcgtaggtattatcacaggtgattttacttcaatgccattaaatgttgcaattacgataacggtaattgtggcgttattaatgaatcgaaaagaatcatttgctaaaaaagttgaggtcttcacgaaaggtgcaggccattcaaacattattttaatgatgttgatttttattttagcaggtgcattttcaaatacagctgaaaaaatgggtggcgtaaagtcgacagttaatttaggactatcattaatcccagaaaatttaattattgtaggattgtttgtgatttgtatgtttgtttctatatctatggggacgtctgtaggaactgttgctgcaatagcacctgttggttacggatttgcacaagcgacagatgtaccaactgcgctagcaatggctacagttgttggaggtgcaatgttcggcgataatctatcaatgatttcagatacaacaattgctgcggttagaacacaacatacgaaaatgaaagataaattcagagtaaactttaaaattgtattgccaggtgctattttaacgattattattctgtatttcttaacgaatggcatttctttaaatcatgctaaaaactatgattataatctaattaaagttgtaccgtatattttagtattggtattagcattattaggtgtaaatgtcattatcgtattgattggcggaacattattagctggaatcattggtctcatagatggttcattcggttggatgggactactagatgcagtgtccaaaggtattataagcatggaagatattgctatgattgcgttgctaattggtggtttagtcggtattattcaacacaatggtggtattgaatggttgttgcaatttgttcgctctaaagtgaaatcaaagcgtggcgcagaattaggaattgcgagtttggtaagtgtcgcagatattgccacggcaaacaacaccatctctattattatgtcaggtcctttagctaaaaatattgcagatgaatatgatgtagattcaaggaaatcagcaagtattcttgatatatttggaggctgcttccaaggtttattaccatatagcccgcaagtcatttcagcggctggtgtagctggtatttcaccattaatgttattcccatacagcatttatcctatattattaggtgtatgcggacttattgcgattttatttaattttccaaagctaaaaaagaacactagtcaagaaatgaaacattaa

SEQ ID NO: 415165 - DNA, 507 bp, Staphylococcus aureus
gtggcaaaatttaatgtagagaatgaacatgtcgaagttgaaattgaaaagctttataaattttctccagagttagtatacgaagcttggacaaagaaagatttgttgaaacaatggtttatgacatcagccagaacgaataaagagattgaagcggacgttaaagaaggcggtaaatatcgtattgtagatcaacaacgtaatggcaaagtaaatgtgattgaaggcatttatgaatctttagttatggatgaatacgttaagatgactatcggtatgcctggactaagtgaaacacaagatgtcattgaggtagaattttttgaacgtgaaacaggtggcacccaaatgctattttattatcgttcattagttgaaaaagaaagacgatttactaatttagaatacaagcaaaagaaaaaagaatatcatgatgccatggtgcatggtttcgaattgatgtttgataagatgtaccacgttatcgaaacatcaacacaacaataa

SEQ ID NO: 415166 - DNA, 765 bp, Staphylococcus aureus
atgtttttagatgaacacattaatcgaaactttgataaacttaatgataatgatttacatatcgctcactttatcaatacacatatagatgaatgtaaaaatatgaaaatacaagatttagcgcaattcacacatgcctcgaatgcaaccattcacagatttacacgcaaattaggttttgacggttatagtgattttaaatcgtaccttaaatttgaaagtaataagacacaccaattaccttctaactctatcgatagtttcaaacaagaaatcgatagtacattcagttatttagaacgcgttgattaccagcttcttactgaaaaaatgcatacagcttcaacaatatatttgtatggtacagggcgtgcacagttaaacgttgcttcagaggcacagcgtatattgttaacgttacataatcatgtcattgtacttcatgatgaacatgaacttaaaatgattttgaacaagagtgaacctaatgatttattctttattatttcattatcaggtgaaacacatgaattattagaagtaacaaacttgcttcaacttagacaaaaatactttatttctgttactacaatgaaagataatacccttgctcaaaaagcaaattacaacgtctatgtatccagtaacacattctacttaactgatggtacagactattctagcttcatcagttatcatatattctttgaaacacttgtaagaaaatataatgagtatttactacataatgatatttcaaattag

SEQ ID NO: 415167 - DNA, 1605 bp, Staphylococcus aureus
atgaatgcgataaagcgtttcggtagtgcaatgattgtaccggtattaatgttcgctttctttgggatagtgcttggctttgcgacattatttaaaaatcctacaatcatggggagtttagcagatcaacatacgttttggtttaaattttggtcagtgatagaatctggtggctgggttatttttacgcatatggaagttgtatttgttgtaggtttaccactttctttagctaaaaaagcaccaggtcatgcagcgcttgcagcattgatgggttacttaatgtttaatacatttataaatgccattttaacgcaatggccacatacatttggcgctaatttagaaaaaggcgttgaaaatgtacctggtttaaaatcaattgcaggtattgccacattggatacgaatattctaggtggtattattatttcagctattattacgtggattcacaatagatactacagtaaacgattaccagaaatggttggtgtattccaaggtttaacatttgtggttacaatttcattttttgtgatgttaccattagcagcaattacttgtgttatttggccaactgttcagcacggtattggttcaatgcaacactttatcatcgcttcaggctatatcggtgtttggctgtaccacttcttagaacgtgtattaataccaacaggattacatcactttatttatgcaccaattgaagttggaccagtagtagtcaatcatggcttgaaagctgaatggttacaacatttaaatgagtttgctaagagtactaagccattaaaagagcaattcccttatggctttatgcttcaaggaaatgggaaagtatttggatgtttaggtattgctttagcaatgtatgctacgacacctaaagaaaatcgtaaaaaagtagcagcattacttattcctgcaacattaacagcagtcgttgtaggtattactgagccattagaatttacattcttattcatcgcaccatacttatttgttttacacgcagttttagcagcatcaatggatactttaatgtacgcatttggtgttgtaggtaacatgggtggtggcttgttagactttatttcaacaaactggttgccattaggtaaagaacattggggtacttatgttgcacaagttattatcggtctgatatttgtagcgatttacttcttcttattcagattcttaattttgaaatttgatattccattacctggacgtaagaaaacagaagaggaagttaaattattttctaagcaagattacaaaaataaaaaaggtgatagcgtagattctaaacgtgcttcaacaggtaatgaatacgaagacaaagctgcgtattacctcgacggtttaggcggcaaagaaaatatcaaagatgttactaactgtacaacaagattacgcttaactgtttatgatgaaagtaaagttgcggatacggaatatttcacgcatcaacaaatggcacacggattagtaaagagtggtaagagtatccaagttgtagtaggtatgacagtaccacaagttcgtgaagcatttgaacaaatggttgaggatcaatcgtccgaagataaataa

SEQ ID NO: 415168 - DNA, 636 bp, Staphylococcus aureus; identical to SEQ ID NO: 406319

SEQ ID NO: 415169 - DNA, 189 bp, Staphylococcus aureus
atgggttacattatattgttttttctagctggtccagtaattttaggcgttggaaatttggtgattggtcctatatttaacaaacagacaccatttcgcgtgcaagtaagatcttttgttgttggttcaatgatttacttaatactcgcaacaattggctattttttactattacaaggtaaactttaa

SEQ ID NO: 415170 - DNA, 1380 bp, Staphylococcus aureus
atggagaacaatgaactacaaaggggattgagtgcccgtcaaattcaaatgattgcacttggtggtacgattggcgtggggcttttcatgggtgccacaagtacaattaaatggacaggcccatcagttatccttgcatatttaattgcgggtatctttttatttttaatcatgagagcaatgggggaaatgatttatttaaaccctacaacaggatcatttgcaacatttgcaagtgattatatacatcctgcagcaggttatatgacagcatggagtaatatattccaatggattgtagttggtatgagtgaggtcatcgcagtaggagaatatatgaagttttggttcccggaattgccaacttggattcctggtgttattgctattttattattaatggcagcgaatttattctcggtaaaagcgtttggagaatttgaattttggtttgctttaattaaagttgtaacaattattttaatgattattgctggttttggtcttattttctttggttttggaaatggtggccatgcggtaggtatttctaatctatggacaaatggcggatttatgccaaatggtattgttggtttcttctttgcattatcaattgtaattggttcataccaaggtgtggaactgataggtattacggcaggtgaaactaaagatcctcagaaaaatatcgttaaagcagtgaatggtgttatctggagaattttaattttctatttaggcgctatttttgttattgtttcagtgtatccttggaatcaattaggagacattggaagtccgtttgttgcaacatttgctaaaatcggtattacatttgcagctggattaattaactttgttgtattaactgcagcaatgtcaggatgtaactcaggtattttcagtgcgagtcgtatgatttatacacttgctcataaaggtgaaatgccaaaaatatttactaaaatcatgagaaatggtgtaccattgtacactgttgtagcagtatctcttggtattttaattggtgctttattaaacgtaattttacctttatatatcgatggagcgaagagtattttcgtatacgtttatagtgcgtctattttaccaggtatgattccttggtttatgattttattcagtcacttacgttttagaaaattacatcctgaagaattggaaggtcacccattcaaaatgcctggtggcgcagtaactaactatttaacaatcttattcttaatattagtattggttggtatggtatttaatgttgaaactagaatatcagtgctaattggtgtcatcttcttaacgattgtaacgatttattactttattagatataataaaaataatgtaaaagcaaaatag

SEQ ID NO: 415171 - DNA, 873 bp, Staphylococcus aureus; identical to SEQ ID NO: 414990

SEQ ID NO: 415172 - DNA, 330 bp, Staphylococcus aureus; identical to SEQ ID NO: 406313

SEQ ID NO: 415173 - DNA, 693 bp, Staphylococcus aureus; identical to SEQ ID NO: 413333

SEQ ID NO: 415174 - DNA, 798 bp, Staphylococcus aureus; identical to SEQ ID NO: 406310

SEQ ID NO: 415175 - DNA, 948 bp, Staphylococcus aureus; identical to SEQ ID NO: 406309

SEQ ID NO: 415176 - DNA, 474 bp, Staphylococcus aureus; identical to SEQ ID NO: 406307

SEQ ID NO: 415177 - DNA, 234 bp, Staphylococcus aureus; identical to SEQ ID NO: 406306

SEQ ID NO: 415178 - DNA, 777 bp, Staphylococcus aureus
atgaagaagaatttcaagttacgcatttcaacgctactattgatagttattttagttgtttttgctgtattactcatcttgaatgaaactaaattgtttaaaaatgatgtgaattactcttttgatgaggctgtttcaatgcaacaagggaaaggtattgtacagacaaaagaagaggatggtaaatttgttgaagcaaataataatgaaattgctaaagcaatgactatttcacataaagacaatgatatgaagtatatggatatcacagaaaaagtgccaatgtcggaatctgaagttaaccaattgctaaaaggtaaggggattttagaaaatcgagggaaagtttttctagaagctcaagaaaaatatgaggttaatgtcatttatcttgttagccatgcattagtagaaacaggtaacggcaaatcagaattagcaaaaggcattaaagatgggaaaaaacgctattacaacttttttggtataggagcattcgatagtagtgctgttcgtagtgggaaaagttatgctgaaaaggaacaatggacatcaccagataaggcgattattggtggtgcaaagttcattcgtaatgaatattttgaaaacaatcaactgaatttatatcaaatgcgatggaatccagaaaatcctgcgcaacatcaatatgcgagtgacattcgatgggcagataaaattgccaaattaatggataaatcctataagcagtttggtataaagaaagatgatattagacaaacatattataaataa

SEQ ID NO: 415179 - DNA, 1125 bp, Staphylococcus aureus
atgaagatagcaattataggtgcaggcatcggtggattaacagctgctgcattattacaagaacaaggtcatactattaaagtctttgaaaaaaatgagtcagttaaagaaattggcgctgggattggtatcggagataatgtgcttaaaaaactaggtaatcatgacttagctaaaggtattaaaaatgctgggcaaatcttatctacaatgacagtgttagatgacaaagatcgcctgttaactactgttaaattaaaaagtaatacattgaatgtgacgttaccacgccaaacattaattgacattattaaatcttatgtaaaagatgatgtaatatttacaaatcatgaagttacgcatatagataatgagacagataaagttaccatacatttcgcggaacaagagagtgaagcatttgatttatgtattggtgctgatggaattcattctaaagtgagacaatctgtaaatgctgacagtaaagtattatatcaagggtatacatgctttagaggtttaattgatgatattgatttaaagcatccggattgtgcaaaagaatactggggaagaaaaggaagagtaggtattgttccgttattaaataatcaagcatattggttcattacaattaactcgaaggaaaacaatcataaatatagttcgtttggtaaacctcatttgcaagcatactttaatcactatccaaatgaagttagagagatcttggacaaacaaagtgaaacaggtatcttattgcataatatttatgatttgaaaccactcaaatcttttgtttatggtcgtactattttactaggagatgcagcacatgcgacaacgcctaatatggggcaaggtgctggacaagcaatggaagatgctatcgtattagtaaattgttttaacgcatacgactttgaaaaagcattacagcgttatgataaaatacgtgtcaaacatactgcaaaagtaattaagcgttctagaaaaatcggtaaaattgcccaatatcgtagtcgtttatttgttgcagttagaaatcgtattatgaaaatgatgccaaatgcattagcagctggacaaactaaattcttatataaatcgaaagagaaataa

SEQ ID NO: 415180 - DNA, 954 bp, Staphylococcus aureus
atggaaaaagtttatgttgctggtgcaataccagaagtagggttaaaacttttacaagaacattttgaagttgaaatgtatgaaggtaaaggattagtcgataaagacactttaattaaaggtgttaaaaacgcgactgccttaattagtttattatctacaaacgttgataaagatgttatcgatgctggtaaagacttaaaaatcattgccaactatggcgctggttttaataatattgatatcgagtatgcccgagaaaaaagtatagatgttacaaacacacctaaagcatcaacaaacgcgactgctgatttaacaattggattagtacttgcagtagctcgtcgtattgttgaaggggaccaattatcacgtacaactggatttgacggatgggcacctttatttttcagaggtagagaagtatctgggaaaacaatcggcattatcggtttaggtgaaattggtagtgcagtagctcgtcgtgcaagagcatttgacatggatgtgctatacactggacctaatcgcaaagaagaaaaagaacgagaaatcggtgcaaaatatgtagatttagatacactattaaagaatgcagattttatcactatcaacgctgcttataatcctaaaatgcatcatttaattgatacagaacaatttaaaatgatgaaatctacggtgtatttaatcaatgcctctcgtggtccaatcgtgcacgaacaagcactagtgcaagcattgaaagataatgaaattgaaggtgctgcacttgatgtatatgaatttgaaccagatattaccgatgacttaaaatcacttaataatgtagtattaacaccgcatattggtaatgctacatttgaagcacgtgacatgatgtctaaaattgttgctaatgctgcaattagtgccgttcaaggtgagaaaccacaatttgtcgttaactaa

SEQ ID NO: 415181 - DNA, 501 bp, Staphylococcus aureus; identical to SEQ ID NO: 413331

SEQ ID NO: 415182 - DNA, 423 bp, Staphylococcus aureus
atgacaactgaaatgaacgacgtaacaaatcatcaaccgaatcgcaaatccaatgatgagaacattatggcgatgcttatctatttattaagtttattcacatctattattggtccactgataatatggttattgaaaaaagatgaatcgaaactagttgatcgtgctggaaaaaattatcttaactatacgatttcttatattatttggtctatcgttttagtcgttatcactttaataggcgttttcctaattgctaccgatattagtttcattatcattataggtttcatcattacatttatcggtattttatccatattcgctttctcaatattatcttttgtattcacaattattgcgtgtgtcaaatattataatggccaagaatatgtaatacctttaacaattcgatttatttaa

SEQ ID NO: 415183 - DNA, 1083 bp, Staphylococcus aureus
atgaaaatagcaattgtaggatcaggaaatggcgcagttacggcagcagtagatatggtgagcaaaggccacgatgttaaattatattgtcgtaatcaatctataagtaagtttcaaaacgcaatcgaaaagggcggatttgattttaataatgaaggtgatgaacgtttcgtaaaattcactgatattagtgatgatatggaatatgttttaaaagatgctgaaattgttcaagtgattattccatcttcatacatagagtattatgctgatgtaatggcagagcatgtaactgataatcagttgatattcttcaacatggctgcagcaatggggtcaattcgttttatgaatgttttagaagatagacatattgaaacaaaaccacaactagcggaagctaatacgttgacgtatggtacgcgtgtcgattttgaaaatgcagcagttgatttatctctaaatgtacgtcgtatcttcttttcaacatatgatagaagctgtctaaatgattgttatgacaaagtttcaagtatttatgatcatttagtaaaagaggaaagcttaattaaaacaaatcttgaaaatggtaatcctgaagtgcatccaggaccaacattattgaatgtcggtcgcattgattatgctggcgagttcgctttatataaagaaggaattactaaacatacagttagattacttcatgcaatcgaattagaacgtttaaatttaggccgtagattaggttttgaattatcaacagctaaagaatcacgtattgaacgtggttatttagaacgtgataaagaagatgaaccattaaatcgtttgtttaatacaagcccagtattttcacaaattccaggaccaaatcatgtagaaagcagatatttaactgaagatattgcatatggtttagtactatggtcaagcttaggtcgtgttattgatgtaccgacaccaaatatagatgcagtaattgtaattgcatcaaccattttagagagagacttctttgaggaaggcttaacagttgaagaaattggtttagataagcttgatttagaaaaatatttaaaataa

SEQ ID NO: 415184 - DNA, 1398 bp, Staphylococcus aureus
atgaaaagaaaaccaacctttttagaatcaatttcgacaatgattgtaatggttattgttgttgtaacaggctttgtgttttttgatattccaattcaagtattattaattattgcctcagcatatgccacatggattgcaaaacgtgtaggcttaacatggcaagatttagaaaaaggcattgcagaacgtttaaatactgcaatgcctgcaattttaattatactagcggtaggaattatagtaggcagttggatgttttctggcacagtgccagccttgatttattatggcttagatttattgaatccaagctattttttaatatcagccttttttataagtgctgttacatctgtagcaactggtacagcatggggctctgcatcaactgcagggattgcacttatttctattggtaatcaattggggattcctccagggatggcagcgggtgctattatagcaggggctgtgtttggcgataaaatgtcaccattatcagatacaactaatttagcggcacttgttactaaagttaatatatttaaacatatacattcgatgatgtggacgacgatacctgcatcaatcataggtttattagtatggtttattgctggatttcaatttaaagggcattcaaatgataaacagattcaaactttgttatcagagcttgcacagatttatcaaattaacatatgggtctgggttcccttaattgtgatcattgtttgtttgctatttaaaatggctacagtgccagctatggtaatatcaagcttttctgccattatagtggggacttttaatcatcatttcaaaatgacagatggtttcaaagcaacatttagtggttttaacgactcaatgatacatcagtctcatatttcatccagtgtgaaaagcttgttagaacagggtggtatgatgagtatgacccaaatattagtaacgatattttgcggatatgcatttgcaggtattgtagaaaaagcaggatgtttagaagtcttattaactactatttctaaaggcatccattctgtaggaagtttaatatgtattactgttatttgttgtattgcgcttgtattcgctgcaggtgttgcttcgattgtaattattatggtcggtgtgttaatgaaagatttgttcgaaaaataccaagtctctcgttccgttttatcaagaacacttgaagactcaagtacgatggtcttacctttaataccatggggaacatcaggtatttactatacgaatcaacttcatgtctctgttggagaatttttcatgtggacagtaccatgttatttatgcgcaattatagcaattatctatggttttacagggataggtattaaaaagtcatcgaattcacgtttaacttaa

SEQ ID NO: 415185 - DNA, 804 bp, Staphylococcus aureus
atgaagaaaatcgctacagctactatcgcaactgcaggattcgctacaatcgcaattgcatcaggaaatcaagctcatgcttctgagcaagataactacggttataatccaaacgacccaacatcatatagctatacttacactattgatgcacaaggtaactaccattacacatggaaaggtaactggcatccaagtcaattaaaccaagataatggctactacagctattactactacaatggctacaataactacaacaattacaacaatggttatagctacaataattacagccgttacaacaactactcaaataataatcaatcatataactacaataactataatagttacaacacaaacagctaccgtactggtggtttaggtgcaagctacagcacttcaagcaacaatgttcaagtaactacaactatggctccatcatcaaatggccgttcaatctcaagtggttatacttcaggacgtaacttatacacttctggtcaatgtacatactacgtatttgatcgtgtaggtggtaaaatcggttcaacttggggcaatgcaagtaactgggctaacgcagctgcaagagctggttacacagtgaacaatacaccaaaagctggtgcaattatgcaaacaactcaaggtgcatacggtcacgttgcatacgttgaaagtgttaacagcaatggttcagtaagagtttcagaaatgaactatggttatggcccaggtgttgtaacttcacgtacaatctcagctagccaagctgctggttataacttcattcactaa

SEQ ID NO: 415186 - DNA, 1956 bp, Staphylococcus aureus
atgacagataattattcactacatatttataaaagtatgaaaatgagtagtgtgaaggaagcgaacttaaaaattatatattggctacaaggtacaggtgtagtttcaatcaatctacaacaatatgatgtaaaaagaaatgatgtcaccgttattatgttgaatgatttgtatcaaattgatggtcatgatgatagtgtatgttgtgttgttgaagtaagtgcaaagacatttttgaagtttatgaatgcaaactatatgatgcgtggcaagatattaacaaatgaggttgctagcacttttagaatcttgattaagtatttaatctacagcaaaattaaacaacagtcttataatgctaatgataagattattaattacatgtgtgttgaattaatgtcattaaatacatacgatggtagtcgtcatttagtagccgaagaagtgcacgattatttaacaaacaaccaccataaaaagataaataggaaagatgtcattaatcaagttagtattacaaacaaagctttaagtgacatgtttaaagcgacaccttatagtaattttattcaatatttaaatcatattagactggagcattgcttaattgatattttaacttctaagaagcctattgaagaaatcgcaagtagtcatggttttaatcattattctcgttttatacacctctttaaagaaacgtatggtaacactcctaaattaattagaaaaagatatagtccaacatctcattcaattaaccattcccaattagttgaaattgataaaaatataattgaattatttgataatactaatcaaagttcttcaagtatgcgcgagattgatataccttttgaacctacaaaaaggagtcaaatgtatcaacctaaaaacatttatattaaaggaagtaatttttattggatggattattatactattaaacaaatcattcaaagattaggtgttaatcttgaaaacttgcatataattgttacaatcgacacaagcaatgagctatcgattgaacaaatcactttattacttcaaaagatagtgaattacaatgtaaatgtagtatttcgtattaaacatgaatataaggaattgttaacgagtactgaaagaggcaagatagaaaagctagtagccacaatttttaatatgacatttgagagtaatagatgtaagattgcatttttaattaacgacttaaatactactgcaattcaaaaactgaaacgcttaatagataattatataggagtatttgaattaatatatcatctggaaccaaaagagttgaatacgcactatgataaagaaattgatcatctaatagactattttatcttaccgctaagacaaatagaacaggtgtctattgcatgttctaaaattatatgtgatgtagatttgattaatgagaataatgacttaaaagaaaaaatcacaatgtctgattttaataaggttactgaacttttgacaaattatacaaaatttcgaggacttattatgcacatgtcaattataagtgaagctagcaaagaaataaatttgactagattatcaatattcatttttatcataaatatacttaatcaattacgagggattgttatttatcaaaatgacacgatgattgtaacgaagttcaaacatgaagtacaatgtgtcatttgtttgccagccgcattgttaaatgagaattcagacgctatacgtttatcgtgtaagggtcttcaacaatttagccatgctaaaactaaacaaattgttttaagtatagataaagataatcatacttccgaaaatggtgtacttgtgaatgatattatgcaacaacacagttattggaaagctaattttatagaaagaaatatttatgatcattcattaatggtctcaagcaatagtattgttcatttgaaatatcatcttgagatatag

SEQ ID NO: 415187 - DNA, 744 bp, Staphylococcus aureus
atgtctaaatttaaagttaagcgtttaactgcacacatactaatgttgaaagtcattaatgatatgttgaaatattcatttcatctcactttgactcaagtgaaactattaaatctattagttaaatatgataattctgattccaatagcgcttcaatagataggttattaaaaatgaaagaaatccaatctaagatggcacttcttcaaatgttaagttatttaaacaatcatcaatggctattgaaaggaagagatcaaagggatcaacgtaaattgactatttcgattaataaaatgcatatagataaaatagaatatatgaataatgagcttagtgactatattgaacgttattttggtcaatatacatttgattttagttgtgactatgtatcgtatttattgtcgtcacaagaattatttcgaaatctaaagtgttatttaaatatgtgtcaattaacattagaagagttatacgttttaggaatattaaatctgcataaaggtcaattgacggttaaagaattacagggtgaattccatcacccgatatttgcggttagcccgattttaaagtgtttaattttgaagggattagttaaaaaagagagatgtgaattagatgaaagacgtgttattgtaacaatcaagcgagaaaagttttctaaagtcactatgcttattcaagcatgttataattatcttgaaaagggaatacaagttaagcttaataataaatag

SEQ ID NO: 415188 - DNA, 348 bp, Staphylococcus aureus; identical to SEQ ID NO: 406294

SEQ ID NO: 415189 - DNA, 837 bp, Staphylococcus aureus
atggatgaacaacaatggactgggcaacttgatttaacagtgtttttcgatggcaatcgatcagtatcaagagatattttctttgaaaaagcacttaaagtgatacgtccagtttatctaaatcaatctaccattcctacattttatatagtaaatgtaggtggtggctatttagatggagatcgttaccgtatgaatgtgaatgtcgaagataacgctaaagtgacattgacatctcaaggtgcaacaaaaatatacaagacaccttccaatcatgttgagcagtatcaaacttttaatttaaaagataacgcatatttagaatatgtcgctgatccaatcatcgcatatgaaaatgctaaattttatcaacacaatacgttcaatctcaataattctagttcattattttatactgatattttaactcctggttattcaaaaactggcgaagccttcaagtatcaatatatgcatttaataaatgaaatttatattgaagatgagttagtcacatatgataatttattattgaatcctaataaacaatcgatcaatgaaataggttatatggaacattactctcattatggctctgcttacttcatacatgaagatgttaaccaaaaactaatcgattcagtttatgaaaccattagttcttatagcaatacattcgattgtcgtgttgctatttctcaattgcctacacatggctttgcagttagaatttttgcttatcgcacacaaattatagagaaaatacttggaaccatccaaagctatatcgcagaaaatatttatgatcgtaaacttgattttctaagaaaatattaa

SEQ ID NO: 415190 - DNA, 615 bp, Staphylococcus aureus
gtggcaaatccgattaaaattggtattggtggtcctgtaggtgcaggtaaaacacaattaattgaaaaagttgtaaaacgtctttcaaaagaaatgagtatcggcgttattacaaatgatatatatacaaaagaagacgaaaagatattagtaaattcaggagttctacctgaaagtcgtatcattggtgttgaaactggtggatgtcctcatactgcgattcgtgaagatgcatctatgaactttgcagcaatagacgaattattagaacgtcatgacgatatagaactaattttcatagaatctggtggcgataacttagcagcaacatttagcccagaacttgttgacttttcaatatatattatcgatgttgctcaaggtgaaaagattccacgtaaaggtggtcaaggtatgattaagtcagatttctttgtaattaacaaaactgatttagctccctatgtaggtgcatcattagaacaaatggctgaagatactaaagtatttcgtggtaaacgtccatttacttttactaacttaaaaaccgacgaaggtttggatgaagttatcgattggattgaacgcgacactttactcaaaggattatcataa

SEQ ID NO: 415191 - DNA, 690 bp, Staphylococcus aureus
atgattgatcatacacacttaagattatttcagttctgtgattcacagtttccaacaggtgctttcagtcattcatttggtcttgaaacatatattcaacgaaatataattcatgacgatcatacttttattgcttggttaaaaatgtttttacaagagcaacttacctattctgatggtttagccatgcgtttagtttatgatgcattggaaaatgatgatacacaaaaagtattacacatagataaactgatgtttgttcaaaacttacctaaagaaacacgtgttggtgcaaaacaaatggggactcgcatggttaaattggctttagaactttataatagcccatggattgcttggtatcatcaacaaatgcaagataagaaagcaaagttaaatccagctatttgttttactatgctaggccatcatttaggtgtagatattgaaacgattattgattactatttatatcaaaatgtttcaagtttaactcaaaatgctgttcgtgctattccacttggacaaactgctggtcaaaagatagttactcacatgattccttatatagaagaaacaagaaagcagattttcgaattaaaagaagcagattttggcatgacagcgcctggtttagaactaaatcaaatggcgcatgagaacgtcaatgttagaattttcatatcatag

SEQ ID NO: 415192 - DNA, 453 bp, Staphylococcus aureus; identical to SEQ ID NO: 406290

SEQ ID NO: 415193 - DNA, 1716 bp, Staphylococcus aureus
atgagctttaaaatgacgcaaaatcaatatacgagcttatacggtccaactgttggagattctattcgtttaggtgatacgaatctatttgctcaaatagaaaaagactatgcggtttatggtgaagaagctacttttggtggtggtaaatctattagagacggtatggcgcaaaatcctcgtgtaacacgtgatgacgtgaacgttgcagaccttgtcatttctaatgccgttattatcgattacgataaagtggttaaagctgatataggcattaaaaatggttatattttcgccataggtaatgccggcaacccagatataatggataatgtcgacattattataggttcaacaacagatatcattgccgctgaaggtaaaatcgtcactgctggtggtattgatactcatgttcattttattaatcctgaacaagcagaggtcgcattagaaagtggtattacgactcatattggtggtggtactggtgcttcagaaggttctaaagcaacaactgtaactccaggtccatggcatattcatagaatgttagaagctgccgaaggtttaccgattaatgtcggttttacaggtaaaggacaagcaacaaatccaactgcactcattgaacaaatcaatgccggagcaattggattaaaagtacatgaagactggggtgcaacaccatctgctttgagtcatgcattagatgttgctgatgaatttgatgttcaaattgcattacatgcagatactttaaatgaagcaggatttatggaagacacaatggctgctgttaaagaccgtgtacttcatatgtaccatactgaaggtgctggtggcggtcatgcgcctgatttaattaaatccgctgcattttcaaatattttaccttcatctacaaatccaactttgccttatacacataatactgtagatgaacatttagatatggtaatgattactcaccatttaaatgcggctattcctgaagatatcgcattcgcagattcacgtattcgtaaagaaacgattgcagcagaagatgttctgcaagatatgggtgtattcagtatgattagttccgattcacaagcaatgggccgtgtaggtgaagtaattacacgaacatggcaagtagcacatcgcatgaaagaacaacgtggtcctttagatggtgattttgaacataatgataataatcgcatcaaacgttatatcgctaaatatacaattaacccagcaattacacatggtatttctgaatatgtaggatctatcgagccgggcaaactagctgacattgtcttatgggacccaattttctttggggttaaacctgaattagttgtaaagggcggattaattaactctgccgtaaatggcgatgcaaatggttctatacctacatctgaaccgatgaagtaccgtaaaatgtatggtcaatacggcggaaaccttacaagtacgtcaatgacattcgtgtctaaaactgcttatgaaaatggtatcaatcgtgcattaaatttaaaacgcatggtgcgtccagttaaaaatattagacaattatctaaagcagatatgaaaaataacagtgcaacacctaaattagacgttgatccacaaacatatgaagtatatgtagatggagaaaacattacaagtaatgcagcaactgagttaccattaactcaaagatacttcttattctag

SEQ ID NO: 415194 - DNA, 411 bp, Staphylococcus aureus
atgataccaggagaaattattacaaaaagtacagaggttgaaattaataaccatcatcctgaaacagttatcgaagttgaaaatacaggagatcgaccaattcaagtgggctcacattttcatttttatgaagcaaatgcagcattagatttcgaacgtgaaatggcatatggaaaacatttagatattccagctggagcagctgttcgatttgaacctggggataaaaaagaagttcaattagttgaatatgctggcaaacgtaaaatttttggttttcgtggtatggtcaatggtcctatcgatgagtcacgtgtctatcgcccaactgatgaaaatgatgcatatgcaggtgtattcggagataacggtgctgaaaacgtgaataaaaaaggaggaaaaagatcatga

SEQ ID NO: 415195 - DNA, 303 bp, Staphylococcus aureus; identical to SEQ ID NO: 406287

SEQ ID NO: 415196 - DNA, 1155 bp, Staphylococcus aureus; identical to SEQ ID NO: 413327

SEQ ID NO: 415197 - DNA, 909 bp, Staphylococcus aureus
atgaaaaaactattattaccattaataattatgttattagtgttagctgcgtgtgggaaccaaggtgaaaaaaataacaaagctgaaactaaatcttataaaatggacgatggcaaaacggtagatattccgaaagaccctaaacgcattgcagtagttgcgccaacatatgctggtggacttaaaaaattaggtgcaaacattgtagctgtaaatcaacaagtcgatcaaagcaaagtattaaaagataaatttaaaggtgttacaaaaattggtgatggcgatgtagaaaaagttgctaaagaaaagccagatttaattattgtatactctactgacaaagatattaaaaaatatcaaaaagtagcaccaacagtagttgttgactataataagcataaatatttagaacaacaagaaatgttagggaaaattgttggtaaagaagataaagtaaaagcctggaagaaagattgggaagaaacaactgctaaagacggtaaagaaattaaaaaagcaattggacaagatgcaacagtgtcattgtttgatgaatttgataaaaaattatacacttacggcgataactggggtcgtggtggagaagtattatatcaagcatttggtttgaaaatgcaaccagaacaacaaaagttaactgcaaaagcaggttgggctgaagtgaaacaagaagaaattgaaaaatatgctggtgattacattgtgagtacaagtgaaggtaaacctacaccaggatatgaatcaacaaacatgtggaagaatttgaaagctactaaagaaggacatattgttaaagttgatgctggtacatactggtacaacgatccttatacattagatttcatgcgtaaagatttaaaagaaaaattaattaaagctgcaaaataa

SEQ ID NO: 415198 - DNA, 942 bp, Staphylococcus aureus; identical to SEQ ID NO: 413326

SEQ ID NO: 415199 - DNA, 555 bp, Staphylococcus aureus; identical to SEQ ID NO: 413325

SEQ ID NO: 415200 - DNA, 798 bp, Staphylococcus aureus
atgaacaaagatgtatctttaggtcaaccaattgttagatatgaagatggaaaattattcaatacaacagatcaatatgtgacagaatttccacttacaattatggtgaatggtgaagaatttgcgactgttatatgcagtccaacaaaccttgaggagttagtcattggatttctggcttcggaaggtgccattttaaagcgagatgaattaaaatctgtgctgattgatgatagtaaaggttttgcccatgttgaacttaataaagatttaggcgatcgctttcaatattccacaaaacgaatgattgcatcttgttgtggaaagagtcgtgagttttattttcaaaatgatgctgctatcgctaaaacttctatgtctaaaatcactttaactccaatacaaattattaacatgatgactcgattacaaagtgcaagtcatatttaccaagaaacaggtggcttacataatgctgctataagcgatggtttgacattttttgtacatcgacaagacattggtagacataacgctctagataaattatatggattttgtatccagcgacatattactgtccgagataaagtattaatttttagtggacgtatttcatcagaaattttaattaaagccgcgaaaatcggtgttggcgtcattttatctaaatcagctccgacaacgcttgctgtaaccttagctaatgacctaaatattacggcagtaggttttattcgaaatggtggctttaatatatatagtcatccagaacgtatcatcgactctgaacaataa

SEQ ID NO: 415201 - DNA, 783 bp, Staphylococcus aureus
atgaaaatgaaacgttttatagctattgtaatggcattatttttagtattagctggttgctctaattctaacgataataatgaaagtaaaaaagatgacgcagacaatggtaagaaacaagagattcaagttgcagcggcagcaagtttaacagatgtaaccaagaaattagcttcagaatttaaaaaagagcataaaaatgctgatattaaatttaactatggtggatcaggggcattaagaaaacaaattgaatcaggcgcacctgttgacgtatttatgtctgcaaatactaaagatgtagatgcattaaaagacaagaataaagcgcatgatacatataaatatgcgaaaaatagtctagtattaattggtgataaagattcaaattacacttcagtaaaagacttaaaagacaatgataaattagcattaggtgaagtgaaaactgtaccagcaggaaaatatgcgaaacagtatttagataacaataacttatttaaagaagtcgaaagtaaaatcgtttatgctaaagatgtaaaacaagtattaaattatgttgaaaagggtaatgcgaaacaaggttttgtgtataaaactgacttatataaacaaaacaaaaaaattgatactgtaaaagtaattaaagaagtagaacttaagaaaccaatcacatacgaagctggtgctacatcagatagtaaattagcaaaagagtggatggaattcttaaaatcagataaagctaaagaaatattaaaagaataccactttgcagcataa

SEQ ID NO: 415202 - DNA, 672 bp, Staphylococcus aureus; identical to SEQ ID NO: 413323

SEQ ID NO: 415203 - DNA, 606 bp, Staphylococcus aureus
atgcttaaaatcaatgtgaaatatcaattaaagaacactttaattcgcatcaatatagatgatactgaaccaaaaatttatgcagttcgtggtccatctggcattggtaaaactactgttttaaatatgattgccggattacgtaaagcagatgaagctattatcgaagtgaatgggcaattgcttactgatacgacaaaaaacgtgaatgttaaaattcaacaacgacgtattggatatctgtttcaagactaccaattgtttcctaatatgacggtttataaaaatattacttttatggctgaaccatctaaacacatcgatcaattaattcaaactttaaacattaatcatttgatgaaacaatatcctatgacattgtcaggtggagaggcacaacgtgtagcacttgcacgtgcacttagcacgaaaccagatttaattttattagatgaacctttttctagtttggatgatactacaaaagatgagagtattacattagttaaacgtattttcaacgaatggcaaataccaatcatatttgtgacacattcaaactatgaagcagaacaaatggctcatgaaattattacaattgggtaa

SEQ ID NO: 415204 - DNA, 1005 bp, Staphylococcus aureus; identical to SEQ ID NO: 413322

SEQ ID NO: 415205 - DNA, 507 bp, Staphylococcus aureus
atgggcgaacatcaaaacgttaaattgaatcgtacagttaaagcagccgtactaacggtatcagatactagagactttgttacagataaaggtggtcaatgcgtgcgccaactattacaagcagatgacgttgaagtgagtgacgcacattatacaattgtgaaagatgaaaaagtagccatcacgacgcaggtgaagaagtggttagaagaagatattgatgtcatcattacgactggtggaacaggtattgcacaacgtgatgtgacgattgaagcagtaaaaccacttttaactaaagagatagaaggctttggggaattgtttagatatttgagttatgttgaagatgttggcacgcgtgcattattgtctcgtgctgtagcaggtacagttaataataaattgatattttcgattccaggatcaacaggcgcagttaaattagcattagaaaagctcattaaaccagaattaaatcatctgattcatgagcttacaaaataa

SEQ ID NO: 415206 - DNA, 495 bp, Staphylococcus aureus
atgactgagtttactcatattaatcaacaaggccacgccaaaatggtcgatgtatcagacaaacaaattacaaaaagaactgctgtcgctcattcaagcattactgtgaatgaaactatttttaagcagatttctaataacaccaataccaaaggcaatgtattgaacactgctcaaatcgctggtattatggctgccaaaaatacatcaacaattattccgatgtgccatccattaccattgactggcatagatgttcacttcagctgggatgaaacaaatgcacccctttatactttaaacattcaaacaactgtctctacaactggcaaaaccggtgttgaaatggaagctttaaccgctgcatcagcaacggctttaaccatttacgacatgacgaaagcagttgataaaggtatgattattggcgaaacctaccttgaaagcaagtctggcggtaaatctggagattttcaacgccaatcaggtcaataa

SEQ ID NO: 415207 - DNA, 1260 bp, Staphylococcus aureus
atggtagtagaaaaaagaaacccaatcccagttaaagaagcaattcaacgtatcgttaatcagcagagttcaatgccggcaattacggtagcacttgaaaaaagtctaaatcatatcttagcagaagatattgtagctacttatgatataccaaggtttgataaatcaccttatgatggttttgcaattcgcagtgttgattcacaaggggcaagtggtcagaatcgcattgagtttaaagtgattgatcatattggtgcaggttcagtttctgataaattagttggggatcacgaagcggtgcgtattatgactggagcacaaataccaaatggcgcagatgctgttgttatgtttgaacaaacgattgaactagaagatacatttacaattcgtaaaccattttcaaaaaatgaaaatatatctttaaaaggtgaagaaacaaagacaggcgatgttgttctaaaaaaaggacaagtaattaacccaggggctatcgcggtccttgcaacatatggctatgcagaggttaaagttattaagcaaccgagtgtcgctgttattgcaacaggaagcgaattattagatgttaatgatgtattagaagatggaaaaattcgtaactctaatggcccaatgattcgtgccttagcagaaaaattaggtcttgaagttggtatttacaaaacacaaaaagatgatttagatagtggcatccaagtcgttaaagaagctatggaaaaacacgatatcgttattacaacgggtggagtttctgttggagactttgactatttacctgagatttataaggctgtaaaggcggaagtgttatttaataaagtagcaatgcgtcctggtagcgtaacaacggttgcatttgcagatggaaagtatttgtttggattatctggaaatccatcagcttgttttacaggatttgaactatttgtgaaaccagctgttaaacatatgtgtggcgcactagaagtcttcccgcaaataattaaagcaacattaatggaagattttaccaaggcaaacccattcacacgatttatacgtgctaaagcaacgttaacaagtgctggagctactgtagtaccttcaggattcaataaatcaggtgcggttgtagcgattgcacatgctaactgtatggtcatgttaccaggagggtcacgtggttttaaagcggggcatacagtagatattatattgactgaatctgacgctgctgaagaggaacttcttttatga

SEQ ID NO: 415208 - DNA, 486 bp, Staphylococcus aureus; identical to SEQ ID NO: 413321

SEQ ID NO: 415209 - DNA, 447 bp, Staphylococcus aureus
atgaaacaatttgaaatcgtgatagaaccgatacaaacagaacaatatcgtgaattcactataaatgaatatcaaggtgcagtagttgtttttaccggtcatgttcgcgaatggactaaaggcgtcaaaacggaatatttagaatatgaagcgtatattccaatggctgaaaagaaattggcacaaattggagatgaaataaatgaaaaatggcctggaacgataacgagtattgttcatagaatagggccattacaaatttcagatatcgctgtattaattgcagtttcttcaccgcatcgtaaagatgcctatcgagcaaatgaatatgcaattgagcgtataaaagaaattgttccgatttggaaaaaagaaatttgggaagatggttcaaaatggcaagggcatcaaaaagggaattatgaagaagcgaagagggaggaataa

SEQ ID NO: 415210 - DNA, 234 bp, Staphylococcus aureus
atgaaggtactttacttcgcagaaattaaagatatattacaaaaagcacaggaagatattgtgcttgaacaagcattgactgtacaacaatttgaagatttattgtttgaacgttatccgcaaatcaataataaaaagtttcaagttgctgtaaatgaggaatttgtacaaaaatcagatttcattcaacctaatgatactgttgcattaattccaccggttagtggaggttaa

SEQ ID NO: 415211 - DNA, 600 bp, Staphylococcus aureus
atgaaagcaataattcttgcaggtggtcattcagtgcgatttggtaagcccaaagcttttgcggaagtgaacggtgagaccttttatagtagagtaattaagacattagaatcaacaaatatgttcaatgaaattattattagtacaaatgcgcaattggcaacgcaatttaaatatccaaatgttgttatagatgatgagaatcataatgataaaggtccattagcaggaatttatacaatcatgaagcaacatcctgaagaagaattgttttttgtcgtttctgttgatacaccaatgattactggtaaagctgtaagcacgttgtatcagtttttagtttctcatcttattgaaaatcatttagatgtcgcagcttttaaagaagatggacgttttattccaacaattgcattttatagtccgaatgcattaggcgctataactaaagcactacattctgataattacagttttaaaaatatatatcatgaattatcaacggattatttggatgtcagggatgtagatgcgccctcatattggtacaaaaatataaattatcagcatgatttggacgctttaattcaaaaattgtaa

SEQ ID NO: 415212 - DNA, 1212 bp, Staphylococcus aureus
atgactaatcaaggctcattaaataaatcacctattttcaccaaaagttttacaatcaacttttttgtcaactttatcgtatacctatgcatgtatttgttacttgtagttattgctggctatagtaagcaagctttcgacgcttccgattcattagccggattagttgtaggactatttattgtcgggtctttaattggtcgatttgctacaggtaaatttgtaaatcaaatcggacctaaacgattattatttattggtttaattgctttaattatcacgcaattactttattttattgatggatctttagcttttttaatctttgtacgtctcataaacggtatcgcaactgcagttgtgacaactgcaacaggtactattgcggcatacgttacccctgttaatagaaaaagtgaaggcatcagtttattttccttaagtttagtattaggtacagcgattggcccatttctaggcatgttacttattacaaaatacgcaattgatttactgtttattatttgtgtcatattaggcatactcggactcattatctcattatttataaaagttgatttcgaagtaacaaataataaaactgaaactgatgtcattaataaaccaagatttagtattcatcaatttattgcaaaagaggccattcctgttgctgtaattatgcttttaattggcgttacctatgcgtcaatcctaacttatttacaagcatttgctttagagcgacacctagtcactgcagcaagctatttctttatttgctatgctatagcatcgttaattactagacctattgctggtagattgatggatgataaaaatgaaaatattattgtctatccagcatttatcatgcttttcctttcatttgtgtgcttaatttcaagctatcaaagctggttaatattacttgctggtgcttgcctaggtttagggtatggaaatttatcatctgcaatgcaatctattgcgataaaagtctcacccccgattaaatatggtatcgcgacatctactttttacgttggtctagatgcaggtgtcggcttcggtccatcattccttgggttatttactcatatgttttcatatagtgaaatcttcggctttatggccgctttagcaatcattactatgcttgtttacttcttaattcatggacgtcatgtaactagaaatgccatgaactaa

SEQ ID NO: 415213 - DNA, 441 bp, Staphylococcus aureus; identical to SEQ ID NO: 409580

SEQ ID NO: 415214 - DNA, 1266 bp, Staphylococcus aureus
atggaaaagatgcatatcactaatcaggaacatgacgcatttgttaaatctcacccaaatggagatttattacaattaacgaaatgggcagaaacaaagaaattaactggatggtacgcgcgaagaatcgctgtaggtcgtgacggtgaagttcagggtgttgcgcaattactttttaaaaaagtacctaaattaccgtatacgctatgttatatttcacgtggttttgttgttgattatagtaataaagaagcgttaaatgcattgttagacagtgcaaaagaaattgctaaagctgagaaagcgtatgcaattaaaatcgatcctgatgttgaagttgataaaggtacagatgctttgcaaaatttgaaagcgcttggttttaaacataaaggatttaaagaaggtttatcaaaagactacatccaaccacgtatgactatgattacaccaattgataaaaatgatgatgagttattaaatagttttgaacgccgaaatcgttcaaaagtgcgcttggctttaaagcgaggtacgacagtagaacgatctgatagagaaggtttaaaaacatttgctgaattaatgaaaatcactggggaacgcgatggcttcttaacgcgtgatattagttactttgaaaatatttatgatgcgttgcatgaagatggagatgctgaactatttttagtaaagttggacccaaaagaaaatatagcgaaagtaaatcaagaattgaatgaacttcatgccgaaatagctaaatggcagcagaagatggaaacatctgaaaagcaagctaaaaaagcgcaaaatatgattaatgatgcgcaaaataaaattgctaaaaatgaagatttaaaacgagacctagaagctttagaaaaggaacatcctgaaggtatttatctttctggtgcactattaatgtttgctggctcaaaatcatattacttatatggtgcgtcttctaatgaatttagagattttttaccaaatcaccatatgcagtatacgatgatgaagtatgcacgtgaacatggtgcaacaacttacgatttcggtggtacagataatgatccagataaagactctgaacattatggcttatgggcatttaaaaaagtgtggggaacatacttaagtgaaaagattggtgaatttgattatatattgaatcagccattgtaccaattaattgagcaagttaaaccgcgtttaacaaaagctaaaattaaaatatctcgtaaattaaaacgaaaatag

SEQ ID NO: 415215 - DNA, 3168 bp, Staphylococcus aureus
gtgataaaaaagctattacaattttctttggggaataagtttgctatctttttaatggttgttttagttgtcttgggcggtgtatacgcgagtgctaaattgaaattagaattactaccaaatgtacaaaatccagttatttcagttacaacaacaatgccgggtgcaacgccacaaagtacccaagatgaaataagtagtaaaattgacaatcaagtaagatcgttggcatatgtgaaaaatgttaaaacgcaatccatacaaaatgcttcaattgtaacagttgaatatgaaaataatacagatatggataaagcagaagaacagcttaaaaaagaaatcgataaaattaaatttaaagatgaagttggtcaaccagaattaagacgtaattcgatggacgcttttccggttttagcatattcattttcaaataaagagaatgacttgaaaaaagtaacgaaagtactgaatgaacaattaataccaaaattacaaacggtagatggtgtgcaaaatgcgcaattaaatgggcagacgaaccgtgaaatcacccttaaatttaagcaaaatgaacttgaaaaatatgggttgactgctgatgatgtagaaaactatctaaaaacagcaacaagaacaacaccacttggattgttccaatttggtgataaagataaatcaattgttgttgatggtcaatatcaatctgttgatgcttttaaaaacataaatattccattaacgttggcaggagggcaagggcaatctcaatcccaaagtgataataaacaaaattcagccatgtcagacgttaatcaggcatcaccgcagcaaaattcaaaagcgtcagcaccaaataatataagtggtatgccgacagcgaaactaggagatttagctgatattacagttggtgatgtgcgtacttctatttctaaaacgaatggaaaggatgcggttaatctacaaataactaaagctcaagatgccaatacagttcaagtagccaaagatgtacaacgtaaaattgatacattcgttgatgaaaataaagattttaatgtcacaaaaacaatggatactgcaaagcctgttgagaaatcactttatacgatggttgaaaaagcatcattaggtacaatcgtggcaattatagttattttgctgtttttaagaaacattcgtacgacggcaatttctattatatccattccgttatcacttcttatggcgcttattgctctgaaattgagtgatgtttcattgaatatactaacgttaggtgcattaacagtagcgattggacgtgtgatagacgattcgattgtagttgttgaaaatatttatcgacgcttaacagattcagaagaacaactaaaaggtgaaaatttaattatcagtgcgacaactgaagtatttaaaccaataatgtcatcgacactagttactattatcgtcttcttaccacttgtgtttgtatcaggttcagtaggcgaaatgtttagaccttttgcattggctattgcatttagtttattagcatcgttattagtgtcaattacactcgttccagctttggcagcaacactatttaaaaaaggcgttaaacgtcgtaataaacaacatcaagaaggattaggtgttgttagtacaacttataaaaaagtattgcattggtcactaaatcataagtggattgtaattatattaagtacattaattttggttgcaactattgtatttggaggaccgagactaggcactagctttatttcagcaggtgacgataaatttttagctattacttatacaccgaagcctggtgaaacggagcaagcagtgttgaatcatgcgaaagatgttgaaaaatatttaaaacagaaaaagcatgtaaaaacaattcaatactcagttggtggtagtagtccagtagatccaacgggtagtacaaatagtatggcaatcatggttgaatatgataatgacacgcctaattttgatgtagaagcggataaggttattaaacatgtagatggctttaaacatcctggagagtggaaaaatcaagatttaggaacaggtgcaggtaataaatctgtagaggttactgtgaaaggcccatcaatggatgccataaaatcaactgtaaaagatattgaacagaaaatgaaacaggttaaaggactagccaatgtcaaatctgatttatcgcaaacatatgatcagtatgaaattaaagttgatcaaaataaagcggcagaaaatggtatttctgcaagtcaacttgcaatgcacttgaatgaaaacttaccagaaaaaacagttacgactgttaaagaaaatggtaaaactgttgatgttaaagtcaaacaaaataagcaaacagactggtcagaagataagttgaataatataactttgaaaaagccgactggtggtacgattaaattgggagatatcgctacgttagttaaaacaacgacaccaagtaaattgacgcaagaacaaggtgattatgcaacgacggtatctgctaaagtaacaaataaagatgtgggtggcacaacacgacaagtgatgtctaaaataaataatttggacaaaccgaataatgtaaaggttaatatcggtggtgcatcagatgatattaacaatgcaatgacacaattagcctttgcaatgttagctgcaatcattatcgtatatttaatcctagttattacatttaaaggtggcttagcgccatttacaattttattctctttaccatttacagttatcggtgtaattattgcactattaatcacaggagaaacaatatcagtaccaagtttaattggtatgctaatgttaattggaatcgtagtaacaaatgccattgtgttaatagaccgtgtcattaataatgagcagcagggcatggagatgaaagaagcattaatcgaagcaggcggtactagaattagaccgatattaatgacggcgattgcaacaatcggtgcattagttcctttgttatttggtcaagatagctcgattcttatttcgaaaggattagctgctacagttattggtggtttaatttcatcaactttattaacacttgtagttgtaccagtaatatatgaaattctctttactttaaaaaaacgattcactaaacgatag

SEQ ID NO: 415216 - DNA, 318 bp, Staphylococcus aureus
atgcaattttatctgattttactagcaatactttatctaattgttagttttattagtatttttaaaatggaagttgtatttactcgcattttgagaattattatgggtgtgttgttattgttcgtcttagcattaacgacgatgagttttccaaaagagaattggtgggtatttatcgtcttactactcttagtcggcaatgtcgaagtgacaggatttaaaatgcttaaaaaagatctaaaaggtgtaaacatcttgaatttaatgtcattatttatctttgtcatatatttcatcttaaccatcgtattattctaa

SEQ ID NO: 415217 - DNA, 165 bp, Staphylococcus aureus
atgtctttagaaaaccaactagccgaacttaaatatgattatgttcgtcttcaaggtgacttagaaaaacgggaatctttgaatttagatacttccgcacttgttcgtcaacttaaagatattgaaaatgaaattagaaacgttcgcgctcaaatgcaagattaa

SEQ ID NO: 415218 - DNA, 909 bp, Staphylococcus aureus
gtgacagaacaatttactatgattattttattaattgcgcttggttactttttgaagcgcattaattttataaaggcaacagatagtcaagtcattgctacattagttcttaatgtcacactcccatctttagttattgtgaatttaaacagtgcagaattaaaattgtcattctccattttaccaattttaatgattatatatggtattgtggcgaaaatgattgctgtctggttttttagaaaatatgataatcacatgcgtggatcagtaggtatgatgactggtgctatgaatattggattgtttgcatatccactaattgaagtgatatggcctaaaacggggcttatttattttggtatggctgatataggtggtgcctttgtgatgtttggaattacttactttgtaggtagctactttagtgaaggtagtgatcaattcgattttaaatatttaggtaagaaattattacagtcagtgccactcgttacatacattgtaatgtttatattgaatataaatcacatccatttaccacatgtggcaatcgatttctttagcatactttcccatgcaaatatgccgttatcaatgattttgctaggtgttatgttgaattttactctggaaagaaagtatatacctgctactattaaatatttatgtttgcattatggattagcattagttgcgggattgttagtacatgtgttgttaccggtatcagatgatatgattaagacgacattgttggtcacttggatgttcccggttggtgtcgcaattatttcttatggtattcagtttaaatatcgaacactgccatttataggtatgacgaccaatttgacaatcattattagtatcattattttgtacgtgtatcaggcagtgtttgtctag

SEQ ID NO: 415219 - DNA, 864 bp, Staphylococcus aureus; identical to SEQ ID NO: 413318

SEQ ID NO: 415220 - DNA, 888 bp, Staphylococcus aureus; identical to SEQ ID NO: 413317

SEQ ID NO: 415221 - DNA, 2136 bp, Staphylococcus aureus
atgaaatctttaatattagctgaaaaaccatcagttgcaagagatattgctgatgctttacaaataaatcagaagcgtaatggttactttgaaaataaccaatatattgtcacgtgggcgttaggtcatctagtgacaaatgcgacacctgaacaatacgataaaaatttaaaggaatggcgattagaagaccttccaattatacctaaatatatgaaaactgttgttattggtaaaacaagcaaacaatttaaaacagtaaaagcgttaattttagataataaagtgaaagatattattattgcaacagatgctggacgagaaggtgaactagttgcaagattgattttggataaagttggtaacaaaaagccaatccgtcgattatggattagctcagttactaaaaaagctattcaacaaggttttaaaaatttaaaagacggtcgtcaatataacgatttgtattatgcagcgttagcgagaagcgaggcagattggattgttgggattaatgcaacgcgtgcactaacaacaaagtatgatgcacagctatccctgggacgtgttcagacaccaacgattcaattagtaaatacacgacaacaagagattaatcagttcaaaccacaacaatactttacattatcattaacggtaaaagggtttgattttcagctagaatcaaatcagcgatataccaataaagaaactttagaacagatggttaataatttgaaaaatgtcgatggtaagattaaatctgttgctactaaacataagaagtcgtatccgcaatcactgtacaatttaacagatttacaacaagatatgtatagacgttataaaattggacctaaagaaacattgaatacacttcaaagcttatatgagagacataaagtcgtaacctatccaagaacagattcaaactatttaacaactgatatggtagatactatgaaagaacgtattcaggcgacgatggcaacaacatataaagaccaagcacgcccattaatgtctaaaacattttcatcaaaaatgtcgatatttaataatcaaaaagtatctgatcaccatgcaattattcctacagaagtgagacctgtcatgtcagacttaagtaatagagaattaaagttatacgatatgattgtcgagcgttttttagaagctttaatgcctccgcacgagtatgacgcgataactgtaactttagaggttgcagggcacacatttgttttgaaagagaatgtaacaactgttttaggttttaaatctattagacaaggtgaatctattacagagatgcaacagcctttttcagaaggcgatgaagtgaagatttcaaaaacaaacattagagaacatgaaacaacacctccagaatattttaatgaaggttcgttattaaaagcgatggagaaccctcagaactttattcaattgaaggataaaaaatatgcgcaaactttaaaacaaacaggtggtatcggcacagttgcaacaagggccgacattatcgataaattatttaatatgaatgccattgaatcaagagacggtaaaattaaagtaacgtcaaaaggtaaacaaatattagaattagcaccagaagaattaacgtcgccacttttaactgcacaatgggaagaaaaattacttttaattgaacgtggtaaatatcaggcgaaaacatttattaatgaaatgaaagattttacgaaagatgttgtaaatgggattaaaaatagtgatcgtaaatataaacacgataatttaacaaccacagaatgcccaacgtgtggtaaattcatgattaaagttaaaactaaaaatggtcagatgcttgtgtgccaagatccatcttgtaagacgaaaaagaatgtacagcgcaaaacaaatgcaagatgtccaaactgtaaaaagaaattaacgttgtttggtaaagggaaagaagcggtatatcgttgtgtttgtggacattctgaaacgcaagcacatatggatcagcgtatgaagtctaaatcctctggtaaagtatctcgtaaagaaatgaaaaagtatatgaataaaaatgaaggtttagacaataatccgtttaaagatgcattaaagaacttgaatttatag

SEQ ID NO: 415222 - DNA, 1335 bp, Staphylococcus aureus
gtgaaaaactatttccagttcgataaatatggaacaaactttaaaagagaaatcttaggcggtatcacaactttcttatctatggcctatattttagcagttaacccgcaagttttaagtttagcaggtgttaaaggcgtatcagaagatatgaaaatggaccaaggtgccatttttgtagcgactgcattagcagcatttgtaggctcgctattcatgggactaatagctaaatatccaatcgcattagcaccaggtatgggattaaatgcattctttgcatttactgttgtgttaaccatgggtattccttggcaagttggtttaacaggtgttttattctcaggtatattctttgcgatattaaccgtcacagggtttagggaagttattattaatgcaattccttatcaaatgaagatggctgtttcagcaggtataggattattcattacatttgtaggtttacaaagttcgggtattatagttaaaaatgaatctacattagtaacattgggacatttaactgatccaccagtacttttggcgatattcggtatcgttattacagttattttatatgcaattaaattgccgggttctatctttatcggtatgatcatcacagcaatcgttggtatgttcactggattgattcaaatgccatctggtattgtaggtaagattccaagtattgaaccaacgttcggtgctgcatttgaagcgtttaaagacccaagtcaattattaacgatacagttcttaattgttattttaacgttcttatttattgatttctttgatacagctggtacattagtagctgttgctactcaagcaggtattatgaaagataataaattaccaagagctggtagagcattgttctcagattctttagctacgattgtaggatcagtttttggaacaactacaacaacttcttatatcgaatcaacttcaggtgttgctgtaggtgctagaacaggatttgctagtatcgtaacaggttgttgtttcctattagcgctgttctttagtccgttaatcgctgttgtaacaagtgcagttacgacaccagctttagtggtggtaggtgtattaatggctgcaaactttgctgagataaactggaaaagttttgaagttgcagtgccagcattcattacaatcattatgatgcctttatcatactcaattgcaactggtattgcgtgtggatttattttctatccaattacaatgcttatctctaaaaaacataaagaagtacatccgataatgtatgtattaatggtactattcattctgtacttcatatttgttcatggttaa

SEQ ID NO: 415223 - DNA, 390 bp, Staphylococcus aureus
atgaaaaatggaccaaaattatctttagcacttataggtatctttttaatactttgtgagtttttctatggcattccttttttaggtgcaacgtttattttaagttttggatggcagcctttactctttaatgcattactttatctaattcttactattatattattagtgaatagacaaaatgcgattagacctatagcgattattccaatatttggtatagtaggtagttttttagctatcatccccttcttaggaattttgattcattggattttatttttcctaatgattctatttgtcctagttgtattatcagcgccaacctatatacctaataaaaatgctcgtgtcatttacacacaatacaaagatggacatagagaataa

SEQ ID NO: 415224 - DNA, 309 bp, Staphylococcus aureus; identical to SEQ ID NO: 413316

SEQ ID NO: 415225 - DNA, 663 bp, Staphylococcus aureus; identical to SEQ ID NO: 406252

SEQ ID NO: 415226 - DNA, 624 bp, Staphylococcus aureus; identical to SEQ ID NO: 406251

SEQ ID NO: 415227 - DNA, 276 bp, Staphylococcus aureus; identical to SEQ ID NO: 406250

SEQ ID NO: 415228 - DNA, 834 bp, Staphylococcus aureus
atggctattaaaaagtataagccaataacaaatggtcgtcgtaatatgacttcgttagatttcgcagaaatcacgaaaactacacctgaaaagtcattattaaaaccgctaccgaaaaaagcgggacgtaacaaccaaggtaaattgactgtaagacaccatggtggtggacacaaacgtcaataccgtgttatcgattttaaacgtaacaaagatggtatcaatgcaaaagttgattctattcaatatgatccaaaccgctcagcaaacatcgctttagttgtatatgcagacggtgaaaaacgatatatcattgctcctaaaggattagaagtaggtcaaatcgttgaaagtggtgctgaagctgacatcaaagttggtaacgcattaccattacaaaacattccagttggtacagtagtacacaacatcgagcttaaacctggtaaaggtggacaaatcgctcgttcagctggtgcaagtgctcaagtacttggtaaagaaggtaaatacgtattaatcagattaagatctggtgaagttcgtatgatcttatctacttgccgtgctacaatcggtcaagttggtaacctacaacacgaattagttaacgttggtaaagccggacgttcaagatggaaaggtatccgtccaacagttcgtggttctgtaatgaaccctaacgatcacccacacggtggtggtgaaggtcgtgctcctatcggtagaccatctccaatgtcaccatggggtaaacctacgcttggtaagaaaactcgtcgtggtaaaaaatcatcagacaaacttatcgttcgtggacgtaagaaaaaataa

SEQ ID NO: 415229 - DNA, 279 bp, Staphylococcus aureus; identical to SEQ ID NO: 406248

SEQ ID NO: 415230 - DNA, 354 bp, Staphylococcus aureus; identical to SEQ ID NO: 406247

SEQ ID NO: 415231 - DNA, 435 bp, Staphylococcus aureus; identical to SEQ ID NO: 406245

SEQ ID NO: 415232 - DNA, 369 bp, Staphylococcus aureus; identical to SEQ ID NO: 406242

SEQ ID NO: 415233 - DNA, 318 bp, Staphylococcus aureus; identical to SEQ ID NO: 406241

SEQ ID NO: 415234 - DNA, 540 bp, Staphylococcus aureus; identical to SEQ ID NO: 406240

SEQ ID NO: 415235 - DNA, 186 bp, Staphylococcus aureus; identical to SEQ ID NO: 406239

SEQ ID NO: 415236 - DNA, 399 bp, Staphylococcus aureus; identical to SEQ ID NO: 406238

SEQ ID NO: 415237 - DNA, 537 bp, Staphylococcus aureus; identical to SEQ ID NO: 406237

SEQ ID NO: 415238 - DNA, 501 bp, Staphylococcus aureus; identical to SEQ ID NO: 406235

SEQ ID NO: 415239 - DNA, 441 bp, Staphylococcus aureus
atgaaattacatgagttaaaaccggcagaaggttcacgtaaagaacgcaatcgtgttggacgtggtgttgcgacaggtaatggtaaaacaagtggtcgcggacacaaaggtcaaaaagctcgttcaggcggtggtgtaagaccaggatttgaaggtggtcaattaccattattccgtcgtttaccaaaacgtggttttactaacataaatcgtaaagaatatgctattgttaacttagaccaacttaataaatttgaagatggtactgaagtaactccagctttattagtagaatctggtgttgttaagaatgaaaaatctggtatcaaaatactaggtaatggttcacttgataagaaattgacagtgaaagctcataaattctcagcttcagcagcagaagctattgatgctaaaggtggagcacacgaggtgatctaa

SEQ ID NO: 415240 - DNA, 219 bp, Staphylococcus aureus; identical to SEQ ID NO: 406230

SEQ ID NO: 415241 - DNA, 390 bp, Staphylococcus aureus; identical to SEQ ID NO: 406228

SEQ ID NO: 415242 - DNA, 945 bp, Staphylococcus aureus; identical to SEQ ID NO: 413308

SEQ ID NO: 415243 - DNA, 369 bp, Staphylococcus aureus; identical to SEQ ID NO: 406226

SEQ ID NO: 415244 - DNA, 861 bp, Staphylococcus aureus; identical to SEQ ID NO: 413307

SEQ ID NO: 415245 - DNA, 804 bp, Staphylococcus aureus; identical to SEQ ID NO: 413306

SEQ ID NO: 415246 - DNA, 399 bp, Staphylococcus aureus; identical to SEQ ID NO: 406220

SEQ ID NO: 415247 - DNA, 948 bp, Staphylococcus aureus; identical to SEQ ID NO: 408066

SEQ ID NO: 415248 - DNA, 648 bp, Staphylococcus aureus; identical to SEQ ID NO: 409262

SEQ ID NO: 415249 - DNA, 171 bp, Staphylococcus aureus; identical to SEQ ID NO: 408070

SEQ ID NO: 415250 - DNA, 705 bp, Staphylococcus aureus; identical to SEQ ID NO: 406213

SEQ ID NO: 415251 - DNA, 816 bp, Staphylococcus aureus
atgtcaaagcgtctattattgtttgattttgatgaaacatattttaaacataatacaaatgaagaagatttaagtcatttaagagaaatggaaaaattgttggaaaaactaactaataataatgaagtgatcactgctgtattgacaggaagtacatttcaaagtgtcatggataaaatggatcaagttaatatgacgtttaaaccattacatatcttttctgatttgagttctaaaatgttcacttggaataatggcgaatatgttgaatcagaaacatataaaaagaaagtcttgagcgaaccatttttatttgaagatattgaagatatattacgtcatatttctgcgcaatataatgtcgaatttattccacaaagagcatttgaaggtaatgaaacacattataatttttattttcattcaacaggtaatcacaacaatgatagtcgtatcctagaagcacttgtcagatacgcaaatgaccaaaactatacagcgagatttagtcgaagcaatccattagctggtgatcctgaaaatgcgtatgatattgacttcacaccgtcaaatgctggaaaattatatgctactcaatttctgatgaaaaaatacaatataccagtaaaatcaatattaggttttggagatagcggcaatgacgaagcatatttaagctatcttgaacatgcatatttgatgtcgaatagtagagatgaagcattaaagcagaaatttagattaacaaaatatccatattatcaagggataacactgcatgttaaagaatttgttgaaggtaagtatgattattga

SEQ ID NO: 415252 - DNA, 2430 bp, Staphylococcus aureus
atgacatatagaatgaagaaatggcaaaaattatccaccattacgttattaatggctggtgtgattactttgaatggtggtgaattcagaagtattgataaacatcaaatcgctgtggctgatacgaatgttcaaacgccagattatgaaaagttgaggaacacatggttagatgttaactacggttatgataagtatgatgagaagaatgacgcaatgaagaagaagtttgatgctacggagaaagaggcagagaaattactcagtagcatgaaaactgaaagtggaaggacttacttgtgggatagtgcaaaagatttagataacaagtctgcggatatgactcgtacctatcgtaatattgagaaaatcgcagaagcgatgaggcatcctaaaaccactttaaatactgacgaaaataagaagaaagtgaaagatgcccttgagtggctgcataaaaatgcatatggaaaagaaccagataataaagtaaaagaattgactgagaattttaaaataactgattcatcaaagaaaaaagctttaaattggtgggattatgaaattggaacacctagatcattaacaaatacgcttatattgctgaatgatcaattttcaaatgaagaaaagaaaaaattcactgcccctattaaaactttcgccccaaaaagtgatgaaatattatcttctgtaggaaaagctgaacctgctaaaggcggaaatttagtagacattgctaaagtaaaacttttagaaagtattatcgaagaagataaagatatgatgaaaaattcaatagattcatttaataaagtcttcacttacgttcaagattctgccactgataaagaacgtaatggattttataaagatggttcatatatcgaccataaagatgtcccatacactggtgcttatggcgttgtactcttagaggggatttctcaaatgatgccgatgataaaagaaacaccttttaatgataaaacccaaaataatacaaccttaaaatcatggattgacgacggatttttaccactcatttataaaggtgaaatgatggatttatcacgtggtagagccattagccgtgaaaatgaaacgagtcactcagcatctgcaactgtaatgaaatcattgttgagattaagtgatgccatggatgattcaacaaaagctaagtataaaaaaattgtcaaaacttcagttaaatctgattcaagttacggccaaaatgatacattaagctcttattcggatataagcaaaatgaagtctttaatggaagacagcactatttctactaacggtttaacacaacaacttaaaatatataatgacatggatcgtgtcacctatcacaataaagacttagactttgcatttggtttaagtatgacgtcgaaaaacgtcgcacgttacgaaagtatcaacggagagaacttaaaaggttggcacactggtgctggaatgtcttatttatacaatagcgatgtgaaacactaccgtgataacttctgggcgacagctgatatgaaacgtttagcaggtacaacaactttagaaaatgaagaacctaaaggtacggatgttaaaaagtcgagtaaaacttttgtaggcggaacaaaattcgatgaccaacatgctagtatcggaatggattttgaaaatcaggacaaaactttaactgccaaaaaatcatatttcatattaaacgataaaattgtcttcttaggaactggcattaaaagtactgattcatcaaagaatccagttacaacgattgaaaatcgcaaagcgaatgggtatacgttatatacagacgataaacaaacaaccgcttccgataatcagggaaccaattccgtctttttagagtcaaccaataaacctaaaaacaatataggctatcattttttaaacgaatcgaaaataactgtaaaaaaagaaagtcatactggtaagtggagtgatataaataaaagtcaaaagcaagacagtaaaactaatcaatattatgaagtaactcaaaagcattctaatacagatagtaaatatgcatatgtgttgtatccaggcttatctaaagatgactttaatacaaaaaaagataaagtaactgtcgttaaacaagatgatgacttccacgttgtgaaagataatgaatcggtttgggctggtgttaattatagtaatagcactcaaacttttgacattaacaacactaaagtcgaagttaaagccaaaggaatgtttattcttaaaaacaaagatgataacacttatgaatgtagcttctataatcccgaatctacaaataccgcttcagatattgaatctaaaatttcaataactggatactctattacaaacaaaaatacatcaacttctaatgaatccggcgtacactttgaattaactaaataa

SEQ ID NO: 415253 - DNA, 417 bp, Staphylococcus aureus; identical to SEQ ID NO: 413300

SEQ ID NO: 415254 - DNA, 849 bp, Staphylococcus aureus; identical to SEQ ID NO: 406207

SEQ ID NO: 415255 - DNA, 204 bp, Staphylococcus aureus; identical to SEQ ID NO: 408071

SEQ ID NO: 415256 - DNA, 756 bp, Staphylococcus aureus
ttgaataaacatgaacgtttggacgaaattgctaaactagtgaataaaaagggcacgataagaacgaatgaaatcgtcgaaggtttaaatgtgtctgatatgacagttcgaagagatttaattgagttggaaaataagggcattttaacgaagattcatggtggtgcacgcagtaattcaacatttcagtataaagaaatatcacataaagaaaaacatactcgtaaaattgctgaaaaaagatatatagctaggaaagctgcatcattaattgaagatggggatactttgtttttcggaccgggaacaacagtggaactattagcagaagaagtcaatcatcatacgctcacaattattacgaattgtttgccggtgtataaaattttgttagaaaaacaaacagcacattttcgtgtctatttaattggtggtgaaatgcgccatattacagaagcatttgtaggtgaaatggcgaatgccatgttggaaaaactaagatttagcaagatgttctttagtagtaacgcagtaaataaaggtgctgtgatgacatctacattagatgaagcctatacgcaacaattggcactaagtaattcaattgaaaaatacttgttaatcgatcatacgaaagttggcaaagaagattttacatcattttgtcagttaaacgaattgactgcagtggtcatggactatgaagatgaagaaaaagtagaaacgattaaaacatatattgaagtagtcgactaa

SEQ ID NO: 415257 - DNA, 429 bp, Staphylococcus aureus; identical to SEQ ID NO: 406202

SEQ ID NO: 415258 - DNA, 516 bp, Staphylococcus aureus; identical to SEQ ID NO: 413298

SEQ ID NO: 415259 - DNA, 981 bp, Staphylococcus aureus
atgtcaaaatctaatcaaaaaatcgcatcaattgaacaattaagtaataacgaaggtatcatttctgcattagcatttgaccaacgtggtgctttaaaacgaatgatggctaaacatcaaacggaagagccaactgtcgctcaaattgaacaattaaaagtattggttgcggaagaattaacacaatatgcgtcttcaattttattagatccagaatacggtttaccagcatctgatgcacgtaacaaagattgtggattattgctagcttatgaaaaaactggttatgacgtaaatgctaaaggtcgtttacctgactgtttagtagagtggtctgcaaaacgtttaaaagaacaaggtgcaaatgctgttaaattcttactttactatgatgttgatgatgctgaagaaattaacattcaaaagaaagcatacattgaaagaatcggttcagaatgtgttgcagaagacattcctttcttcttagaagtattaacatacgatgacaacattcctgataacggtagtgttgaattcgcaaaagttaagcctagaaaggttaacgaagcaatgaaattattctcagaaccacgctttaatgttgatgtattgaaagttgaagtaccagtaaacatgaagtatgtagaaggctttgctgaaggtgaagtggtttatacaaaagaggaagcggcacaacactttaaagatcaagatgcagcaactcatttaccatacatttacttaagtgctggtgtttctgcggaattattccaagaaactttaaaatttgctcacgaagctggtgctaaattcaacggtgtactttgtggccgtgctacatggtctggtgctgttcaagtatacattgaacaaggtgaagatgctgctcgtgaatggttacgtacaactggtttcaaaaatattgatgacttaaataaagtattaaaagatactgcgacatcttggaaacaaagaaaataa

SEQ ID NO: 415260 - DNA, 312 bp, Staphylococcus aureus
atgaatagagaagaagtccaattattaggttttgaaattgttgcatttgcaggggatgcacgttctaagtttttagaagcattgacagcagctcaagctggagattttgcaaaagcagatgcattgattgaagaaggaaacaattgcattgctgaagcgcatagagcacaaacaagcctgttagctaaagaagcgcaaggtgatgatattgcatacagtgtaacgatgatgcatggtcaagaccatttaatgacaacaattttactgaaagatttaatgaagcatttattagaattttataaaagagggtga

SEQ ID NO: 415261 - DNA, 1713 bp, Staphylococcus aureus
atgatgcaaaaattgatcgcacaaattgaaaaagggaagccatttttcgagaaattatcacgtaacatatatttaagagccatccgtgatggatttatttctgcaatgcctgtcatcttattctcaagtatctttctattaattgcatacgtgccaaatatatttggttttaaatgggataaaggcatggaagccattttaatgaaaccatataactatacgatggggcttgtagcatttttagtagcaggaacgacagcgaaatctttaacagattcatttaaccgtaagctagaaagtacaaatcaaattaactttatttctacaatgctagcagcgatgtgtggattcttgttcttagcttctgatccagccaaagatggtggattcttaagtgcatttatgggaactaaaggtttattaacagcatttttatcagcatttgtaactgttattgtttataacttctgtgtgaagcgcaatattacaattaaaatgccgaaagaagtaccgccgaatatttcacaagtatttaaggacttaattccattttcagcggtaatcatcattctttatgcattagatttagtcattcgcaacagctttaaatcaaatgtagcggaaggtattttaaaattattcgaaccattatttacagcagcagatggatggattggtgtcacaattatctttggtgcctttgcattattctggtttgtaggaattcatggtccatcaatagtagagccagcaattgcagccattacatatgcgaatatcgaagcgaacttcaagttgcttcaagctggagaacacgcagataaaattattacatcaggtacacaaatgtttatcgttacttttggaggtacgggtgcaacattggtcgtcccgttcatgtttatgtggatgacgaaatctaaacgaaacaaagcgattggacgtgcatcagttgtaccaacattctttggtgtaaacgaaccaattttatttggtgcaccactagtattgaatcctgtgttctttattccatttgtattagcaccaattgttaacgtatggattttcaaacttttcgttgaagtgttaggaatgaatagttttagtgtaaatttaccttggacaacaccaggtccattgggcattatcatgggtacaggttttggtttatggtcattcgtactagctattactttgattgttgtagatattattatttactacccattcctaaaagtttatgatagtgaaattcttgatgaagaagaaggacgtaaagaaagtaattcagatttaaaagaaaaagttgcagcaaactttgatacgaaaaaagctgattcaattttagcggcaagtggtgtatcagacgatgcagctaaagcttcaaatatcacagaacaaacaaatgtcttagtactttgtgccggtggtggtacaagtggattattagccaacgcacttaataaagcagctgaagaatatcatgtgccagtgaaagcagcagctggcggatacggcgcacatatggacattatgaaagagtaccaattaatcattttagcgccacaagttgcgtctaactatgaagatattaagcaagatacagatagattaggtattaaattagcgaagactcaaggtgctgaatatatcaaattgacacgagacggccaagcagcccttgatttcgttcaacaacaatttgaaaattaa

SEQ ID NO: 415262 - DNA, 870 bp, Staphylococcus aureus
gtgaagaaaatttttgtaattattacgacgttgttagcggtcgctattattataggctctattattacggtggtgtttagtcaacgacaggcacaaacatttaaaatacaacaacagcaatttgttaaaaagccaattccaacattgttcttacatggatttggtggtagtgccaattctgaaaagtttatggtgaagcaagcagaaaaaagaggggtaactaaagatatcatcactgcttacgtttcaaaggatggtgcagtgacatttaaagggaaactaagaaaagatgcagtgaatcctattgtgaaaattgaacttgaaaataacagacaaggctatttggataagaatgctgcgtggtttaaaaatgtactgactaagttacaatctgaatacaatttcgataaattcaactttgtcggtcactcaatggggaacttaacatttgcacaatatatgatgacatatggtaacgacaagtcactgccacagttaaacaaacaagtgaatattgcagggacatttaatggtgttttaaatatgaatgaagatgtcaatgaaattacagttgataaagatggtaaaccaagtcgaatgaatcaaccttatcagcaattacgcgtgctaaaagatatttataaaggtaaaggtatcgaagtgctaaatatttatggagatttgaaagatggtacacattcagacggcagagtgtctaatagttcttcgaaatcattaaaatatttactgggaaatagtccgaaaagttatcgagaatctaaatatgaaggtgagcctgcacaacatagtcagcttcatgagaatgaaaatgttgctaatgagttaatcgacttcttatggaaaaaataa

SEQ ID NO: 415263 - DNA, 1008 bp, Staphylococcus aureus; identical to SEQ ID NO: 413295

SEQ ID NO: 415264 - DNA, 1563 bp, Staphylococcus aureus
atgaaaaataaatcagtaagtctagtgttttgggtatctttagtgatatgtacgatatttgttgcttttggagcaatatttccgaaacaattagaaaaactcacgcaaaacattactacatttattgcgctacatttttcttggtattatttattgctcgttttagttattttatttgtctgtgtgtatattttattttcgagatacgcaaacattacattaggtgaagaaggcgaagatcctgaattctcattgccgtcttggtttgctatgttatttagtgctggtatgggaataggacttgtgttctggacaacggcagaaccaatcagtcatgccttcaaattaacgcctattcataaagctggcacgcaatctgcaattaatgatgcaatgcagttttcatttttccattgggggattcatgcatgggcagtctatggtattgtcgcgcttgtgtttgcatattttagctttcataaaggatatcctggcttagtcagcgctacattgacgcctttattaggtgaaaaggcaatgcgtggacctttaggtggtgccattgatgtattggcagtcatagctacagtaacaggcgttgctgcaacattaggtttcggtgcattgcaaataaacgaaggtttacattttttatttaatgtaccgagtaacttcacgatgcaagtaatcttgattgtcattgcaaccatattatttacttggtcagcatggtcaggtatcgataaaggtatcaaaacgttgagtaatatcaacatgttacttgcttttgtagtacttattggtctttttattgttgggccaacgctttacattttaaatacatttacaaatggtctaggtaattatattgcaaatttctttagtatgagtttacgtattccgtcaggcggtcaaaaattccaatggttacaaaattggacaatcttttactgggcatggtggatatcttgggcaccatttgtaggtatatttattgcacgtgtgtcaaaaggacgtacgattaaagaatttattctaggtgtactttttgtcccggcgttagtttgctttatattctttgcggtattcggcgcgtcagcaatttacttacaagataatcatattgccgatattgctaaagcagcgacagaaacagcaacttttgcaacgctacaacattacccactaggttttgtattaagcttaattactttacttgttattatgattttctttgttacatcagcggattcggcaacttatgttttaggtatgttgagttcaagaggtgatattaatccgaagtcatttgtcaaagtgagttggggtatcattatggcattatttgcaattatcatgatctacacaggtggtactcaagcgattcaaaatttattaatcattgctgcgttaccattttccgtggtcattatagcgatgatatggtcgcttttaaaatctttaagtgaagaaaaacctagaaatagtaataaggttttaattaaacatcgtgacccagatattttagaatatcgttcttcaaaacatattgacgaaaattaa

SEQ ID NO: 415265 - DNA, 537 bp, Staphylococcus aureus; identical to SEQ ID NO: 406191

SEQ ID NO: 415266 - DNA, 240 bp, Staphylococcus aureus
atggctaacaatcataaccaaaacggacaagactctacacaacaagtgattaattttttaaaagtatttaaatggagaatcgttggtttcctagcgtttctattaatcgcgatattattcttaacgttaggtttttggaaaacagtacttatcatcgttttatgtttaattggtgtaggaattgggtatatgaaagaccgtaagcaagattttatgaattttttaaatcgatggagttaa

SEQ ID NO: 415267 - DNA, 510 bp, Staphylococcus aureus; identical to SEQ ID NO: 413294

SEQ ID NO: 415268 - DNA, 1071 bp, Staphylococcus aureus
atggcacacgttaacataaatatatcgaagattaaatataacgccaaagtacttcaaacagtttttcaaagtaaaaatatacaattcacaccagtaattaagtgtatagctggtgaccgtacaattgtagaaagcttaaaagcgttaggtatcaatcatgttgcagaatccagattggataacataattagtattgcagatcaggatttaacatatacgttattgcgtacgcctgccaaaaaagagatttcagatatgatagaaaaagttgatatgagtatccaaacagaattatctaccatacatcaaataaatgaagtagcagaagttttaggaaaaaaacataagattttattaatggtagattggaaagatggccgtgaaggtgttctgacttatgatgttttagattatattaaagagattattcacttgaaaaatatccattttgtaggtttagcattcaattttatgtgttttaaatctgatgcgccaagtgatgatgatatctttatgattaatcgattcgtctcagctgttgaaagagaaataggatatcgattgaaaattatttcaggtggtaattcgagcatgttaccacaacttttatataatgatttgggtaaaataaatgaattgcgaataggtgaaacgttgtttagaggtgttgatacaacgacaaatcaagcgatcgctatgttatatcaagatgcgattacattggaggctgagattttagaaattaaacctcgagttaatacacaaacgcatgaatcattcttacaagctattgtagatattggttatttagatacaaaagtcgataatatttcacctatggatcagcatatcaatattttaggcgcttcgagtgatcatttaatgcttgatttaaatggtcaaggacactatcaagttggagatcatatatctttttcattaaattatgaagcactttctcattcgatgtatatgaaaaatttacataaggtatatattgatgattcaaagattgatacgctacttcaaaattttgatgtgaaatctcctgctatggtaaaccaatattaa

SEQ ID NO: 415269 - DNA, 984 bp, Staphylococcus aureus; identical to SEQ ID NO: 413290

SEQ ID NO: 415270 - DNA, 1032 bp, Staphylococcus aureus; identical to SEQ ID NO: 413289

SEQ ID NO: 415271 - DNA, 969 bp, Staphylococcus aureus
atgatgacaacgaaaattatacgtcgttatagtttaatcacaatccttttaattgtgagtatattcataagtttatgtgtagggtctgtcatgattcatccgattgatgctattaagggaatctttacacaagatgattttattttaaatgagtatcgtatacctagaacattacttggtattattatcggtagtagcttggctatatcaggtgcaattatacaagctgtaataagaaacccgttagcctcacctgatgttataggtatttctaaaggtgccagtttagctgctgtaattattattatgatctttccaacagcaccattgtttgttttacctataggttcattcttaggtgcctttgcagtaagtttatttttatcatttttaatttcaaaatatgatgttaaaggttcaaagcttgccttaattggtttagcaataggcgcaatatgtacggcgattgtgcagttcttattaatcagaaatccactggaagcaaacaaagcgcttgtttggttgacaggtagtctatatggacatgatatgtcgaatatttatactatattaccttggtttttaataacgataccaatcatcattttattgagttatcaattagatgtattgaatctaggtgatgctgttgcaaccgcactcggtttaaaagttaaaactattaaaatgctattgctaattttagcagtaatattagcaggatccgcaatttcagttgtcggtggtattagctttttaggattaattgcacctcatattgcgagacaattaataggaaataaaacattacacgttattatcatgtcggggttaattggtgctatattgttaacatttggagatggtttagcccgtggcattcatccgccactggatattcctgtaggggttatcattgcaattatcggtgcaccatacttcttaatattattacgaagaatgaaataa

SEQ ID NO: 415272 - DNA, 1371 bp, Staphylococcus aureus
atggatagcttttcaaggaaagagatagttattgggagacttaagtttattacgatgtctttaattggtatcttattatttctagtaccaattccagtcgaacaagatggacagaagcaaacaacgttgcccgtagcatttttagcaggcgtgcttaaagatgtattaggtggcgtaatgccatttttaattgtgacgataattactttatcgggtatcataactctgatttgttcaactattttaaaagataaattgaaacctgacgggctaatgaacaatgcttttaacgttagaattggttggttaattttacgaatattagcagttgtttttgcatggatgacatttttacgaattggttcaaaggttatttactcagatgaaacgggtggattattgttctcaagtttattgccaacattagtggcagtattcttatttgcagctctatttttaccgctattaatggaatacggtttgttagagatgttgggtcctatttttagaccggttatgagacctttatttacattgccaggacgttcgacggtagataatttagcatcatttattggagacggaactgttggtgtcttaattacaagtagacaatatggtgaaggatattattctcgtcgtgaggcaacagttatttcaacgacatttagtgtagtttctatcacctttgcaattgtagttgctgaaacagtgcacatgcaaaatcaattttttgctttctatttatcagtgatagtatcctgcctcgttgcagcagtcattatgccaagaatttggcctttaaataaaattcctgatgagtatgctaaggaggtacctgaaagtgcgcgtactgaggcattgccagaaggaaagacggcattgagacatggctttgatactgcaacagaagttggtattaaagcaccgggcgttattgacttttttaagtcaggattaaaaacagtcattgatatgtggtttgttattttgcctgtagtgatgagtattggtactattgctaccattattgcgaactacacgcccttttttgtcatattgggtaaaccttttgttccatttttagagttaatgcaaatacctgaagcggcacaggcttctcaaacgattattatcggttttgccgatatgtttttaccttctatattaattgaaggtgtacaaaatgatataactcgttttgttattggggcacttagtatatcgcagttaatatacttgtctgaagtaggtggcgtcatacttggttcgaagattcctgtaagcatcggcaaattgtttatgattttcttgattagaacaatcattacactaccaattatttctttgatggcacatcttttgttataa

SEQ ID NO: 415273 - DNA, 261 bp, Staphylococcus aureus; identical to SEQ ID NO: 413288

SEQ ID NO: 415274 - DNA, 1188 bp, Staphylococcus aureus
atgctagataaaaatcaattagctaaatataaacaagatcatttgtgtgaatatgaaaaaataatgagtaacaatgaaaaagaagcacttgaagagaaggtagcgtcattagatttagattttattgccaaattatataacgatttatacatcaataagaaaacaatagatgatgtatctgcagtttctgaagtgaaatatgatattaaatcacaaatgagtgatgatgagattaagcgtttagaggaacaaggacttcaagctattaaagaaggacaatttgcagtacttttgatggcaggtggtcaaggaacaagacttggttacaagggccctaaaggttcgtttgaaattgaaggtgtaagtttatttgaacttcaagctaaccaattaaaaacattgaatcatcaatctggacatacgattcaatggtatattatgacaagtgatatcaatcatgaagaaactttagcttatttcgaagcacatagttattttggatatgatcaagaagcaatccatttctttaaacaagataatattgtggcgcttagtgaagaagggaagttaattttaaatcaacagggtcgtattatggaaacgccgaatggtaatggtggcgtgtttaaatctttagacaaggcaggatacttagaagaaatgtctaataatggcgttaagtatattttcttgaataatatcgacaatgttttagtaaaagtgttggatccactatttgcaggatttacggtagaacatgattacgatattacttctaaaacgattcaaccaaaaccaggagaaagtgttggacgtttagttaatgtcgattgtaaagatacagtactggagtattcagaattagatccagaagttgcaaatcaatttaacaatgctaatatcggtattcatgcatttaaacttggttttattttaaacgctgtaaatcgtgagttaccttatcatttagctattaagaatttgaaacaattagatgagaactttggggttattgaacaaccaactttaaaattcgaattgttctattttgacatatttacttatggaactagttttgtcacgttacaagttcctagagaagaagaattttcacctcttaaaaataaagaaggtaaagatagtgttgcaactgcaacagaagatttacgtagaatgggtttaatttaa

SEQ ID NO: 415275 - DNA, 687 bp, Staphylococcus aureus; identical to SEQ ID NO: 414250

SEQ ID NO: 415276 - DNA, 1443 bp, Staphylococcus aureus; identical to SEQ ID NO: 408563

SEQ ID NO: 415277 - DNA, 1065 bp, Staphylococcus aureus; identical to SEQ ID NO: 410066

SEQ ID NO: 415278 - DNA, 354 bp, Staphylococcus aureus; identical to SEQ ID NO: 414837

SEQ ID NO: 415279 - DNA, 240 bp, Staphylococcus aureus; identical to SEQ ID NO: 409234

SEQ ID NO: 415280 - DNA, 1257 bp, Staphylococcus aureus; identical to SEQ ID NO: 409235

SEQ ID NO: 415281 - DNA, 348 bp, Staphylococcus aureus; identical to SEQ ID NO: 407392

SEQ ID NO: 415282 - DNA, 618 bp, Staphylococcus aureus; identical to SEQ ID NO: 407393

SEQ ID NO: 415283 - DNA, 1647 bp, Staphylococcus aureus
atgggattagctgcaatcggggcttctctgatagggagtttttgggaaggaacccttttgatacttattttttccggcgctcattttcttgaagattacgctgaaggaaaaagtaaaagagaaattactaagctactcgaaatgaacccaacgacagctaaattaatcctacctgatggaaacacaaaaattgttgatgtcagtgaattaaaagttggagatcaactccaagtgctgaacggtgatcaagttccaattgatgggattattttatccggtactacctcaattgatgaatcttctattaatggagaaagtataccgaaagagaagtctaagggtgacgaagtttttggaagtacgattaatggaacaggtacttttactatggaagtcactaaggaaaacaaggatactgtattctctaaaattttacaattagttagtcaaaaccaagataatcaaacaaaagctgccagtatcattcaaaaattcgagcctaaatatgttaatatagttttaatcgcaataccattagtaatgttacttgctccttttctatttgattggacatggtcgcaaagtgtatacaggggattagtgcttttagtcgcagcttcaccgtgtgctttggcagcagctactgtatctgtaacattgtctacaacatctaacctagctaaaaaaggcgtgctttcaaaaggaagtacttacctatcacaattagcggatatagatgcaattgccttcgataaaacaggaacccttacgaacggagaacctaaagtaacaaattactatttcactcattctgtgaacgaagaaaatattattgatattatagtcgcccttgaaaaggaatccaatcacccactcgctaatgctattttagaaaaatttgaagttaaaaataaaatagacatcgaagttactaatcaaattggaaaaggtctgacaggagattataatggaaaaaattatcgtattggtaagcctacttcttttgaaagtgcttctgaagagtatacccagttcaatcatgattgggcatcagaaggaaagacggttgtatacgtagcagaaaatgaagaagttattgggattatagctctaatggatattccgaatgagcatgctaaagaaacaattaattactttaagaaacttggtatccacacgactttaattactggtgattcggaaatgacgggaaaagctgtaggcgaacaattgggaatagacgaagttatcgctaatgtaatgcctgaagataaatccagaattatagaagaacaaaaagaaaaatttggagttactgccatggttggagatggtgtgaacgatgcaccggcccttgttaatgctgatgttggtatagctatggggggcggtactgatgtggcagtagaagtatctgatttggttttaatgcagaacaatttatctaaattagtacagtctcataaaatttcctcaaatatgggtcgtgttattaggcaaaatattattttttcaatggcagttgttgcctttttagttgtcgttagtttgttaggattaactgatattacaatcagtgtaattgttcatgaaggaagtactttagttgttatactaaatggacttcgattattaagatctaaataa

SEQ ID NO: 415284 - DNA, 372 bp, Staphylococcus aureus
gtgaaagcaaattcatttgttacaccgaatggtcaagtatctgcatatgatcaatacttatttgcacaagacccaactggtccagcagcaagagactatttcgtcccagataatcaattacctcctttaattcaaagtggctttaatccatcatttattacaacattgtcacacgaaagaggtaaaggtgataaaagcgagtttgaaatcacttacggcagaaacatggatgctacatatgcttacgtgacaagacatcgtttagccgttgatagaaaacatgatgcttttaaaaaccgaaacgttacagttaaatatgaagtgaactggaaaacacatgaagtaaaaattaaaagcatcacacctaagtaa

SEQ ID NO: 415285 - DNA, 969 bp, Staphylococcus aureus; identical to SEQ ID NO: 415271

SEQ ID NO: 415286 - DNA, 984 bp, Staphylococcus aureus; identical to SEQ ID NO: 413290

SEQ ID NO: 415287 - DNA, 1194 bp, Staphylococcus aureus; identical to SEQ ID NO: 413292

SEQ ID NO: 415288 - DNA, 933 bp, Staphylococcus aureus; identical to SEQ ID NO: 413297

SEQ ID NO: 415289 - DNA, 429 bp, Staphylococcus aureus; identical to SEQ ID NO: 406202

SEQ ID NO: 415290 - DNA, 816 bp, Staphylococcus aureus; identical to SEQ ID NO: 415251

SEQ ID NO: 415291 - DNA, 426 bp, Staphylococcus aureus; identical to SEQ ID NO: 413302

SEQ ID NO: 415292 - DNA, 1665 bp, Staphylococcus aureus
atgactgataaaaagtacactgcagccgatatggttattgatactttgaaaaataatggggtagaatatgtttttggtattccgggtgcaaagatagactatctatttaatgctttaattgatgatggtcctgaacttattgtcactcgtcatgaacaaaatgctgcaatgatggcacaaggtattggaagattaacaggtaaaccgggtgtagtacttgttacaagtggccctggtgtaagtaatttaacgactggactattaacagctacatctgaaggggatcctgtattagcgttaggtggccaagtgaaacgtaatgatttattacgattaacgcatcaaagtattgataatgctgcgctattaaaatattcatcaaaatacagtgaagaagtacaagatcctgaatcattatcagaagttatgacaaatgcaattcgaattgctacttcaggaaaaaatggcgcaagttttattagtattccgcaagacgttatttcttcaccagttgaatctaaagctatatcactttgccaaaaaccaaatttaggagtaccgagtgaacaagatattaatgatgtcattgaagcgattaaaaatgcatcatttcctgttttattagctggtatgagaagttcaagtgcagaagaaacaaatgccattcgcaaattagttgagcgcacgaatttaccagttgtagaaacattccaaggtgcaggtgtaattagtcgtgaattagaaaatcatttcttcggtcgtgtgggcttattccgcaatcaagttggtgatgaattattacgtaaaagtgatttagttgttacaatcggttatgatccaattgaatacgaagctagtaactggaataaagaattagaaacacaaattatcaatattgacgaagttcaagctgaaattactaattatatgcaaccgaaaaaagagttgattggtaatattgctaaaacgattgaaatgatttctgaaaaagtggatgagccatttataaatcaacaacatttagacgaattagaacaattaagaacacatattgatgaagaaactggtattaaagcgacgcatgaagaaggaattctacatccagtggaaattattgaatctatgcaaaaggtattaactgatgatactactgtaaccgttgatgttggaagtcactatatttggatggcacgtaatttcagaagttacaatccaagacatttattatttagcaatggtatgcaaacgcttggtgtagcattaccgtgggcaatttcagctgcacttgtgcgccctaatacgcaagttgtgtccgttgctggcgatggtggctttttattttcatcacaagatttagaaacggccgtacgtaaaaatttaaatatcatccagcttatttggaatgatggaaaatataacatggttgaattccaagaagaaatgaaatataaacgttcgtcaggtgtagacttcggtcctgtagattttgtaaaatatgcagaatcatttggcgcgaaaggtttacgagttactaatcaagaagaattagaagcggcaattaaagagggctatgaaacagatggtccagtattaattgatatacctgtaaattacaaagataatatcaaactttcaacaaatatgttacctgacgtatttaactaa

SEQ ID NO: 415293 - DNA, 171 bp, Staphylococcus aureus; identical to SEQ ID NO: 408070

SEQ ID NO: 415294 - DNA, 225 bp, Staphylococcus aureus; identical to SEQ ID NO: 408067

SEQ ID NO: 415295 - DNA, 861 bp, Staphylococcus aureus; identical to SEQ ID NO: 413307

SEQ ID NO: 415296 - DNA, 219 bp, Staphylococcus aureus; identical to SEQ ID NO: 406230

SEQ ID NO: 415297 - DNA, 648 bp, Staphylococcus aureus; identical to SEQ ID NO: 406231

SEQ ID NO: 415298 - DNA, 1293 bp, Staphylococcus aureus
atgattcaaacccttgtgaacttctttagaacaaaagaggttcgtaacaagattttcttcacactagcaatgttagtaatttttaaaatagggacttatataccagctccaggagtaaatcctgcagcttttgataatccccaaggttctcaaggtgccactgagttattaaatacttttggtggcggagccttgaaacgattttctatttttgcaatgggtattgtaccctacatcactgcatcaatcgtaatgcaattattacaaatggatattgtccctaaattctcagaatgggcaaaacaaggtgaagtaggtagaagaaagttaaataacgttactcgttatttagcaatttctttagcatttatccaatctataggtatggcattccaatttaataattatctcaaaggtgcgctgattatcaatcagtcaattatgagttatttattaatagcactagttttgacagcaggaactgctttcttaatatggcttggtgatcaaatcactcagttcggtgttggtaatggtatttctattatcatatttgcgggtattttatcaacgttgccagccagtctaattcaatttggacaaactgcgttcgttgggcaagaagatacatcattagcatggttgaaagtattaggacttttagtgtcactgatactattaactgtaggtgctatttatgtacttgaagccgttcgtaaaattccgattcaatatgctaagaaacaaactgctcaaagattaggttcacaggcaacttatctacctttaaaagtgaactcagccggtgttattcctgtaatctttgcaatggcgttcttcttactgcctagaacattaacgttgttctatccagataaagaatgggcacaaaacattgcgaatgctgcaaatccttcaagtaatgttggtatggttgtatatattgtactaattatactattcacatacttctatgcatttgtacaagttaatccggaaaaaatggctgataaccttaagaaacaaggtagctatgttccaggcattagacctggtgaacaaaccaaaaaatatattactaaagttttatatcgtttaacttttgtaggttctatcttcttagccgttatttcaattctaccaatattagcaactaagtttatgggattaccacaatcaattcagattggtggtacaagtttacttatcgttattggtgtagcgattgaaacaatgaaatctttagaagctcaagtatctcaaaaagaatataaaggctttggtggtagataa

SEQ ID NO: 415299 - DNA, 441 bp, Staphylococcus aureus; identical to SEQ ID NO: 415239

SEQ ID NO: 415300 - DNA, 360 bp, Staphylococcus aureus
atgatcagtaaaattgataaaaataaagtgcgtttaaaaagacatgctcgtgttcgtactaacttatcaggtacagctgaaaagccacgtttaaacgtatatcgttcaaacaagcatatctacgctcaaattattgatgataataaaggcgtaacattagctcaagcttcttcaaaagacagcgacattgctactacagcaactaaagttgaattagcaactaaagtcggtgaagcaattgctaaaaaagctgctgacaaaggcattaaagaaatcgtatttgaccgtggaggatatttatatcacggacgtgttaaagcattagctgaagcagcaagagaaagcggattagaattttaa

SEQ ID NO: 415301 - DNA, 399 bp, Staphylococcus aureus; identical to SEQ ID NO: 406238

SEQ ID NO: 415302 - DNA, 540 bp, Staphylococcus aureus; identical to SEQ ID NO: 406240

SEQ ID NO: 415303 - DNA, 435 bp, Staphylococcus aureus; identical to SEQ ID NO: 406245

SEQ ID NO: 415304 - DNA, 354 bp, Staphylococcus aureus; identical to SEQ ID NO: 406247

SEQ ID NO: 415305 - DNA, 834 bp, Staphylococcus aureus; identical to SEQ ID NO: 415228

SEQ ID NO: 415306 - DNA, 276 bp, Staphylococcus aureus; identical to SEQ ID NO: 406250

SEQ ID NO: 415307 - DNA, 309 bp, Staphylococcus aureus; identical to SEQ ID NO: 413316

SEQ ID NO: 415308 - DNA, 390 bp, Staphylococcus aureus; identical to SEQ ID NO: 415223

SEQ ID NO: 415309 - DNA, 2136 bp, Staphylococcus aureus; identical to SEQ ID NO: 415221

SEQ ID NO: 415310 - DNA, 888 bp, Staphylococcus aureus; identical to SEQ ID NO: 413317

SEQ ID NO: 415311 - DNA, 909 bp, Staphylococcus aureus; identical to SEQ ID NO: 415218

SEQ ID NO: 415312 - DNA, 1266 bp, Staphylococcus aureus; identical to SEQ ID NO: 415214

SEQ ID NO: 415313 - DNA, 765 bp, Staphylococcus aureus; identical to SEQ ID NO: 413320

SEQ ID NO: 415314 - DNA, 1023 bp, Staphylococcus aureus
atggtagaacaaataaaagataaactaggacgtcccatccgtgacttacggttatctgtgacagatcggtgtaactttaggtgtgattattgcatgcctaaagaggtatttggagatgatttcgtatttttacctaaaaatgaactgttaacgtttgatgaaatggctagaatcgctaaggtatatgcagaattaggtgtaaaaaaaatacgcattacaggtggagaaccattgatgcgacgcgatttagatgtacttatagctaaattaaatcaaatcgatggtattgaagatattggtttgactacaaatggtttgttattaaaaaagcatggacaaaagttatatgatgctgggctacgcagaattaatgtcagtttggatgctattgatgatacgctatttcaatcaatcaataatcgtaatattaaagcgactacgattttagaacaaattgattacgcgacgtctattggtttgaatgtaaaagtaaatgttgttatacaaaaaggtattaacgatgatcaaatcataccaatgcttgaatattttaaagataaacatatagagattcgatttatagaatttatggatgttggtaatgataatggatgggatttcagtaaagttgtaactaaagatgaaatgcttacaatgatagagcagcactttgaaatcgatcctgtagaaccaaaatattttggggaagtagcaaaatattatcgccataaggataatggtgttcaatttggtttgattacaagtgtttcacaatcattttgttctacatgtacacgcgcaaggctgtcatcagatgggaagttttacggatgtttatttgcaactgtcgatggatttaacgttaaagcgtttattcgttctggcgtgaccgacgaagaattaaaagaacaatttaaagctttatggcaaataagagatgatcgatattcagatgagagaactgctcaaacagttgccaatcgtcaacgtaaaaagataaacatgaattatattggtggttaa

SEQ ID NO: 415315 - DNA, 447 bp, Staphylococcus aureus; identical to SEQ ID NO: 415209

SEQ ID NO: 415316 - DNA, 555 bp, Staphylococcus aureus; identical to SEQ ID NO: 413325

SEQ ID NO: 415317 - DNA, 411 bp, Staphylococcus aureus; identical to SEQ ID NO: 415194

SEQ ID NO: 415318 - DNA, 837 bp, Staphylococcus aureus; identical to SEQ ID NO: 415189

SEQ ID NO: 415319 - DNA, 348 bp, Staphylococcus aureus; identical to SEQ ID NO: 406294

SEQ ID NO: 415320 - DNA, 330 bp, Staphylococcus aureus; identical to SEQ ID NO: 406313

SEQ ID NO: 415321 - DNA, 873 bp, Staphylococcus aureus; identical to SEQ ID NO: 414990

SEQ ID NO: 415322 - DNA, 192 bp, Staphylococcus aureus; identical to SEQ ID NO: 406318

SEQ ID NO: 415323 - DNA, 1605 bp, Staphylococcus aureus; identical to SEQ ID NO: 415167

SEQ ID NO: 415324 - DNA, 507 bp, Staphylococcus aureus; identical to SEQ ID NO: 415165

SEQ ID NO: 415325 - DNA, 1314 bp, Staphylococcus aureus; identical to SEQ ID NO: 415164

SEQ ID NO: 415326 - DNA, 570 bp, Staphylococcus aureus
atggcattaatagtatctagagctatattatttttgattttagcattagcttttggaatagcgactgtttttcctgaacaaaaattaccattatatatagtattcacattatttgtagcagttgcgattattatgaatgtatggtttacccatcaaaacgttaaaaagcatatcattaagtttaacaaatacgtcgcatactttttatcctttgtctcagggttactttacattggatttgtaatttatacattaactatagggagctatgatgttttaccaattattatatttgcaataagtatcgtattggttcaaatattagaaaatatactgggaatcagtataaaaaatacgcgtctatcaaacaaacagttgaaagtcatctccaagcaacgtgttcagcaatttaaagtcatatcattaatattagtaagtgtgtctatcgtgttcatttttattgcattaatgcttaaatggtggcttttacttgttattagcattattgttttgattattattacagtagcaatgattgtttatgaaaaatattatacgactcctgattaa

SEQ ID NO: 415327 - DNA, 921 bp, Staphylococcus aureus; identical to SEQ ID NO: 413340

SEQ ID NO: 415328 - DNA, 639 bp, Staphylococcus aureus; identical to SEQ ID NO: 415148

SEQ ID NO: 415329 - DNA, 648 bp, Staphylococcus aureus; identical to SEQ ID NO: 413341

SEQ ID NO: 415330 - DNA, 555 bp, Staphylococcus aureus; identical to SEQ ID NO: 415145

SEQ ID NO: 415331 - DNA, 1209 bp, Staphylococcus aureus; identical to SEQ ID NO: 415144

SEQ ID NO: 415332 - DNA, 1383 bp, Staphylococcus aureus; identical to SEQ ID NO: 415143

SEQ ID NO: 415333 - DNA, 969 bp, Staphylococcus aureus; identical to SEQ ID NO: 415142

SEQ ID NO: 415334 - DNA, 666 bp, Staphylococcus aureus; identical to SEQ ID NO: 415141

SEQ ID NO: 415335 - DNA, 1056 bp, Staphylococcus aureus; identical to SEQ ID NO: 405038

SEQ ID NO: 415336 - DNA, 675 bp, Staphylococcus aureus; identical to SEQ ID NO: 415139

SEQ ID NO: 415337 - DNA, 1674 bp, Staphylococcus aureus
atgattaaacagataaatgtttctaatatgcaaaagtttgaatctcaattaatgaaagctcagtctgaaggttatacacatgtcgttccatatgcaaatgagataatgatttatcaatcgatgttagatgcggttcaattatatcctaagtctatcgtggttgattatactgtggatggacaatacaaaaatgattgtcactatttcggtcaatcatcgatcaacattgccgattgggctcaaaacaataattattatcctaacctgatatatgcgattcaacagactcttgatttaatacattattactctgtagaaacgattttcgatttagctttattgacacttctgaaaggtgatttatcaatcgatggtcatgtcgtttttgattttaaagcccctatagcaacaagtgcttcaatatgggaaactattaaaactattgaagattttgatatgatgtctcagttttatttgaataaaatggcttatattgatcatcatcctataccttttcgcaacctttttatcgaggattcagaacaacttaattcgccagataattggttgtattctaccaagtttatgctacctaaatggttatataaaatagcaaagcaacgtgctgataacaaacaattacaaaacttcggcctgtatacgaagcaaccaaacgttttaaaagatcacatcgtttttatcggtgatcatcatcaatatataggtaattcaaaatatttatttacttacttcgttaaacataatccaatgactgcctgttattttgttactgacgatcgtcgcggaccacatttcatatcacctaagtctgaaaaagctgacgaattgattaacagcgcacgcgtagttatagttgaaaatgatatacctgaaacgttacaaccaaacggtactttaattcaattacatcaaggcacaccaataatgcaattatttttagatagtaaagagcctattaaaaatatagaaacacctttttatcgtgctaaaaggtataatcgctggttgcaattcgattatgttatacattctgctgatgatattagccacttttatcaaacggcttttcctagtcaccaagcaaatgtattggcttatggtaatcctaaacaccaatatttactacaaaagcgtaacgaaagtactactcaacaacagtataagaaatcgtttaaaataaatgatcaaaaaccagttttattatacgcacctattggattagtgagtgcgcaacaattaccactatcagatgctttattcaaagcctatcatgttgtggttcagggtgttgatgaagcgatcttaccagaagaggcgcttgttgcaccaaagtatcttagtgctcaagacttaattctaatgtctgatgtcgttatcactgattactcaaatataatatttgatgcgatggctatagacaaaacagtagcattatacactccaaatcacagtcaatacattgagtctcaaggtgttaacgaagatatttggcgtcatctatcaaaaatttggtatacagaccgacaattattaattaataatttaatttcccaggcaataccagtgattaaatatccacaaatacaacataaagaacaaccattagaatctatttcacaacttatattgtctaagatgacatctaatcaatag

SEQ ID NO: 415338 - DNA, 624 bp, Staphylococcus aureus; identical to SEQ ID NO: 415128

SEQ ID NO: 415339 - DNA, 1443 bp, Staphylococcus aureus; identical to SEQ ID NO: 415126

SEQ ID NO: 415340 - DNA, 1170 bp, Staphylococcus aureus
atgtacaaaacaaaaggtggctttcaacttacattacaaacattaagtttagtggttgggtttatggcttggagtataattgcgccattaatgccctttattaaacaagatgtcaatgttactgaaggtcaaatatcaatcattttagcgataccagttattttgggatcagtgctccgtgtgccatttggttatttaacaaatattgttggtgctaaatgggtattctttacaagttttatcgtattgttattcccgatatttttcttaagccaagcacaaacgccgggtatgttaatggcatcaggatttttccttggcgtaggtggcgcaattttctctgttggtgttacatcagttcctaaatatttcccaaaagaaaaagtaggtctagcaaatggtatttatggtatggggaatatcggtacagcagtttcttcatttttagcaccaccgatagcgggtattattggttggcaaacaacagttagaagttacttaattattatcgctttatttgcattaattatgttcatttttggtgacacacaagaacgtaaaattaaagtgccattaatggcccaaatgaaaacattatctaaaaactacaaattatattacttaagttattggtatttcattacttttggtgcttttgtagcatttggtattttcttacctaactacttagtaaatcattttggaattgacaaagtagatgctggtattcgttcaggtgtattcattgcgctggcaacattcttgagaccaataggtggtatactaggtgataaatttaatgcagttaaagtactgatgattgattttgttattatgattatcggtgccgttattttaggtatttcagaccatatcgcattattcactgtaggctgtttaacaataagtatttgtgcaggtattggtaacggcttaatttttaaattagtaccatcctacttctcaaatgaagcaggatcagcaaatggtatcgtatcaatgatgggtggtttaggaggattcttcccaccgttggtcatcacatacgtagctaatttaacaggttcaagccatttagcatttattttcttagcggtatttggatgcattgcattatttaccatgcgccatttatatcaaaaagaatatggttcattgaaacacagttga

SEQ ID NO: 415341 - DNA, 576 bp, Staphylococcus aureus; identical to SEQ ID NO: 415115

SEQ ID NO: 415342 - DNA, 315 bp, Staphylococcus aureus; identical to SEQ ID NO: 415111

SEQ ID NO: 415343 - DNA, 537 bp, Staphylococcus aureus; identical to SEQ ID NO: 410322

SEQ ID NO: 415344 - DNA, 183 bp, Staphylococcus aureus; identical to SEQ ID NO: 415108

SEQ ID NO: 415345 - DNA, 468 bp, Staphylococcus aureus; identical to SEQ ID NO: 414366

SEQ ID NO: 415346 - DNA, 1548 bp, Staphylococcus aureus; identical to SEQ ID NO: 414991

SEQ ID NO: 415347 - DNA, 267 bp, Staphylococcus aureus; identical to SEQ ID NO: 414968

SEQ ID NO: 415348 - DNA, 252 bp, Staphylococcus aureus; identical to SEQ ID NO: 404991

SEQ ID NO: 415349 - DNA, 363 bp, Staphylococcus aureus; identical to SEQ ID NO: 404989

SEQ ID NO: 415350 - DNA, 732 bp, Staphylococcus aureus; identical to SEQ ID NO: 415102

SEQ ID NO: 415351 - DNA, 780 bp, Staphylococcus aureus; identical to SEQ ID NO: 415100

SEQ ID NO: 415352 - DNA, 468 bp, Staphylococcus aureus; identical to SEQ ID NO: 415095

SEQ ID NO: 415353 - DNA, 1359 bp, Staphylococcus aureus
atgaattacacacaacaacttaaacaaaaagactcagaatatgtttggcatccatttacacaaatgggtgtatatagcaaagaagaagcaatcatcattgaaaaaggaaagggtagttacctttacgatacgaatggcaataaatatttagatggttatgcatcgttgtgggtcaatgtgcatggtcataataacaaatacttgaataaggtaattaaaaagcaactcaataaaattgcccattctacgctgctaggatcatcaaatattccgtcaatagaacttgcggaaaaattaatcgaaatcacgccaagtaatctaagaaaagtattttattctgatacaggcagtgcgtctgttgaaatcgcaataaagatggcatatcagtattggaaaaatattgatagagaaaaatatgccaagaaaaacaagtttataacgctaaatcacggttatcatggggatacgattggtgcggtaagtgttggtggtatcaagacctttcataaaatatttaaagacttaatatttgagaatattcaagtagaaagcccatctttctatcgcagtaattacgatactgaaaatgaaattatgacagctattttaacgaatatagagcaaattctaattgaaagaaatgatgaaatcgcagggtttatattggaaccgttgattcaaggtgcgacaggcttgtttgttcatcctaaaggctttttgaaagaagtcgagaaattgtgcaaaaaatacgatgtcttattaatttgtgatgaggtagcagttggttttgggagaactggaaagatgtttgcatgcaatcatgaagatgttcaaccggatattatgtgtttaggtaaggcgattactggtggctacttaccacttgcagctacattgacatctcaaaaaatatacaatacatttttaagtgattcgcatggtgttaatacctttttccatggtcatacatacaccggaaatcaaatcgtttgtacggttgcattagaaaatataagactttatgaaaaacgtaagttattgtcacctattgaaacgacatcatcaacacttgagaaacagttacatgcgctgaagcgtcatcgaaatgttggtgatgtaagaggacgaggcttaatgtttggagttgaattagttacagataaagatagtaaaacgccgttagaaattgaaaaagttgaacgtattgtacgtaaatgtaaagaaaacgggctaatgattagaaatttagaaaatgtcattacgtttgtgccagtgttaagtatgtcaaataaagaagtgaaaacgatggtacgtatttttaaaaaggcagtacataacattttagataggaagtgttaa

SEQ ID NO: 415354 - DNA, 387 bp, Staphylococcus aureus; identical to SEQ ID NO: 415089

SEQ ID NO: 415355 - DNA, 660 bp, Staphylococcus aureus; identical to SEQ ID NO: 404967

SEQ ID NO: 415356 - DNA, 1830 bp, Staphylococcus aureus; identical to SEQ ID NO: 415082

SEQ ID NO: 415357 - DNA, 1497 bp, Staphylococcus aureus; identical to SEQ ID NO: 415081

SEQ ID NO: 415358 - DNA, 636 bp, Staphylococcus aureus; identical to SEQ ID NO: 415078

SEQ ID NO: 415359 - DNA, 267 bp, Staphylococcus aureus
atgagcaattacacggttaagattaaaaattcagcgaaatcagatttaaggaaaataaaacattcttatttaaagaagtcatttttagaaattgttgagactttaaaaaatgatccgtataaaataacacaatcttttgaaaaattagagcctaaatatttagagcgatattcaagaagaattaaccatcagcacagggtcgtctataccgtagatgatcgaaataaagaagtattaatactatcggcatggtcacattatgattaa

SEQ ID NO: 415360 - DNA, 936 bp, Staphylococcus aureus; identical to SEQ ID NO: 408543

SEQ ID NO: 415361 - DNA, 819 bp, Staphylococcus aureus; identical to SEQ ID NO: 408545

SEQ ID NO: 415362 - DNA, 180 bp, Staphylococcus aureus; identical to SEQ ID NO: 408994

SEQ ID NO: 415363 - DNA, 1176 bp, Staphylococcus aureus
atggttactcaaaataaaaagatattgattattactggctcattcggtaacggtcatatgcaagttacacagagtatcgttaatcaacttaatgatatgaatctagaccatttaagcgtcattgagcacgatttatttatggaagctcatccaattttgacttctatttgtaaaaaatggtatatcaatagctttaaatattttagaaatatgtacaaagggttttattacagccgcccagataaactagacaaatgtttttacaaatactatggacttaataagttaattaatttattgataaaagaaaagccagatttaatattattaacgtttcctacaccagttatgtcggtactaactgagcaatttaacattaatattccagttgctacagtgatgacagactatcgcttacataaaaactggattacgccgtattcaacaagatattatgtggcaacaaaagaaacgaaacaagacttcatagacgtaggtattgatccttcaacagttaaagtgacaggtattcctattgataacaaatttgaaacgcctattaatcaaaagcagtggttaatagacaacaacttagatccagataagcaaactattttaatgtcagctggtgcatttggtgtatctaaaggttttgacacgatgattactgatatattagcgaaaagtgcaaatgcacaagtagttatgatttgtggtaagagcaaagagctaaagcgttctttaatagctaagtttaaatctaacgagaatgtattgattctaggttataccaaacacatgaatgaatggatggcatcaagtcaacttatgattacgaaacctggtggtatcacaataactgaaggtttcgcccgttgtattccaatgattttcctaaatcctgcacctggtcaagagcttgaaaatgccctttactttgaagaaaaaggttttggtaaaatcgctgatactccagaagaagcaataaaaattgtagcaagtttaacgaacggtaatgagcaattaactaacatgattagtacaatggaacaagataaaattaagtatgctacacagacaatatgtcgagacttacttgatttaatcggtcattcatcacaaccacaagagatttatggaaaggttcctttatatgcaagattcttcgttaaataa

SEQ ID NO: 415364 - DNA, 264 bp, Staphylococcus aureus
atgacccaaataggactaactgcaataccgagcatcatagcactaaatatgattacaaaaggtgatgctggaaaccaaataactaaaaataaacttgtaaatgctaaaataaatccagtcgttaaaacgatttttgtgccgaattttttcagtaaaaatcctataacaaagtttgtagatgcatcagcaataaaatgtattgaaaatgctagagacgttattgctacagcaatggatgtaactgttggcaagaaattaatatag

SEQ ID NO: 415365 - DNA, 2580 bp, Staphylococcus aureus
atgagagataagaaaggaccggtaaataaaagagtagattttctatcaaataaattgaataaatattcaataagaaaatttacagttggaacagcatctattttaattggctcactaatgtatttgggaactcaacaagaagcagaagcagctgaaaacaatattgagaatccaactacattaaaagataatgtccaatcaaaagaagtgaagattgaagaagtaacaaacaaagacactgcaccacaaggtgtagaagctaaatctgaagtaacttcaaacaaagacacaatcgaacatgaagcatcagtaaaagctgaagatatatcaaaaaaggaggatacaccaaaagaagtagctaatgttgctgaagttcagccgaaatcgtcagtcactcataacgcagaggcacctaaggttagaaaagctcgttctgttgatgaaggctcttttgatattacaagagattctaaaaatgtagttgaatctaccccaattacaattcaaggtaaagaacattttgaaggttacggaagtgttgatatacaaaaaaacccaacagatttaggggtatcagaggtaaccaggtttaatgttggtaatgaaagtaatggtttgataggagctttacaattaaaaaataaaatagattttagtaaggatttcaattttaaagttagagtggcaaataaccatcaatcaaataccacaggtgctgatggttgggggttcttatttagtaaaggaaatgcagaagaatatttaactaatggtggaatccttggggataaaggtctggtaaattcaggcggatttaaaattgatactggatacatttatacaagttccatggacaaaactgaaaagcaagctggacaaggttatagaggatacggagcttttgtgaaaaatgacagttctggtaattcacaaatggttggagaaaatattgataaatcaaaaactaattttttaaactatgcggacaattcaactaatacatcagatggaaagtttcatgggcaacgtttaaatgatgtcatcttaacttatgttgcttcaactggtaaaatgagagcagaatatgctggtaaaacttgggagacttcaataacagatttaggtttatctaaaaatcaggcatataatttcttaattacatctagtcaaagatggggccttaatcaagggataaatgcaaatggctggatgagaactgacttgaaaggttcagagtttacttttacaccagaagcgccaaaaacaataacagaattagaaaaaaaagttgaagagattccattcaagaaagaacgtaaatttaatcctgatttagcaccagggacagaaaaagtaacaagagaaggacaaaaaggtgagaagacaataacgacaccgacactaaaaaatccattaactggagaaattattagtaaaggtgaatcgaaagaagaaatcacaaaagatccgattaatgaattaacagaatacggaccagaaacgataacaccaggtcatcgagacgaatttgatccgaagttaccaacaggagagaaagaggaagttccaggtaaaccaggaattaagaatccagaaacaggagatgtagttagaccaccggtcgatagtgtaacaaaatatggacctgtaaaaggagactcgattgtagaaaaagaagaaattccattcgagaaagaacgtaaatttaatcctgatttagcaccaggaacagaaaaagtaacaagagaaggacaaaaaggtgagaagacaataacgacaccaacactaaaaaatccattaactggagaaattattagtaaaggtgaatcgaaagaagaaatcacaaaagatccgattaatgaattaacagaattcggtggcgagaaaataccgcaaggtcataaagatatctttgatccaaacttaccaacagatcaaacggaaaaagtaccaggtaaaccaggaatcaagaatccagacacaggaaaagtgatcgaagagccagtggatgatgtgattaaacacggaccaaaaacgggtacaccagaaacaaaaacagtagagataccgtttgaaacaaaacgtgagtttaatccaaaattacaacctggtgaagagcgagtgaaacaagaaggacaaccaggaagtaagacaatcacaacaccaatcacagtgaacccattaacaggtgaaaaagttggcgagggtcaaccaacagaagagatcacaaaacaaccagtagataagattgtagagttcggtggagagaaaccaaaagatccaaaaggacctgaaaacccagagaagccgagcagaccaactcatccaagtggcccagtaaatcctaacaatccaggattatcgaaagacagagcaaaaccaaatggcccagttcattcaatggataaaaatgataaagttaaaaaatctaaaattgctaaagaatcagtagctaatcaagagaaaaaacgagcagaattaccaaaaacaggtttagaaagcacgcaaaaaggtttgatctttagtagtataattggaattgctggattaatgttattggctcgtagaagaaagaattaa

SEQ ID NO: 415366 - DNA, 381 bp, Staphylococcus aureus
ttgaaaatgattggtcattatataggtatgagcttccaaatcattgatgatgtattagacttcacaagtaccgaaaagaaattaggtaagccggtcggaagtgatttgcttaatggtcatattacgttaccgattttattagaaatgcgtaaaaatccagacttcaaattgaaaatcgaacagttacgtcgtgatagtgaacgcaaagaatttgaagaatgtatccaaatcattagaaaatctgacagcatcgatgaggctaaggcagtaagttcgaagtatttaagtaaagctttgaatttgatttctgagttaccagatggacatccgaaatcactacttttaagtttgacgaaaaaaatggggtcaagaaacacatag

SEQ ID NO: 415367 - DNA, 744 bp, Staphylococcus aureus
gtggattacacatcaccgagtggcagcctataccgagcagttaatgatattaacttggctattagaaaaggcgaaacattaggcattgtcggtgaatcagggtcagggaaatcgacattagctaagacggtcgtcggtctaaaggaagtgtcagaaggctttatttggtataacgaattaccattaagtttatttaaagatgatgaattgaaatctttacgacaagagatacaaatgatttttcaagatccattcgcatctattaatccaagatttaaagtcattgatgtgattaaacgaccactaatcattcatgggaaagtcaaagataatgatgacattattaaaactgtcgtatcgttgttagaaaaggttggcctagatcaaagtttcttatatcgctatccacacgaattatctggtgggcaacgtcagcgtgtaagtatcgcgagagcacttgctgtagaacctaaagtgattgtttgcgacgaggcagtgtccgctttagacgtttcaattcaaaaagatatcatcgagttattaaaacaattacagttagacttcggcatcacttatttattcatcacacatgacatgggtgttatcaatgaaatatgtgatcgcgttgcagttatgaaaaatggcgaaatcgttgaactgaataacacagaagatattatcaaacatccgcaatcagactatgcaaagcaacttatttcagaagtagcagttattgctaaataa

SEQ ID NO: 415368 - DNA, 249 bp, Staphylococcus aureus
atgttacctacaacaccaaatgcgtacattaaagtatccattgatgctgctaaaactgcgtgtaaaacaaataagtatggtgcgatgaataagaatgtaaattctaatggctcagtaatacctacaacgactgctgttaatgttgcaggaataagtaatgctgctacttttttacgattttctttaggtgtcgtagcatacattgctaaagcaatacctaaacatccaaatactttcccatttccttga

SEQ ID NO: 415369 - DNA, 2190 bp, Staphylococcus aureus
atgtctaaatttatcgaaccaagcgttgaagaaattaaacttgaaaaagtatatcaagatatgggattaagtgatcaagaatatgaaaaagtttgcgatattttaggcagacaacctaactttacagaaacaggtatcttttctgttatgtggagtgaacattgctcttataaacattctaaaccgtttttaaagcaatttcctacgtcaggtgagcatgtgcttatgggtccaggtgaaggtgcaggggtagtcgatataggtgataatcaagccgtagtatttaaagtagagtctcacaatcatccatcagcaattgaaccatatcaaggggctgctacaggcgttggtggaatcattcgtgacattgtttctattggggctagacctattaatttgttaaacagtcttagatttggagaattagataataaacaaaaccaaagattacttaaaggggttgtaaagggtatcggaggttatggtaactgcattggtattccaacaactgctggtgaaatcgaatttgatgaacgttatgatggcaatccacttgttaatgcaatgtgtgttggtgttatcaatcacgacatgattcaaaaaggcacagcaaaaggtgtaggtaattcggtcatttatgttggtttgaaaactggtcgagatggtattcatggtgctacttttgcatctgaagaattgacggaagaaagcgaaagtaaacgaccttctgtacaaatcggtgatccatttgtaggtaaaaaattaatggaagcaacacttgaagcaattacatttgatgaattagttggtattcaagatatgggtgctgctggtttaacatcttcatcgtctgaaatggcggcaaaaggtggtagtgggttacatttgagattagaacaagtgccaacacgtgagccaggtatttctccttatgaaatgatgctttcagaaactcaagaacgtatgttactagttgttgaaaaaggtaatgaacaaaaattcttagatttatttgataagcacgaattggatagtgctgttataggtgaagttacagatacaaatcgttttgttttaacatatgatgatgaagtttatgctgacattccagttgaaccactagctgatgaagcacctgtatatattttagaaggagaagaaaaagattataatacttctaaaaatgattatacacacatcgatgttaaagatactttctttaaattacttaagcatccgactatagcatctaaacactatttatatgatcaatacgaccaacaagttggtgccaatacgataattaagccaggacttcaagcatcggtagtacgtgtggaaggcacaaataaggcaattgcttcaacaattgatggtgaagcgcgttatgtatataacaatccatatgaaggtggaaagatggtagtagctgaagcttatcgaaatttaattgccgtgggtgcaacaccattagcaatgacagattgtttaaattatggttctcctgaaaagaaagaaatctatcaacagttgatagattcaacgaaaggtatggcagaagcatgcgacattcttaagacaccagtagtttctggaaatgtatctttatataacgaaacgaaaggtacttctattttcccaacaccagttgttggaatggtaggtttgattgaaaatgtaaattatttaaatgattttgaacctcaagttggagataaattatatttaatcggtgatactaaggacgactttggtggtagtcaacttgaaaagttaatttatggcaaagttaatcatgaatttgagtcattagatttgagttcagaagttgaaaaaggtgaatcaatcaagaccgctattcgtgaaggactattatcacatgttcaaacagttggtaaaggtggcttactgattaccttagctaaactaagtgcgcattacggtttaggattaaaatcttcaatagatataacaaatgcacaattgtttagtgagacacaaggccgatatgttgtttctgttaaatcaggtaaaactttaaatattgataatgcaatagaaattggacttttaacagatagtgataatttcaaagtaacaacaccatatacagagattagtgaaaatgtttcagatattaaacaaatatgggaaggggcaattgctcaatgtttaactactcaggattaa

SEQ ID NO: 415370 - DNA, 1095 bp, Staphylococcus aureus
gtgattggcggcttaatctttgctattttagttgcggctttggattcatttggcatggttaagattaaattagatgcttcattcattcaagatttcttcatgttagcattctttacgacaatcggtcttggtgcatcattgaaattatttaaattaggtggcaaagtcttgctattatactttatgttttgtgctatcatttcagtcattcaaaacatagttggtgtatcactagcaaaagtattaaatattaaaccgttactaggattaacagcaggttccatgtctatggaaggcggtcatggtaatgctgctgcttatggtaagacaattcaagatttaggtattgattcggcactgacagcggctcttgcagctgcaactttaggtcttgtatttggagggcttatcggtggtccagttgtaaaatatttaatcaaacgttataacttaaagcctcaacatagtgacgatacatttaaagattatagccaagtagcatataacgaacatttacatagtaaatttaatgccactgaagtattcttcattcaatttacaatcgttgtattctgtatggcagttggaagttatttcagtcatttgtttacagctcaaacagggattaatgttccaatttacgttggctcattatttgtagctgttatcgtccgaaatatctctgaaagttttaattttaatattgtagatttaaaaattactaatcaaattggcgatgtcgcattaggtattttcttatctcttgcgctaatgagcattcaattaatcgaaatttataaacttgctatacctcttattattatcgttttagttcaagttgtcgttatgattttatttgctgttttaattttatttagaggtttaggaaaagattatgatgctgcagtaatggtaggtggttttatcgggcatgggcttggtgcaacgccaaatgccatggcaaatttagatgttattactaaaaaatatggaaactcacctaaagcatatttagttgtacctattgttggtgcattcttaatcgatttaattggtgttatagtcattatgggattcattcaatggtttagttaa

SEQ ID NO: 415371 - DNA, 402 bp, Staphylococcus aureus
gtgattttagaaattgctaagatgaaacaaattgtaagaactggtaaccacaactctttaaatgtaacgccgaataatctaacagcatctttaaagttaacctttttagacattaaaattgtaataataatagttaataaaatagctgtacctgtttgtccaataatatttaaagtcaatactaatggtttatgcgtaacttcgctgattgttccaggtaagttgaatttaaatactaatgatgataaagcaccatttggtaagaataagtttttaaagaatggcgcactccaaatcattacaatgactgttaatacaatgaatgggctccatgcatgtaatactgcttttgcagaatgtgcttttgcaggttcaatttcttcatctttattaacacgataa

SEQ ID NO: 415372 - DNA, 471 bp, Staphylococcus aureus
gtgttattaaaaatcgctgccatgacccataatccaataaatgttactgtgaaagcgatgaatactcgagaaaagagccatggcttcccccattcttctgatatgtcacaaattgctggcgtagttttagcagtacccgctataaatatttcatctgcttcgtttttagtatgcggcttaaatacttcagaaaacatatcttttaaattaagatttaagctttcatcattgccggctagtctaccgattgatttggttgcattatcaaataaacttcttgcttcggtttttaaatctgcattttgcgctgtttcatgcgctttggcttccatttgtttattgatagattcattatgtatgtcggacgtcttagttgattgtgtacttgctgatgacatcccctcttcacctgtattaggtgcaactgattgcgtttgtgttgtctcttctttttctgtatttcttcgatga

SEQ ID NO: 415373 - DNA, 1035 bp, Staphylococcus aureus; identical to SEQ ID NO: 415117

SEQ ID NO: 415374 - DNA, 654 bp, Staphylococcus aureus; identical to SEQ ID NO: 405008

SEQ ID NO: 415375 - DNA, 915 bp, Staphylococcus aureus; identical to SEQ ID NO: 415120

SEQ ID NO: 415376 - DNA, 423 bp, Staphylococcus aureus; identical to SEQ ID NO: 415121

SEQ ID NO: 415377 - DNA, 447 bp, Staphylococcus aureus; identical to SEQ ID NO: 415122

SEQ ID NO: 415378 - DNA, 366 bp, Staphylococcus aureus; identical to SEQ ID NO: 415123

SEQ ID NO: 415379 - DNA, 348 bp, Staphylococcus aureus
atgggtcaaggtatagctaaagcaggtaatgtcttcccagttctatcaccaatcttaggttggataggtgtgtttatgacaggatcagttgtaaataacaattcattatttgcaccaattcaagcttctgttgcacaacaaattggaacaagtggttcacttcttgtatctgctaatacagttggtggtgtagcggcaaaattgatttcaccacaatcaattgcaattgcaactgcagcagtaaaacaagttggtaaggaatcagaattattaaaaatgacattgaaatacagtgtatgtttactaatattcatctgtatttggactttcatcttgtcattattataa

SEQ ID NO: 415380 - DNA, 477 bp, Staphylococcus aureus
atggcaatgtactatgacaaaggttcttcaagtcaaaaagaacaagcagaatacttacaagcagaatttaagaaaatgggtattaagttaaacatcaatggcgaaacatcagataaaattgctgaacgtcgtacttctggtgattatgacttaatgttcaaccaaacttggggattattgtacgatccacaaagtactattgcagcatttaaagcgaaaaatggttatgaaagtgcaacatcaggcattgagaacaaagataaaatatacaacagcattgatgacgcatttaaaatccaaaacggtaaagagcgttcagacgcttataaaaacattttgaaacaaattgatgatgaaggtatctttatccctatttcacacggtagtatgacagttgttgcgccgaaagatttagaaaaagtatcattcacacaatcacagtatgaattaccattcaatgaaatgcagtataaataa

SEQ ID NO: 415381 - DNA, 984 bp, Staphylococcus aureus
atgaaaattagagtcgtcattccttgttttaatgaaggggaagtcattacacaaacacatcaacaattaactgaaatactttcacaagatagtagtgtgaaaggctatgattataatatgcttttcatagatgatggaagtacggataccactatagatgaaatgcaacatcttgccacaatagataggcatgtcagctttatttcttttagtagaaattttggaaaagaagcagctatgattgcaggttaccagcatagtactgaatttgatgcagtcatcatgatagattgtgatttgcaacatccacctgaatatattccgaaaatggttgaaggttttatggaaggctatgatcaagtgattgcaaagcgtgatagaagtggtgaaaattttagtcgcaaaacattaagccatttgtattataagttagttaattgctttgtagaagaagtacaatttgatgatggtgttggtgattttagacttttaagccaaagagctgttaaatccattgcatcacttgaagaatataatcgattttcaaaagggttatttgaatggataggctataatactaaagtgtttacgtatcaaaatgttgagagacaaaaaggggaatctaagtggtcctttaaaaagttatttaattatggtattgatggattgatttcctttaatagtaaacctttgagaatgatgatttatcttggcttgtttatcttttcaataagcgtgctatatattatctatttattcatcaatattatgatatctggtgttaatattccaggatatttttcaacgattgcagctattttattattaggcggcatacagttaatttcaattggtgttgtaggtgaatatattggcaggatatattatgaagttaaggcacgtcctaaatatattattcaagctacaaatctttcaagtattgaaaatgatgagaaggatacccataaagtttattctaaataa

SEQ ID NO: 415382 - DNA, 1194 bp, Staphylococcus aureus; identical to SEQ ID NO: 413292

SEQ ID NO: 415383 - DNA, 768 bp, Staphylococcus aureus
ttgaaacgtgttgatatgattgcttgtgaagacactagagtaactagtaagctgtgtaatcattatgatattccaactccattaaagtcatatcacgaacataacaaggataagcagactgcttttatcattgaacagttagaattaggtcttgacgttgcgctcgtatctgatgctggattgcccttaattagtgatcctggatacgaattagtagtggcagccagagaagctaatattaaagtagagactgtgcctggacctaatgctgggctgacggctttgatggctagtggattaccttcatatgtatatacatttttaggatttttgccacgaaaagagaaagaaaaaagtgctgtattagagcaacgtatgcatgaaaatagcacattaattatatacgaatcaccgcatcgtgtgacagatacattaaaaacaattgcaaagatagatgcaacacgacaagtatcactagggcgtgaattaactaagaagttcgaacaaattgtaactgatgatgtaacacaattacaagcattgattcagcaaggcgatgtaccattgaaaggcgaattcgttatcttaattgaaggtgctaaagcgaacaatgagatatcgtggtttgatgatttatctatcaatgagcatgttgatcattatattcaaacttcacagatgaaaccaaaacaagctattaaaaaagttgctgaagaacgacaacttaaaacgaatgaagtatataatatttatcatcaaataagttaa

SEQ ID NO: 415384 - DNA, 750 bp, Staphylococcus aureus; identical to SEQ ID NO: 408064

SEQ ID NO: 415385 - DNA, 1530 bp, Staphylococcus aureus; identical to SEQ ID NO: 413355

SEQ ID NO: 415386 - DNA, 1065 bp, Staphylococcus aureus; identical to SEQ ID NO: 409284

SEQ ID NO: 415387 - DNA, 1524 bp, Staphylococcus aureus
atgtctaaaaagttaaaaattataattcctattattattgtcttattattaataggtggaatcgcatggggagtttatgcattttttgcaaacacaccgaaaaatacatacttaaaaagcgaacaacaaactgcaaaaatgtataaagattattttaatgaccgttttgaaaatgaagtgaagttccaagaaaagatgaaagataattcgtttttatcttcattagaattaagcgcagatgcatcagatgaaattgttaaggggcttggtattcctaaatctgttgttaatgcttcgaaaattaaaatgtcatatggacatgatcctaaaaaagagaaatcaatgattaatcttgaaccaacaatcgcagactctgcattagggaaattccagttagctgcagataaagataagcattatttcgaatcaccattatttaaagggaaatatagtgttaataattctgatttattatcaacgtattcaaaacttacaggtgaagatgaagaaacagcaaaagaaaatggtattacaaaccaacaactaaatttaaatactctttttagtaatgctcaagcacaacaaagtgactacagcaaaattgccgaaaaatattccgaacttattgtcgacaaattagatgacgataattttgataaaggtaaaaaagaagaaattaaggttaatggtgaaaagtacaaagttagacctgtcacgttaacacttagcagagctgacactaaaaaaattacattagctgtattagaagaagctaaaaaggataaagaccttaaaaaattaatggaagaacaaggtgctacaaaagactatgataaggacatcaaaaaagcaattgacgatgtcaaagaaactaaaaaggatgaatttgctaaaattcaatctaaaatttataccgaaaaacatacgattgtaaaacgagaaattactattacagacaaagaaaataataaaactaaaatcaaaggtactaatactttagaagacgataagttaaaactagattacgcacttgatttcgatcaagataaatacacgtatgctgaagcgaaatatacaattaaaggcgtatcttctaaggaaaaagacaataaatacagcgataaatacgaatttggtaaaaagacagaatatgatgaatcaaaaatcaaattagataaccaagaaaaagtagatggcacaaaacgtcaagataaaggtaaaatcactgtcgcattagataaatatagcgacgaaaatgaattcacttttgaaaataatatagattctgacgtaaaaaataacactcagaaatctacgttaaatatcggcatcaaatatgctgaagaaccaattaatttcattttaaaatctagcacaaaattgaaagcagatattgattttgatgatagtggtgcgaaagatttcaatagtctatcttcaaaagaccgtgaaaaacttgaaaaagaaatcgaaaaaaatggcggcaaaatgtttgaatcaattttaaaaaaggcatctaaataa

SEQ ID NO: 415388 - DNA, 300 bp, Staphylococcus aureus
atgggtccttatatcgttactaaagacgaactaccattacctgaaaatgtaaatattgttacaaaagttaacaatgaaattagacaagatggtaacactggcgaaatgattcttaaaattgatgaattaatagaagaaatttcaaaatatgttgcactacatccgggagatattattgcaactggtacaccagcaggcgttggtgcaggtatgcaaccacctaaatttttacaaccaggtgatgaagttaaagtgactattgataatattggaacgctgacaacttatatcgctaaataa

SEQ ID NO: 415389 - DNA, 201 bp, Staphylococcus aureus
atgaaaggcgtttcaagacatgtttttgtgcgtattgtacaggcgataattatgaaacacttagtatattgttttaaattagataatgatgaatttaatttgaaaaataagtataaaaaatacaagccttgtgtgacaagggtttatgatgacttgaatacaatttataggtatatttcaaataataaaattatcaattaa

SEQ ID NO: 415390 - DNA, 762 bp, Staphylococcus aureus; identical to SEQ ID NO: 405471

SEQ ID NO: 415391 - DNA, 210 bp, Staphylococcus aureus
atgaataatgatgcgataataggaattgttgcaaatgatgatccaatacctaaagtgacaattaaacctatcacatacatcatgataatgctaaataatttattatcaccagtaatacttgttaaagttttaactaattcatctatatcaccagtagcattcattacaccagcaaacccatttgctgttaaaataactacaccaatataa

SEQ ID NO: 415392 - DNA, 534 bp, Staphylococcus aureus
ttgtcatctattattattgatgctaagaccggcgtgtcaggtgctggtcgttcattatcacaacgtgttcatttttcagaaatgaatgaaaatctaagtgcttatgcaatcggaaaccataaacacaaaccggaaatcgagcaatatttatctatcattgcgggtcaagatgtatcagtcatatttacaccacatctcgtaccaatgacacgaggtattttatcaacaatttatgtcaaattttcatctgaatatacgactgaatcattacataaattaatgacctcttattatgctaatcagccatttgtcagaattagagatattgggacttttccaaccacaaaagaagtactcggtagtaactactgcgatatcggtatctatgtagatgaaacaacacaaacagcaattttagtatcagtgattgataaccttgtcaaaggcgcaagtggtcaagccattcaaaatttaaatatattatatgattttgaagtaacgactggcctaaatcaatcaccagtttatccataa

SEQ ID NO: 415393 - DNA, 387 bp, Staphylococcus aureus; identical to SEQ ID NO: 405954

SEQ ID NO: 415394 - DNA, 345 bp, Staphylococcus aureus; identical to SEQ ID NO: 405115

SEQ ID NO: 415395 - DNA, 630 bp, Staphylococcus aureus; identical to SEQ ID NO: 409282

SEQ ID NO: 415396 - DNA, 171 bp, Staphylococcus aureus; identical to SEQ ID NO: 407281

SEQ ID NO: 415397 - DNA, 615 bp, Staphylococcus aureus
gtgaaattagataaaaacaacttcccggattatgaatattcaagacacgatcaacaaatttatgtaaatggtaaacagtataaagttatttttaacggagttataaaccctaaacaaaaaggtaataaagtttcttttgaactaaaattcgaaactacagaattaccatacggtgaaagtattggaacaagcctagagttagaagaaaacaaaaaggttggattgtggtcgtttgattttaatattgattggcatgcaggcggagacaaaagaaagtatacatttgaaaatttgagcaaaggtacagtttactatcatggtagtgctcctaacgaccaattcaacatgtataaaaagataacaattattttaggcgaagatacagaatcgtttgtatggaatttaacgcatgctgaaataatgaaaatcgaagggatcaaactaaaagctggagacagaattgtttatgatagcttccgagtttataaaaacggtgttgaaataagtaccgaaacgaatatagcccaaccaaaatttaaatacggagctaataaatttgagtttaatcaaacggtacaaaaagttcagtttgatttgaaattttattataagtag

SEQ ID NO: 415398 - DNA, 270 bp, Staphylococcus aureus; identical to SEQ ID NO: 411630

SEQ ID NO: 415399 - DNA, 279 bp, Staphylococcus aureus
atggaaggtttctctttagcgctacttgaatctttagcacatggtgttccagttattagttatgatattaaatatggacctaacgaattgattacgcctgatttcaatggttatttaattactaaaaatgatgaagatgccctatttgataaagtaaaatatgtgattgatcatcctgaagtacaacaacgactgtcaaaaggtagtttggcaaaagcgcaacaatatagtaaagcgtcgttaattaaacaatgggaccaatttgttcgtcttatataa

SEQ ID NO: 415400 - DNA, 459 bp, Staphylococcus aureus
atgtatacatggggtatctggcaaagccagacaattcaaagcttcaacaatatttttatgtggggtcataaaaagcttaagtgtcacacttttgtgacacaatatattgcggttgtcacagttttgagacactacatacagcatttgtcacaaaagcgtgacactacagctttttatgatatcactttaaaattacttaaaacccttagaatgtctggctttgccagataccccatgtatacatggggtatctggcaaagccagacaattcaaagcttcaacaatatttttatgtggggtcataaaaagcttaagtgtcacacttttgtgacactacatacagcatttgtcacaaaaataagacagtacttttttacaaaaaaatcaataaaaaagacatcagtcatcactaatgtcttaaataataattttgcttttcgaaattccaaattgctgtaa

SEQ ID NO: 415401 - DNA, 450 bp, Staphylococcus aureus
gtgaagctactagttgagttaaagccacatggtaaagaaccagcagattatacacaacgtgttattgatattttgaaaaagcatggtgttgaacatcaatatcgtgtgatgtctttggattatgatgtgatgactaagttgaaaaaagaagcgccatatctcaagtgtggttatatcattccgttgcagtttggtcattttaaagaaacatcattagatttctttgtcatcgaagatttttcttattcgccaagacttgttaatcaagcgcacttggaaaataaagaagtctatacttggactattaacggcgaagaagatttaacgaaatacttacaaaccaatgttgatggtattatcacagatgacccagcattagctgatcagattaaagaagaaaagaaagacgaaacatacttcgatcgttctataagaattttgtttgaataa

SEQ ID NO: 415402 - DNA, 219 bp, Staphylococcus aureus
atgacgacagccgcattgttaggtattgattcatgtccgatggaaggttttagtctggatacagtgacagacattttagcaaataaaggtatcttagatactgagcaatttggtttatcagtgatggttgcatttggctacagacaacaagatccaccgaaaaataaaacacgccaagcatatgaagatgttattgaatgggttggaccaaaagaataa

SEQ ID NO: 415403 - DNA, 429 bp, Staphylococcus aureus
atgagcaatatgaatcaaacaattatggatgcatttcatttcagacatgcgactaagcaattcgatccacaaaagaaagtttcgaaagaagattttgaaacaatattagagtcaggtagattgtctccaagttctcttgggttagaaccttggaagtttgtcgtgattcaagatcaagcgttacgtgatgaattaaaagcgcacagttggggcgcagcaaaacaattagatacagcgagccattttgtgctaatttttgcgcgtaaaaatgtaacgtcaagatcaccgtatgtacaacatatgttaagagatattaaaaaatatgaggcacaaacgatcccagctgttgaacaaaaattcgatgcattccaagcagatttccatatttctgataatgatcaagccttgtatgactggtcaagtaaataa

SEQ ID NO: 415404 - DNA, 942 bp, Staphylococcus aureus
atgaccaacaaagttgttattttaggttcaacgaatgtcgatcaatttttaacagttgaaagatatgcacaaccaggcgaaacattacatgttgaagaagcacaaaaagcattcggcggaggtaaaggtgccaaccaggctattgccactgcacgcatgcaagcagacacaacatttattactaaaattggcactgatggcgttgctgatttcatcttagaagattttaaagcggctcatattgatacatcatatattatcaaaacaactgaagcaaaaacgggccaagcctttatcactgtgaatgcagaaggacaaaacaccatctatgtttatggtggtgcgaatatgacgatgacacctgaagatgttattaacgcaaaagacgctataatcaatgcagactttgtcgttgcacaattagaagtacccatcccggctattatatctgcatttgaaattgccaaggcacatggtgtgacgacagtattaaatcctgcaccagcgaaagcattacctaatgaattattatcattaatcgatattattgtgccaaacgaaacagaagccgaattgttatctgggattaaagtaactaatgaacaatctatgaaagacaatgccaattactttttatctttaggcattaagactgttttgattacgctaggtaagcaaggtacatattttgctactaaaaatcaaagccaacacatcgaagcttataaagtaaatgcgattgatacaactgctgcaggcgacacatttattggtgcatttgtcagtcgcttaaacaagtcgcaagataacttagcagatgctattgattttggtaataaagcgagctcactcactgtacaaaaacacggcgcgcaagcatctattcctctactagaaagaagtaaatcaagtttaaatgaatcaaacacagctatgatatga

SEQ ID NO: 415405 - DNA, 438 bp, Staphylococcus aureus
ttgcagtattcattttcggaagcgggtcaagctaaagggtatagacgtttaacaattaatgatggcattattaacgatgtatttattcctcttaagccacttagacaattggaaattatctcaggcgaatataatgatgttattaatgaaaaagttcatgtgaaaaataaagataattatttacattttaaacttaaaaatatgtctcatattactgatccaatgatgagtttaaaacaaatttatcctaatactttagcgctgacgaatgaaacttttaattataatgaagaaaataatgctatagaaataagtgaaaaagatgacatgtcaattatcgaaatgttttataaacatataactgataaagaattatcggatatccaatctaaaaagataaaaaatattttagaaaacgaattgagaaaggaggattaa

SEQ ID NO: 415406 - DNA, 417 bp, Staphylococcus aureus
atgatgccgaaatttagagcgtgggataaattaggtaaggaaatgcacaaagtaagtgctattgattttagtagcaaaggtgcaagaattattcgtttagctggagtacagtctaacggtaaggaaaatcataaaagatggcattcatctgttgaactcatgcaatctacaggagttaaagatgtgaatggtgtggagatattcgaaggcgatatagtgaaagttaatgtgctagaaggaattggaccgaatgcaagaattgtttttaaaaacggtatgtttggcgttgaagatgacatgcatggatacggttacgacaaagggctttattctctaaacctcatcattaatagacacgaggtagaagttaaaggcaacatatttgaatcatctcatttattggaggtaacagaatga

SEQ ID NO: 415407 - DNA, 624 bp, Staphylococcus aureus; identical to SEQ ID NO: 414957

SEQ ID NO: 415408 - DNA, 405 bp, Staphylococcus aureus; identical to SEQ ID NO: 412636

SEQ ID NO: 415409 - DNA, 1077 bp, Staphylococcus aureus; identical to SEQ ID NO: 414886

SEQ ID NO: 415410 - DNA, 684 bp, Staphylococcus aureus; identical to SEQ ID NO: 408156

SEQ ID NO: 415411 - DNA, 663 bp, Staphylococcus aureus; identical to SEQ ID NO: 414888

SEQ ID NO: 415412 - DNA, 618 bp, Staphylococcus aureus; identical to SEQ ID NO: 414889

SEQ ID NO: 415413 - DNA, 471 bp, Staphylococcus aureus; identical to SEQ ID NO: 406704

SEQ ID NO: 415414 - DNA, 870 bp, Staphylococcus aureus; identical to SEQ ID NO: 414891

SEQ ID NO: 415415 - DNA, 567 bp, Staphylococcus aureus; identical to SEQ ID NO: 406702

SEQ ID NO: 415416 - DNA, 225 bp, Staphylococcus aureus
atgattcataaatttaaaattaattcacaaggattaacatcagatacatggaacttaaaatataaacaattaaaaaatataaatatagatatacctgtattggaggaacaagaaaagataggtgatttctttaaaaaaatggatatattgataagtaaacagaaaatgaaaattgaaatattagaaaaagagaaacaatcctttttacaaaaaatgttcttataa

SEQ ID NO: 415417 - DNA, 762 bp, Staphylococcus aureus
atggcttatatttcattaaactatcattcaccaacaattggtatgcatcaaaatttgacagtcattttaccggaagatcaaagcttctttaataacgatataactgctaaaccattaaaaactttaatgttgttacatggattatcaagtgatgaaacgacatatatgagatatacaagcatagaaaggtatgcgaatgaacacaaattagctgtgattatgcccaatgtggatcatagcgcatatgctaacatggcatatggtcatagctattatgattatattttggaagtatatgattatgttcatcaaatatttccactttccaaaaagcgtgatgacaattttatagcaggtcactctatgggaggatatggcacaattaaatttgcattaacacaaggggataaatttgccaaagctgtaccattatctgctgtgtttgaagcgcaaaatttaatggatctagagtggaatgatttttcaaaagaggccataattggcaatctttcaagtgttaaaggaactgaacatgatccgtattatttgctagacaaagctgtagctgaagataaacaaattccaaaattgctcattatgtgtggtaaacaagactttttatatcaagacaacttagattttatcgattatttatcacgtaaaaatgttccttatcaatttgaagatggaccaggagatcatgattatgcatattgggaccaagcgattaagcgtgctataacatggatggtgaatgattaa

SEQ ID NO: 415418 - DNA, 177 bp, Staphylococcus aureus
gtggtggttaaagaaattttgagactattattcttactagcgatgtatgagttaggtaagtatgtaactgagcaagtatatattatgatgacggctaatgatgatgtagaggcaccgagcgattacgcaaagttgagtgatcagtcagatttgataagggtggaggtgtcagagtag

SEQ ID NO: 415419 - DNA, 486 bp, Staphylococcus aureus; identical to SEQ ID NO: 408169

SEQ ID NO: 415420 - DNA, 921 bp, Staphylococcus aureus; identical to SEQ ID NO: 408168

SEQ ID NO: 415421 - DNA, 411 bp, Staphylococcus aureus
atgttaactgatgatataaaacaaatgcttattaaaaaaggattaggtgatgtagatattgcagctgattatggggctggtggagatagagtgatcagtgaattgaaatctaaagggattaaaggtataagaaaagcgttgaaaggcgctaatactattttaccaggcattcaattcattcaaggctttgaagttattatacacccatcatgtgaacacgctattgaagagttcaacacttatacatttgaccaagataatgatggtaagtggttgaacaagcctatagatgctaataaccatattatcgatgcattgcgttatagtcttgagaaatatcatatcgtacgtaaaaaacgtaaaaagaatatagaaagcaaaacaaaagtaattaaatctctaggattatag

SEQ ID NO: 415422 - DNA, 2886 bp, Staphylococcus aureus; identical to SEQ ID NO: 414054

SEQ ID NO: 415423 - DNA, 189 bp, Staphylococcus aureus; identical to SEQ ID NO: 407433

SEQ ID NO: 415424 - DNA, 501 bp, Staphylococcus aureus; identical to SEQ ID NO: 409122

SEQ ID NO: 415425 - DNA, 228 bp, Staphylococcus aureus; identical to SEQ ID NO: 409217

SEQ ID NO: 415426 - DNA, 627 bp, Staphylococcus aureus
gtgtacgctcgaaaaaaagaggatataacgcggtttgaagcagacattgttattcatggtgctggacggggccctgccttagatatgaatcttgaaaaagggaatatagaaaggaaaaaacatggtgtccatgttaatgagtatttgcaaagtgtaagtaacccgaatgtctatgcagctggagatgctgcagcaacggatggcttgcccctcacacctgtagccagtgcagattctcatgtcgtagcatctaatttattgaaagggaacagcaaaaaaattgaatatcccgtgattccatctgctgtatttaccgtacctaaaatggcatcggtaggtatgagcgaggaggaagccaaaaactctggccggaatattaaagtaaagcagaaaaacatctccgactggtttacgtataaacggacaaatgaggactttgctgcgtttaaagtgctgattgacgaagatcatgatcaaattgttggtgctcatttgattagtaatgaagccgatgaactgattaatcattttgcaacagccattcgttttgggatttcaaccaaagaattgaaacaaatgatatttgcctatccaacggcagcttcggacattgcacacatgttgtaa

SEQ ID NO: 415427 - DNA, 408 bp, Staphylococcus aureus
atggggatgaaaatcagtgaattggctaaagcgtgtgatgtgaataaagaaaccgttcggtattacgagcggaaaggattgatagccgggcctcccagaaacgaatcagggtatcgaatatattcagaggaaacagcagatcgggtacggtttattaaacgaatgaaggaattggatttctcgctaaaggaaatccacctgttgtttggtgtggttgatcaagatggggagagatgtaaagatatgtacgcctttaccgttcaaaaaaccaaagaaatcgagcggaaagtgcagggtttgttacgaatccaacggttattagaggaattaaaagaaaagtgtccagatgaaaaggcgatgtatacctgtcctattattgaaacgttaatgggagggcctgataaataa

SEQ ID NO: 415428 - DNA, 486 bp, Staphylococcus aureus
atgaaaaaacgcatttccttcaccgctataatgacggtgttgttaatcggtttaacagcttgtggagcagaatctgataccgcgaatgaatcaaaggttcaagacattcaaggaaatccagtcagcctacctaatgagaaacccacactcatttattttatggcaacctggtgtccatcttgtatatacaatgaggaaatctttaaggaaatgcatcaactaaacccgaacgatgttcaattgatcacagttagtttagaccctaacacagatacaaaagaaagccttgcgaaatttaaacaggattatggcggggattggccccatgttttaaagaatggtaaagaaattgtggatacctatggcgtcaaacaattggaagagatcgtactggtcaattctgaaaatgaggtattctatcgttctgttcgaccgtcctttgatgatttaaaagaagcgttgactcaaataggagtggaattatga

SEQ ID NO: 415429 - DNA, 681 bp, Staphylococcus aureus
atgagtttttcgtttctcttcattctgaccgctggaatggttgcggcctttaatccttgtggtatcgccttgcttccttcttatatctcctatttaattggaggcgaaacaaaggatcattcgttccgctatgcaatttttaaaggattagggcttggtggagcgatgaccacggggtttttaacgatttttgtattggctggtttattgataggaggattgggaagcgcactaacagggatttttccgattctttcattggttatgggtatactcattgctttattggggttgggcatgctattcgggaagcatttgccgattaaaataggatcttttcaagtcaagccagggaaatggtctatctatttttacggaatagcctatgccgtgacatcacttggttgtaccttgccagcctttatgttggtggtctctgcatcgctgaatgacaatagcgtaacggccgtgatcatcaagttcatcatctactcccttggtatgggaattgtggtgacagcgatcacgatggtctcattgatttcacgacaattggtacagaagtttctgcacaactatatgggttctatccaaaaaatagcagctgttgtgattttcctctccgttttgtacatggcttattactggtatttcggttctggtggcatttgtacattttaa

SEQ ID NO: 415430 - DNA, 375 bp, Staphylococcus aureus
atgtaccttaaccaaagaataaaattttttttagaaagagtggtgagaatgatggatgagaatcgctcgaaaggtaaccgctggggtgtttgggcctttttcggaatattattggttcctttactttgttgcgcaggaccgattctccttgttgcattagggagcacaggtattggtgccctctttgctggtgcgacaggaaattggtggttgaccggcatttttgcagcattggccattgttatgattgctctgatcctcagcaagttgttgaagaacaaatacaattctcctgaaggcaatggaaaaacaaaaaataaaacggattgctgtacgcctccagagagcgtggatcggaaacatgagacaagataa

SEQ ID NO: 415431 - DNA, 1644 bp, Staphylococcus aureus
atgactcaaaattcatataaaatacccattcaaggcatgacatgcacaggctgtgaagaacatgtaaccgaagcattggaacaagccggagctaaagatgtttcggccgatttccgacgcggtgaggccatttttgaactcagcgatgatcagatcgaaaaggctaagcaaaatatttcggcagccggctatcaacccggagaggaagaaagccagccctctgaaaacagtgtagatttcaatcgggatggcgattacgatcttctgattattggttccggcggtgcggcgttttctgcagctatcaaggccaatgaaaacggggcgaaagtggccatggtagaacggggaaccgtcggggggacctgcgttaacatcggttgtgtaccgtcaaaaaccatgcttcgtgccggtgaaataaacggtctcgcccaaaacaatccgtttaccggacttcaaacgagtaccggtgctgcggaccttgcccaattgaccgaacaaaaagatggattagtcagtcaaatgcgtcaagaaaaatatatagacttgatcgaagaatatggatttgatctcattcgtggcgaggcctcgtttatcgacgataagacgatacaagtgaatggacaaaacatcacgtctaaaagctttttaatcgcaacgggggcttctccggctgttccggaaatcccgggaatgaatgaggttgattatttaacaagtacatccgcactcgaattaaaagaggttccacaacgattggcagtgatcggttctggctatatcgcagcggaattaggtcaaatgtttcacaacctcggaacagaagtgactctcatgcaaagaagcgagcgtctgtttaaaacctacgatcctgaaatttccgaagccatcgatgaatccttaactgagcaaggacttaacctgatcactggggtcacttatcaaaaggttgagcaaaacggtaagtcgacaagcatttatattgaagtgaacggtcaagaacaagtcatcgaagccgatcaagtcctcgtggcaacaggaagaaagccgaacacagagactttaaaccttgaatcagcaggtgtgaaaacagggaaaaaaggcgaagtgctgaccaatgaatatttgcaaacgtcgaataaccgaatatatgccgcgggcgatgtgaccctcggtccgcaattcgtttatgttgcagcttatgaaggcgggattgtggcaaataatgcgttgggtctagcgaaacgcaaaatcgatcttcgctttgttcccggcgtaaccttcaccaatccatcgatcgccacagtcggcttgactgaacaacaggcaaaagaaaaaggttacgatgtcaaaacatcggtccttccgttggacgctgtaccgcgggccttagtcaatcacgaaacaacaggggtctataaacttgtagtcaacgcccaaacccagaaattgatcggagcgcacattgtgagtgaaaatgctggagatgtgatttatgcggcaacgttagcggttcaatttggattgaccattgaagaccttacggatagctttgcgccttatttaacgatggctgaaggattaaagcttgcagccttgacgtttgataaagacgtatcgaaattatcttgttgtgcaggctaa

SEQ ID NO: 415432 - DNA, 651 bp, Staphylococcus aureus
atgaaaaatatttcagaattctcagcccaacttgatcaaacttttgatcaaggggaagccgtctctatggagtggttattccgtccgttgctaaaaatgctggcggagggcgatccagtccccgttgaggacatcgcggcggagaccgggaagcccgtcgaggaagttaagcaagtcctacagactctacctagtgtggaacttgatgagcagggccgtgtcgtcggttatggcctcacactgttccctaccccccatcgcttcgaggttgatgggaagcaactatatgcatggtgcgcccttgacacacttatgttcccagcactcatcggccggacggtccacatcgcttcgccttgtcacggcaccggtaagtccgtccggttgacggtggaaccggaccgcgttgtaagcgtcgagccttcaacagccgttgtctcgattgttacaccagatgaaatggcctcggttcggtcggccttctgtaacgacgttcactttttcagttcaccgagtgcagcccaagactggcttaaccaacaccctgagtcgagcgttttgcccgttgaagatgcctttgaactgggtcgccatttgggagcgcgttatgaggagtcaggacctactaatgggtcctgttgtaacatttaa

SEQ ID NO: 415433 - DNA, 516 bp, Staphylococcus aureus
atggatagtcatttaaatcacattttgtcctattggcagggaccaccgttggaaggggcaaaaaccataattagtaagtatggatatccccaggaagcaacaatgagtcgattaatttggtacaatagcgggccatggaaacgcacgatagtatataaggatccagtccctcataacttccctacccctcaccttgatttccttaagcagaccatcgattataaagtgcccgtacacttatatgatgcgattgccgcttttgatggaagtgtctacttagatcgaactacaggtgaggcatcagcaaagtgtcatgaggaagcgatgaattttttatctttaaacttgttaaatgacattgtaactggcaaacgtgatgttcaaggagcaaaagctttctacgcccaaactgccgaacagtttaccaaatatcatataacatctccttatacagaaggttttctttttccaatgcaatataatacggcagaccttggcgttacatattttaaataa

SEQ ID NO: 415434 - DNA, 321 bp, Staphylococcus aureus
ttgaataaagtgggtggcataatgtttggatttaccaaacgacatgaacaagattggcgtttaacgcgattagaagaaaatgataagactatgtttgaaaaattcgacagaatagaagatagtcttagagcgcaagaaaagatttatgacaaattagatagaaattttgaagaattaaagcgcgacaaggtagaagatgaaaagaataaagaaaagaatgccaagaatattagagacataaaaatgtggattctaggtttgatagggactatcttcagtacgattgtcatagctttactaagaactatttttggtatttaa

SEQ ID NO: 415435 - DNA, 174 bp, Staphylococcus aureus
atgattaaacaaatattaagactattattcttactagcaatgtatgagctaggtaagtatgtaactgagcaagtatatattatgatgacggctaatgatgatgtagaggcgccgagtgacttcgcaaagttgagcgatcagtctgatttgatgagggcggaggtgtcagagtag

SEQ ID NO: 415436 - DNA, 366 bp, Staphylococcus aureus; identical to SEQ ID NO: 415042

SEQ ID NO: 415437 - DNA, 534 bp, Staphylococcus aureus; identical to SEQ ID NO: 405660

SEQ ID NO: 415438 - DNA, 348 bp, Staphylococcus aureus; identical to SEQ ID NO: 407392

SEQ ID NO: 415439 - DNA, 618 bp, Staphylococcus aureus; identical to SEQ ID NO: 407393

SEQ ID NO: 415440 - DNA, 147 bp, Staphylococcus aureus; identical to SEQ ID NO: 407426

SEQ ID NO: 415441 - DNA, 189 bp, Staphylococcus aureus; identical to SEQ ID NO: 407433

SEQ ID NO: 415442 - DNA, 243 bp, Staphylococcus aureus
atgaatcagcacgtaaaagtaacatttgattttactaattataattacggcacatatgacttagcagtaccagcatatttaccgataaaaaatttaatagctttagtattggatagtttggacatttcaatatttgatgtcaatacacaaattaaagtgatgacgaaaggtcaattacttgttgaaaatgatcgactcattgattatcaaatcgctgatggagatattttgaagttactatag

SEQ ID NO: 415443 - DNA, 1377 bp, Staphylococcus aureus; identical to SEQ ID NO: 413350

SEQ ID NO: 415444 - DNA, 393 bp, Staphylococcus aureus; identical to SEQ ID NO: 405158

SEQ ID NO: 415445 - DNA, 435 bp, Staphylococcus aureus; identical to SEQ ID NO: 410055

SEQ ID NO: 415446 - DNA, 717 bp, Staphylococcus aureus; identical to SEQ ID NO: 405141

SEQ ID NO: 415447 - DNA, 1113 bp, Staphylococcus aureus; identical to SEQ ID NO: 408073

SEQ ID NO: 415448 - DNA, 879 bp, Staphylococcus aureus
atgatgacaaatattttatatcgcattgataaacagttgagtgattttacgaagacagaaaagataatcgctgattacattttaaagaatccacataaaatcattgatatgacggtgaatgatttggcagatgttacgaatgttagtacagcatcaattgttagatttagtcggaaaatgacacatcaaggttttcaagagctaaagattgcgatatctcgatacttacccgaagatattgcaaccaatccacatttagaattgattgaaaatgaatctgtagaaactttgaaaaataaaatgattgctagagcaacgaatacgatgcgatttgtagctactaatattatggatgcgcaaattgatgcaatttgtgatgtgttgaaaaatgccaggacaatatttttatttggatttggcgcatcgagtttgactattggtgatctttttcaaaagttatctcgtattggcttaaatgtcaggttattacatgaaacgcatttacttgtgtcaacatttgcgacgcatgatgatagagattgcatgatttttgtgacgaatcaaggtagtcatagtgaattgcagtcaattgcacaggtggccacacattacagtattcccatcataactatatctagtacagctaataatccagtggctcaaattgcagactatgcattgatttatggcagaactgatgaaaatgaaatgcgtatggcggctacaacttcactatttgcacagttattcacggtagatatattgtactatcgatttgtagcattaaattatcatgcgattctagattgtataacccaatcgaaaatggcacttgataattaccggaagcatcttgcgacgatagattttaaacattag

SEQ ID NO: 415449 - DNA, 189 bp, Staphylococcus aureus
atggaaaatagtacgaccgaagcgcgtaatgaagcgacgatgcatcttgatgaaatgactgtggaagaggctttaattacgatgaataaagaagatcagcaagtcccgttagcagttcgaaaggcaataccacaattgacaaaagtaataaaaaaacaattgcacagtataaaaagggtggacgattga

SEQ ID NO: 415450 - DNA, 1350 bp, Staphylococcus aureus
atgaagaagaaactaacatttaaagaaaacatgtttataggttctatgttatttggtttattctttggtgccggcaatcttatcttcccaatacacttgggtcaagctgctggttctaacgtttttatcgctaacttaggatttttaattacagcaattggcttaccatttctaggtatcattgctattggcatttcaaagacatctggtttatttgaaattgcatcgcgtgttaataaaacatatgcttacattttcacgattgccttatatctagttatcggaccatttttcgccttacctagactggcaacgacatcatttgaaattgcattttcgccatttttatcaccaaagcaaatcactttatatttatttatttttagcttcgtcttctttgtgattgcatggttttttgcgagaaagccatcaagaattttagaatatatcggtaaatttttaaatccggtattcttagtattattagcaattattttattatttgcttttatccatccattaggtggcatatctgatgcacctattagtaaacaatatcaatcacatgccttatttaacggctttttagatggatacaataccttagatgcgctagcgtcattggcatttggtatcatcattgttgcaacgattaaaaagttaggtatcgaaaatccaactgatatcgctaaagaaacaattaagtctggtactatcagtatcattatgatggggattatttataccctactagcaatcatgggtacattaagtattggtcatttcaaacttagtgaaaatggtggtattgccttagcgcaaattacgcaatactacttaggtaactacggtatcgtcctgttgtcacttatcgttatggttgcttgtttaaaaacagccatcggtttgattacggcattttcagaaacattcgaacaccttttccctaaaatgaattacctagcgattgcaacagttgtaagctttatttcgttcttattcgcgaatgttggcttaactaagattattatgtactcagtcccagtgttaatgttcttatatccattagcaattgccttgattgtactaacattatttagtagcaaattccatcattcaaaaattatttatcaatgtaccattttctttacaatgattgctgcattagtagatggattaaaagctagtccagagttcatttcaagcacatcattctcacaaactttgattaatttcagccaaaaatatttaccattatcagacattggtatgggctgggttgttctcagtttgattggtttcattatcggcttcattatttataaaattaagcatcgtaaaattccataa

SEQ ID NO: 415451 - DNA, 516 bp, Staphylococcus aureus
ttgaatagtaataatgtaataaagcaagagattataaaaattattaaagatgaatattattattatgatcaagaaaatacgaagaaatatttaataaagttttgtcaagatcttatagaacatataaaagagcacagaaatcaaatcaatgattgtcactttacaaatatattaaataaagatgcagaaaaaactaatagttcaagtatcttaacttcattatttttaactgcaaacaatataccaaataatctatcatctaatttttctaaagcagtggaatattattttgcaaaaaacaaggaaatatatggagatggatatgaaaagtatttagacgagtattttagaaatgttttaggcgaaaaaagttatttaattttgatagatgatttttcagggacaggaaaatcaatcagcgactttattgatgcaataaaaaagtatatactaacattaaaaatagagattattatattttgcatacatataaccgaagatgcagaaaaaaaataa

SEQ ID NO: 415452 - DNA, 225 bp, Staphylococcus aureus; identical to SEQ ID NO: 408067

SEQ ID NO: 415453 - DNA, 795 bp, Staphylococcus aureus
atggctaaaatgagaatatcaccggaattgaaaaaactgatcgaaaaataccgctgcgtaaaagatacggaaggaatgtctcctgctaaggtatataagctggtgggagaaaatgaaaacctatatttaaaaatgacggacagccggtataaagggaccacctatgatgtggaacgggaaaaggacatgatgctatggctggaaggaaagctgcctgttccaaaggtcctgcactttgaacggcatgatggctggagcaatctgctcatgagtgaggccgatggcgtcctttgctcggaagagtatgaagatgaacaaagccctgaaaagattatcgagctgtatgcggagtgcatcaggctctttcactccatcgacatatcggattgtccctatacgaatagcttagacagccgcttagccgaattggattacttactgaataacgatctggccgatgtggattgcgaaaactgggaagaagacactccatttaaagatccgcgcgagctgtatgattttttaaagacggaaaagcccgaagaggaacttgtcttttcccacggcgacctgggagacagcaacatctttgtgaaagatggcaaagtaagtggctttattgatcttgggagaagcggcagggcggacaagtggtatgacattgccttctgcgtccggtcgatcagggaggatatcggggaagaacagtatgtcgagctattttttgacttactggggatcaagcctgattgggagaaaataaaatattatattttactggatgaattgttttag

SEQ ID NO: 415454 - DNA, 531 bp, Staphylococcus aureus
gtgattacagaaatgaaagcagggcacctgaaagatatcgataaacccagcgaaccatttgaggtgataggtaagattataccgaggtatgaaaacgagaattggacctttacagaattactctatgaagcgccatatttaaaaagctaccaagacgaagaggatgaagaggatgaggaggcagattgccttgaatatattgacaatactgataagataatatatctttactaccaagacgataaatgcgtcggaaaagttaaactgcgaaaaaattggaaccggtacgcttatatagaagatatcgccgtatgtaaggatttcagggggcaaggcataggcagcgcgcttatcaatatatctatagaatgggcaaagcataaaaacttgcatggactaatgcttgaaacccaggacaataaccttatagcttgtaaattctatcataattgtggtttcaaaatcggctccgtcgatactatgttatacgccaactttgaaaaagctgttttctggtatttaaggttttag

SEQ ID NO: 415455 - DNA, 279 bp, Staphylococcus aureus
atggcagataataaaatgggtggttttgatacacatattaaaacagaagaagatgtgccaactgttacaagaaaaaagggtaaatccgaagatgatagacaaacacaaaaaatttataattcagacaaagaaataataacggaaattattgacgatagacgatcaagaacgtatataggtgaaattagtaatgctattgaaatttataaaatgattcacgaccatgtaggtggtgacggagaagcaaaaaaacaatttatcaaagacctattaaaataa

SEQ ID NO: 415456 - DNA, 438 bp, Staphylococcus aureus
ttgcaacagaaccaaaatgattatgactatatcatatttgatacaagaccaagcacagacatagcaactaaaaatgctatttgctgttctgactatgttttgattactacaaaaacggaagagtctagcgcagaaggtgctagaaagacatataattatgtaggttctttagttgagtttaatccaaaagtgaaactattaggcgtacttccttatttagataagcctaattcatcaactagtaatcgtgtaaaacaagaaattatagaccaattccaagaaaatgttttcaacaatataatcaaagcatctgatcgtgttgtaacttggggtaaatttggaataacaacagaccagcctcatgacaaaaaaactttaagtatgtatatagatgttgtagacgaaatgtttgaacgaattaaaattatggagggataa

SEQ ID NO: 415457 - DNA, 1050 bp, Staphylococcus aureus
ttggttcttttagttgcagcttcgccatgtgctttggcagcagctactgtatcggcaactttatcaacaacttctaatttagctaaaaaaggcgttctttctaaggggagttcttatctatctcaattagctgatattcaagctattgcatttgataagacgggaactttaaccaaaggaaaacctgaaatcacgaatcattattttactgattctatggatgaagaagaaataattgatattgtagtagctcttgagaaaaattccaatcatcctttagcggatgctattttaagaaaatttgaaccaaaaaaccaactttctattgaagtagaaaatcagattggaaaaggattgtccggagactataatggtcgaaaatatcgtataggtaaaccaacttcttttgacgacgtctcagatgaatatgttcgattaaataatcaatgggcatctgaagggaaaactgtcgtatatctagcagtagatgaagaagttataggccttattgcacttatggatgtaccaagtaaatatgctaaagaaactattgagtacttcaagaaacaaggtattcatactacgttaattacaggtgattcggaaatgacaggaaaagcagtcgcaagcaagctaggtatagacgaagtgattgccaatgtcatgccagataaaaaatctaaaattattgacaaacaaaaagaaaaatatggtgtgaccgcaatggtaggagatggtgtaaatgatgctccagctcttgtcaatgcagatgtaggaatagccatgggagatggaactgatgtggcagtagaggtttctgacttagtattaatgcaaaataacttaacgaaattaacacagtctcataaaatttctacgaaaatgaatcgtttaatttggcagaatattattttttcaatggcagttgtagcttttctaattatcgtgagcttagtaggattaacggatatagccattagtgtgatcgttcatgaaggaagtacattagtcgtaatattaaatggtctccgattattaaattctaaatga

SEQ ID NO: 415458 - DNA, 384 bp, Staphylococcus aureus
atggaaatcaaacaaaaatatcaattatcaaaagtggttaaaatattagaagtagtattatacgaggaagataagtttaaatccgataaggactatcattatcaggataaagcattttatgaatatgctttaaaattagttcataatggattgttcaatattcttgctgaattagattttgaagatgaagcatttttaattcttgatgaagtaacaatgacgctaagtgatgtcatgaaagaaacacaacacgtttaccgttatagtgtcatagatgaaaaaggtgaacacaaacatacaacagatcgcaaaggacacgtgattggaatgttagagtgggcattagattacattgtgggaaatattgaagtggaggaattataa

SEQ ID NO: 415459 - DNA, 543 bp, Staphylococcus aureus
gtgtattacatcgcaatcgatattggaggcactcaaattaaatcggcagttattgataagcaattgaatatgtttgactatcaacaaatatcaacgccggacaacaaaagtgagcttattactgacaaagtatatgagattgtaacaggatatatgaagcaatatcagttgatccaacctgtcataggtatttcatcagcaggcgttgttgatgaacaaaaaggcgaaattggatacgcagggccaaccattccgaattataaaggtactaattttaagcgattattaaaatcactgtctccttatgtcaaagtaaaaaatgatgtaaacgctgcattactaggcgaattgaaattacatcaatatcaagcagaacggatcttttgtatgacgcttggtacaggcattgggggtgcgtgtacaagaataatcaaggtcatattgataatggtgagcttcataaggcaaatgaagttgggtatttattgtatcgtccaactgaaaatacaacgtttgagcaacgtgctgcaacgagtgcattga

SEQ ID NO: 415460 - DNA, 1545 bp, Staphylococcus aureus
atgaaaaaaatatataagtcattaactgtctctgcaattgttgcaacggtatcattaagtgctttaccgcaatctttagctataacgcatgaatcgcaacctacaaagcaacagcgaacggtattattcgatcgttctcatggtcaaacagctggtgctgcagattgggttagtgatggtgcattttcagattatgcggattcaatacaaaaacaaggttatgacgttaaagctattgatggtcattcgaacataacagaagcaagtttgaaaagttccaaaatatttgtaattcctgaggctaacattcctttcaaagaatcagaacaggcagcaattgttaactatgtgaaacaaggtggcaatgttgtctttatttcagatcattacaatgctgaccgaaatttaaatcgtattgattcatcggaggcaatgaatggttatcgacgtggagcatatgaagatatgtcgaaaggtatgaatgcagaagaaaaaagctctactgcaatgcaaggtgtgaaaagttcagattggttatctacaaactttggcgtacgttttcgatataatgcactaggtgatttaaatacgagcaatattgtttcttcaaaagaaagtttcggtattactgaaggtgtgaaatctgtctctatgcatgccggatcgacattagcaattactaatccagagaaagcaaaaggtattgtgtatacaccagaacaattgccagcgaaaagtaaatggtcacatgctgtagatcaaggtatttataatggtggcggtaaagcagaaggcccctatgtagcaatttctaaagttggaaaaggtaaagcagcatttatcggtgattcatcacttgtggaagatagttcgcccaaatatgtaagagaagataatggagaaaagaagaaaacatatgatggttttaaagaacaagacaacggtaagctattaaataatataacggcttggatgtctaaagatagtgatgggaaatcacttaaggcgagtggactaacattagatacaaagactaagttgcttgattttgaacgaccagagcgttcaactgagcctgaaaaagagccatggtcacaaccgccgagtggttataaatggtatgacccaacaacatttaaagcaggtagttatggcagtgaaaaaggcgcggatcctcagccaaacacaccagatgatcatacgccaccaaatcagaacgtaaaaatatcatttgatatcccgcaaaatgtttctgtaaatgagccatttgaagtgacaatacatttaaaaggatttgaagcaaatcaaacacttgaaaatcttagagttggtatttacaaagaaggcggacgtcaaatcggacaattttcaagtaaagataacgattataacccaccaggttacagtactttgccaacagttaaagcagatgaaaacggaaatgctacaattaagatcaatgctaaagtacttgaaagtatggaaggttcaaagattcgtttaaaactcggtgacaaaaccttgattacaacagacttcaaataa

SEQ ID NO: 415461 - DNA, 774 bp, Staphylococcus aureus; identical to SEQ ID NO: 414282

SEQ ID NO: 415462 - DNA, 801 bp, Staphylococcus aureus; identical to SEQ ID NO: 414281

SEQ ID NO: 415463 - DNA, 816 bp, Staphylococcus aureus; identical to SEQ ID NO: 414542

SEQ ID NO: 415464 - DNA, 243 bp, Staphylococcus aureus; identical to SEQ ID NO: 415442

SEQ ID NO: 415465 - DNA, 921 bp, Staphylococcus aureus
atgaagccttatatacaacttgttttgttcaagcaatggttacaatacatcttgctcgtaacaaccattgtcatcgcactcgtacttattggtatcggttaccgtgtagcacatgacaacttcaaaataccgattaccattcaagatttagaccaaaccactgcatcaaaatcattcgtcaataaaattaaacaatctgactatgtaactattaaaaaagtcgatgaagatgaaagctatattgaagatgatgttactaaaaaggaagctattttaagcatgcaaattcctaaaggtttctctcaaaaattaaaagagaaccgtttaaaagaaacgatacagttatatggtagagatgactttataggtggtattgctatagaaattgttagtagttcattatatgaacagcaaattcctaacattatttatgaacaccttgaggatatgaaacagcatcaatccatcgatgctatcaacaagtcctatcataaacatacacctgaatctaaaatcaaatttgtgtcgcttactaaacaagcacaacactctatttcaattagcttaatctttgcggtgattttatttgttagcgctgttcaagtagtacttcattatcgtttaaaccaacaagcagcattgcaacgattatcacaatatcatttaagccgtttcaaactatatagtacttatgtaatgacacatacgatcttgttattgttggtactattggcagttagtctatatttgtctcaaccactcagcttaatattttacttaaaatcattgttacttatattgatttatgagataggtatcgtctttatcttattccatattcaaacaataagtcatcgtttattcatgacatttatatatgcacttgctatgggtatcgtatacttgattattttcatgtaa

SEQ ID NO: 415466 - DNA, 951 bp, Staphylococcus aureus
atgaaaaaattaacagcagcagcgattgcaacgatgggcttcgctacatttacaatggcgcatcaagcagatgcagcagaaacgacaaacacccaacaagcacatacactaatgtcaacacaatcacaagacgtatcttatggtacttattatacaattgattctaatggggattatcatcacacacctgatggtaactggaatcaagcaatgtttgataataaagaatatagctatacattcgtagatgctcaaggacatacgcattatttttataactgttatccaaaaaatgcaaatgccaatggaagcggccaaacatatgtgaatccagcaacagcaggagataacaatgactacacagcgagtcaaagccaacagcatattaatcaatatggttatcaatcaaatgtaggtccagacgcgagctattattcacatagtaacaacaaccaagcgtataacagccatgatggtaatggaaaggtcaattatcctaatggcacatctaatcaaaatggtggatcagcaagtaaagcgacagctagtggtcatgcgaaagacgcaagctggttaacaagtcgtaaacaactacaaccatatggacaatatcacggtggtggtgcgcattacggtgtcgactatgcaatgcctgaaaattcaccagtttactcattaactgatggtacagtagtacaagcaggttggagtaactatggtggcggcaatcaagtaactattaaagaagcgaacagtaataactaccaatggtatatgcataataatcgtttaactgtttcagctggtgataaagtcaaagctggtgaccaaattgcatattcaggtagtacgggtaattcaacagcgcctcacgtacacttccaacgtatgtctggtggcatcggtaatcaatatgcagtagacccaacgtcatacttgcaaagtagataa

SEQ ID NO: 415467 - DNA, 882 bp, Staphylococcus aureus
atgagcattgttgcattacttatcgggttaggccccttaattggctggggcttcttcccaacagtcgcttcaaagtttggtggtaaacctgtacatcaaattatcggtgctactgtaggtacgttaatcttcgctattatattagccgtagtcacatcaagtggcttccctactggaaccaatttgctattcgccttattatcaggtgcaggatggggattcggacaaatcattacatttaaagcgttcgaattaatcggctcatctcgtgccatgccagtcacaacagcattccaattattaggcgcatctttatggggtgtctttgcattaggaaattggccaggcattggtcataaaatcattggatttacagctttagtcgttattctaattggtgcacgtatgacagtttggagtgaacgcaaagaagcaagtaacgccaaaaatttacgtcgtgcagtggtacttctgttaattggtgaatttggatactggttatattcagctgcaccgcaagcaacttctattgatggcctaactgcctttttacctcaagcaatgggtatggtaattgttgcagtcatttatggctttatgaatatgaaatcagagaatccattccgtaataaaattacgtggttacaaattatttcaggtttcttctttgcatttggtgccttaacatatcttatttcagcacaacctaatatgaatggtttagcaactggatttattctttctcaaacatccgttgtgcttgctacattaactggtatttatttcttaaaacaacataaaacttcaaaagaaatggttattacaattatcggcttagtactcattttagtagccgcttctgttacagtatttataaaataa

SEQ ID NO: 415468 - DNA, 762 bp, Staphylococcus aureus
atgtctaaagaagctggtcatacatttttagctaaattaggaaaaactcgtctacgccccggtggtaaagaagcaacagattggttaatacaacaaggggcattttcacaagataaacaagtgttagaagtggcatgtaatatgtgcacaacatctatttatctagctcatacatatggctgtcacattcaaggcgttgatataaataagaaagcattagaaaaagcacaggaaaatatttcagcagcaggtcttgaatcatatattcaagttcaacaagcgaatgctgttaaattgccctttgatgacaatcaattcgatatcgttttaaatgaagcaatgttaacaatgttacccatcgccataaaggaaaaagcattacgcgagtactaccgagtcttaaagcctgggggtatcttgttaacacatgatattgtcatcgttaatgaatcacatgccacacatgttgttaaatcattatctgcagcaattaatgtcaatgtctcaccgcagacgaaacttggctggttagatttatatcatcaagctggttttaatcatgtgcattatcatactggtccaatgagtttaatgacaccaaaaggtttaatttatgacgaaggtattgttggaactataaagattatcaaaaatgctttaaaaaaagaaaatcgaccaatgttttgtaaaatgtttaaaacgatgactaaattgcgtaaagatatgaattatattacttttgtcgctaaaaaagaggactaa

SEQ ID NO: 415469 - DNA, 279 bp, Staphylococcus aureus
atgaaacaagtattagtagcgtgtggtgcaggtattgcaacgtcaacagtagtaaataatgcaattgaggaaatggcaaaggaacacaatattaaagtagatattaaacaaatcaaaattacagaagttggaccttatgaagacactgcagatttattagttacaactgcaatgacaaagaaagaatataaattcccagttatcaacgcacgtaatttcttaactggtattggtattgaagaaacaaaacaacaaatcttaacagagttacaaaaataa

SEQ ID NO: 415470 - DNA, 468 bp, Staphylococcus aureus
atgggacagcaattagtgcataaagaaaatataatgctcaatttgtcggcaactgataaagaatccgtattgtcacaaatgtcagatgtgttatttcaaaatgggttcgtgaagtcaacgtttaaagatgcagtcatcgacagagaaaaagaatttgctactggtttaccaacacatctatgttcggtcgctataccgcatacagatgtcgaacatattaaccatagaacgataggtgtggctgttctagaaaaagaggtgccgtttattgaaatgggaacacttgatcaacagacagaagtgaaaatcgtttttatgttagcgatggataaagtagatgatcaacttaagttgttacaacagttgatgcaaatttttcaaagtgaagaaaaattggagcagattctgcgaacgaaagatgaaacgattttagcaacactaatcaatgattatttggaatataactaa

SEQ ID NO: 415471 - DNA, 936 bp, Staphylococcus aureus
atgaaaagaaagattattatggattgtgatccaggacacgatgatgcaatagcattaattttagcgggggcaattgacagtccactagagatattagctgtaacaacagtcgcaggtaatcaatcagttgacaagaatacgacaaacgccttgaacgtattggatattatgggacgccaagatatagcagtagcgaaaggtgcggataggccgttaattaaaccagctgcctttgcttctgaaatacatggggaatctggattagatggtccgaaactaccgtcgacaccatcacgtcaagcagttgcaatgccagcatcagatgtgattataaacaaagtgatgacgagtgatacacctgtaacaattgtagcgacaggtcctcttacgaatgtagcaacggcattgattcgtgagccaagaatcgctgagcatattgaatctattactttgatgggtggtggtacatttggaaattggacgcctacagcagaattcaatatttgggtagatgctgaagcagcgaagcgtgtttttgaaagtgggattactataaatgtgtttggtttagatgtaacacatcaagttttagccgacaatcacgtgattgaacgctttgaaagtatcaataatcctgttgcacagttcgtcgtagaattattgcaattctttaagaagacatacaagactcactttaatatggatggtggtccaatacatgatgcttgtacaattttgtatttgttacaaccagaattgtttacaatggtacccgttaatatcgacattgaacatcaaagtccactaacttatggcactatggctgtcgatttaaatcatgttacaggtaagcctgccaatgcttattttgctacagcagttgatgttgaagaagtgtggaacttgatagaccataagttacgtacatacgaataa

SEQ ID NO: 415472 - DNA, 1530 bp, Staphylococcus aureus; identical to SEQ ID NO: 413355

SEQ ID NO: 415473 - DNA, 174 bp, Staphylococcus aureus; identical to SEQ ID NO: 405125

SEQ ID NO: 415474 - DNA, 1230 bp, Staphylococcus aureus
atggaaggtcttaatcatcgaagaaatacagaaaaagaagagacaacacaaacgcaatcagttgcacctaatacaggtgaagaggggatgtcatcagcaagtacacaatcaactaagacgtccgacatacataatgaatctatcaataaacaaatggaagccaaagcgcatgaaacagcgcaaaatgcagatttaaaaaccgaagcaagaagtttatttgataatgcaaccaaatcaatcggtagactagccggcaatgatgaaagcttaaatcttaatttaaaagatatgttttctgaagtatttaagccgcatactaaaaacgaagcagatgaaatatttatagcgggtactgctaaaactacgccagcaatttgtgacatatcagaagaatgggggaagccatggctcttttctcgagtattcatcgctttcacagtaacatttattggattatgggtcatggcagcgatttttaataacactaacgcgattccgggtctcatttttataggggctttaacagtaccattatcgggtttgttcttcttttatgaatcaaatgcgtttaaaaatattagcatttttgaagttattatcatgttctttattggcggcgtattttcattactaagtacgatggtattatatagatttgtcgtttttagtgatcaattcgaaaggtttggttctttaacatttttcgatgcatttttagtaggattagttgaagaaactggaaaagcactcattattgtttatttcgtcaataaattgaaaacaaataagattttgaatggattattaatcggtgctgctattggtgcagggttcgcagtttttgaatcagcaggttatattttgaatttcgctttaggggaaaatgtcccattattagatattgtcttcacacgtgcgtggactgcgattggtggtcatttagtttggtcagcgattgttggtgctgcaatagttattgcgaaagaacagcatggctttgaattcaaagatatttttgataaacgctttttaatattctttttatcagccgttggtttacatggcatttgggatacatctttaactgtacttggcagtgatacgttgaaaatatttattttaatcgttattgtgtggatacttgtattcattttaatgggggcaggtttaaaacaagtgaatttactgcagaaagaatttaaagaacaacagaaaaaagtagacgaataa

SEQ ID NO: 415475 - DNA, 1212 bp, Staphylococcus aureus
atgacatttgaaaaagaaacggtcttaaaaacattatttcctgaagatgtacttagtattgctaaaggtttaacagacggtgaagtcgaatttttacaacaagtagattcattgctagaaagtaagtaccgtgaaaatattaatcaacattggatagacgctactgtacccgaggactattttaaagatctgggagaattaaattattttaacaatccattactttacaaggatcgtccaaacgccaaaatgcctagtcaactatttcagtttttcatgtcttacctactcgcgcgatttgatatttccttagctaccctactcggtgttcaccaaggtttagggcataacactttctatttcggaggtagcaaagaacaaattgcgaaatatgtacctaaattacagtcacatgaactgcgtacatgctttgctttaactgaaccagaacacggttcggacgttgcgggaggtcttgaaacagtcgctgaacgccaaggcgatacttgggttatcaatggtgaaaagaaatggattggtggtgcacatgtatctgatgtcattccagtattcgcagtaaataaaaaaactggcaaaccccattgctttgtagtcagaccagaacaagatggcgtcgatattgaagtcattgataataaaatcgcacttcgcattgttcctaacgcactaattaaattaactaatgtcaaagtagatgaagcggatcgcttacaaaacataacaagctttaaagatattgccaaaattctttattcaacgagagcaggcgttgcttatatggctacaggtggtatggctggcgctttacgtgccacattagattatgtcactgagcgtaagcaattcggcaaaccaattagtaaatatcagttaatacaagaaaagctagcaatgatgcaaggtaatttagctcaagcaatggcaacatgtgctcaattagctaatatgcaagcacatggtgaatatgacgaggttgcaacttcaacggcgaagatgatgaatgccttacgtttgcgtgagacagtagctatgggccgcggtattacaggtggtaatggcatactagctgacgattatgatattgcacgtttcttctctgatgcagaagcgatttacacgtacgaaggtacacatgaaattaatgccttagtaattggacgcgctttgactggagattctgctttcgtataa

SEQ ID NO: 415476 - DNA, 1098 bp, Staphylococcus aureus; identical to SEQ ID NO: 413359

SEQ ID NO: 415477 - DNA, 198 bp, Staphylococcus aureus; identical to SEQ ID NO: 408081

SEQ ID NO: 415478 - DNA, 741 bp, Staphylococcus aureus; identical to SEQ ID NO: 413365

SEQ ID NO: 415479 - DNA, 1488 bp, Staphylococcus aureus
atggcagtaaacgttcgagattatattgcagagaattatggtttatttatcaatggggaatttgttaaaggtagcagtgacgaaacaatcgaagtgactaatccagcaactggagaaacactatcacatattacaagagcaaaagataaagatgtcgatcatgcagtcaaagtggcgcaagaggcatttgaatcatggtcattaacttctaaatcagaacgtgcacaaatgttgcgtgatattggtgataaattaatggcacaaaaagataaaattgcaatgattgaaacattaaataatggtaaaccgattcgtgagacaacagcaattgatattccatttgctgcaagacatttccattatttcgcaagtgttattgaaacagaagaaggtacagtaaatgatatcgataaagacacaatgagtatcgtacgacatgagccgattggcgtcgtaggtgctgttgttgcttggaacttcccaatgctattagctgcatggaagattgcgccagccattgctgcaggtaatacaattgtgattcaaccttcgtcttcaacaccattaagtttattggaagttgctaaaattttccaagaggtattacctaaaggtgttgtcaatatactaacgggtaaaggttcagaatcaggtaatgcaattttcaatcatgatggtgtagataaattatcatttacgggctcaactgatgtaggttatcaagttgccgaagctgcagcaaaacatctagtacccgctacattagagcttggtggtaaaagcgccaatatcatattagatgatgctaatttagaccttgcagttgaaggtattcagttaggtattttattcaaccaaggtgaagtatgtagtgcaggttctcgattattagttcatgaaaaaatttatgatcaattggtgccacgtttacaagaggcattttcaaatattaaagttggagatccacaagatgaagctacacaaatgggtagtcaaactggtaaggatcaattagataaaattcaatcatatattgatgcagcaaaagaatcagatgcacaaattttagcaggtggtcatcgcttaactgaaaatggattagataaagggttcttctttgagccgacattaattgctgtgccagacaatcatcacaaattagcacaagaagaaatatttggaccagtgttaacagtgattaaagtgaaggacgatcaagaagcaattgatatagctaatgattctgagtatggtttagcaggcggtgtattttctcaaaatatcacacgtgcattaaatattgctaaagctgtacgtacaggacgtatttggattaacacttacaaccaagtaccagaaggcgcaccatttggtggttataaaaaatcaggtatcggtcgagaaacttataaaggtgcgttaagtaactatcaacaagttaaaaatatttatattgatacaagcaatgctttaaaaggtttgtactag

SEQ ID NO: 415480 - DNA, 1263 bp, Staphylococcus aureus
atgaagttaacagtagttggcttaggttatattggtttaccaacatcaattatgtttgcaaagcatggcgtcgatgtgcttggtgttgatattaatcagcaaacgattgataagttacaaagtggtcaaattagtattgaagaacctgggttacaagaggtttatgaagaggtactgtcatcgggaaaattgaaggtatctacaacgccagaagcatctgatgtttttatcattgccgttccgacgccgaataatgatgatcagtaccggtcatgtgacatttcgctagttatgcgtgcattagatagtattttaccatttttagaaaaagggaatactattattgtagagtcgacaattgcgcctaaaacgatggatgattttgtaaaaccagtcattgaaaatttaggatttacaataggtgaagatatttgtttagtgcattgtccagaacgtgtactgccaggaaaaattttagaagaattagttcataacaatcgtatcattggcggtgtgactaaagcttgtattgaagcgggtaaatatgtctatcgcacattcgttcagggagaaatgattgaaacagatgcacgtactgctgaaatgagtaagctaatggaaaacacatatagagacgtgaatattgctttagctaatgaattaacaaaaatttgcaataacttaaatattaatgtattagatgtgattgaaatggcaaacaaacatccgcgtgttaatatccatcaacctggtccaggtgtaggcggtcattgtttagctgttgatccgtactttattattgctaaagaccctgaaaatgcaaagttaattcaaactggacgtgaaattaataattcaatgccggcctatgttgttgatacaacgaagcaaatcatcaaagcgttgagcgggaataaagtcacagtatttggtttaacttataaaggtgatgttgatgatataagagaatcgccagcatttgatatttatgagctattaaatcaagaaccagacatagaagtatgtgcttatgatccacatgttgaattagattttgtggaacatgatatgtcacatgctgtcaaagacgcatcgctagtattgattttaagtgaccactcagaatttaaaaatttatcggacagtcattttgataaaatgaagcataaagtgatttttgatacaaaaaatgttgtgaaatcatcatttgaagatgtatcgtattataattatggcaatatatttaattttatcgacaaataa

SEQ ID NO: 415481 - DNA, 888 bp, Staphylococcus aureus
atgagaaaaaatattttaattacaggcgtacatggatatatcggtaatgctttaaaagataagcttattgaacaaggacatcaagtagatcaaattaatgttaggaatcaattatggaagtcgacctcgttcaaagattatgatgttttaattcatacagcagctttggttcacaacaattcacctcaagcaaggctatctgattatatgcaagtgaatatgttgcttacgaaacaattggcacaaaaggctaaagctgaagacgttaaacaatttatttttatgagtactatggcagtttatggaaaagaaggtcaggttggtaaatcagatcaaattgatacacaaacaccaatgaaccctacgaccaactatggtatttccaaaaagttcgctgaacaagcattacaagagttgattagtgattcgtttaaagtagcaattgtgagaccaccaatgatttatggtgcacattgcccaggaaatttccaacggttaatgcaattgtcaaagcgactgccaatcattcccaatattaacaatcagcgcagtgcattatatattaaacatctgacagcatttattgatcaattaatatcattagaagtgacaggcgtgtatcatcctcaagatagtttttactttgatacatcgtcagtaatgtatgaaatacgtcgccaatcacatcgtaaaacggtattgatcaacatgccttcagtgttaaataagtattttaataagttgtcggtctttagaaaattattcggcaatttaacatacagcaatacgttatatgaaaataataatgcacttgaagttattcctggaaaaatgtcacttgttattgcggacatcatggatgaaacgacaaccaaagataaggcataa

SEQ ID NO: 415482 - DNA, 558 bp, Staphylococcus aureus
atgaagcgattattcgatgtagtgagttcaatatatggtttagtagttttaagtccgattctgttaattacagcattactaattaaaatggaatcacctggaccagccattttcaaacaaaaaagaccgacgattaataatgaattgtttaatatttataagtttagatcaatgaaaatagacacacctaatgttgcaactgatttaatggattcaacatcgtatataacaaagacagggaaggtcattcgtaagacctctattgatgaattgccacaattattgaatgttttaaaaggagaaatgtcaattgtaggtcctagaccagcgctttataatcaatacgaattaatcgaaaaacgtacaaaagcgaacgtgcatacgattagaccaggtgtgacaggactagctcaagtgatggggagagatgatattactgatgatcaaaaagtagcgtatgatcattattacttaacacatcaatctatgatgcttgatatgtatatcatatataaaacaattaaaaatatcgttacttcagaaggtgtgcatcactaa

SEQ ID NO: 415483 - DNA, 1110 bp, Staphylococcus aureus
ttgaatattgtaattacaggagcaaaaggttttgtaggaaaaaacttgaaagcagatttaacatcaacgacagatcatcatattttcgaagtacatcgacaaactaaagaggaagaattagagtcagcattgttgaaagcagactttatcgtgcatttagcgggtgttaatcgacctgaacatgacaaagaattcagcttaggaaacgtgagttatttagatcatgtacttgatatattaactagaaatacgaaaaagccagcgatattattatcgtcttcaatacaagcaacacaagataatccttatggtgagagtaagttgcaaggggaacagctattaagagagtatgccgaagagtatggcaatacggtttatatttatcgctggccaaatttattcggcaagtggtgtaagccgaattataactcagtgatagcaacattttgttacaaaattgcacgtaacgaagagattcaagttaatgatcggaatgttgaactaacgctaaactacgtggatgatatcgtcgctgaaataaagcgtgctattgaaggaactccaacgattgaaaatggtgtacctacagtaccaaacgtatttaaagtgacattgggagaaattgtagatttattatacaagttcaaacagtcacgtctcgatcgaacattgccgaaattagataacttgtttgaaaaagatttgtatagtacgtatttaagctatctacctagtacagactttagttatcccttacttatgaatgtggatgataggggttcttttacagaatttataaaaacaccggatcgtggtcaagtttctgtaaatatttctaaaccaggtattactaaaggtaatcactggcaccatactaaaaacgaaaaatttctagtcgtatcaggtaaaggggtaattcgttttagacatgttaatgatgatgaaatcattgaatattacgtttctggcgataaattagaagttgtagacataccagtaggatacacacataatattgaaaatttaggcgacacagatatggtaactattatgtgggtgaatgaaatgtttgatccaaatcagccagatacgtatttcttggaggtatag

SEQ ID NO: 415484 - DNA, 1029 bp, Staphylococcus aureus
atgttcgatgacaaaattttattaattactgggggcacaggatcattcggtaatgctgttatgaaacggtttttagattctaatattaaagaaattcgtattttttcacgcgatgagaaaaaacaagatgacattcgaaaaaaatataataattcaaaattaaagttctacattggtgatgtgcgtgatagtcaaagtgtagaaacagcaatgcgagatgttgattacgtattccatgcagcagctttaaaacaagtgccgtcatgtgaattctttccagttgaggcagtgaagacaaatattattggtacagaaaatgtcttacaaagtgctattcatcaaaatgttaaaaaagtcatatgtttatctacagataaggcagcgtatcctattaatgctatgggtatttcaaaagcaatgatggaaaaagtattcgtagccaaatcaagaaatattcgtagtgaacaaacgcttatttgtggtacaagatacggtaatgtgatggcttcaagaggatcagtaatacctttgtttatcgacaaaatcaaagctggagaacctttaacgattacagatcctgatatgacaagatttttaatgagcttagaagatgcggtagaactagttgttcatgcatttaagcatgcagagacaggagatattatggttcaaaaagcaccaagctcaacggtaggggatcttgcgaccgcattattagaattgtttgaagctgataatgcaattgaaatcattggtacgcgacatggagagaaaaaagcagaaacattgttgacgagagaagaatacgcacaatgtgaagatatgggtgattattttagagtgccggcagactccagagatttaaattatagtaattatgttgaaaccggtaacgaaaagattacgcaatcttatgaatataactccgataatacacatattttaacggtggaagagataaaagaaaaacttttaacactagaatatgttagaaacgaattgaatgattataaagcttcaatgagatag

SEQ ID NO: 415485 - DNA, 1536 bp, Staphylococcus aureus
atgtcaaacatagcattttatgtcgtgagcgacgtacatggttatattttcccaacagattttacgagtagaaatcaatatcaacctatgggattgttactagcgaatcatgttatagaacaagacagaaggcagtatgaccaaagttttaaaatagataatggtgattttttgcaagggtcaccattttgtaattacttaatcgcgcatagcggcagtagccagcctttagttgatttttataatcaaatggcattcgactttggtacgcttggtaatcatgaatttaattatggattgccatacttaaaagacactttacgcagactcaattatccagttttgtgcgctaatatttatgaaaatgatagtacattgactgataacggtgtgcagtattttcaggttggagatcaaacggttggtgtgataggtttaacgacacaatttattccccattgggaacaaccagagcatattcagtcacttacgtttcatagtgcttttgaaacacttcaacaacacttacctgaaatgaagcgacatgcagatatcattgtggtttgttaccatggtggatttgaaaaggatttagaaaatggtacgccgaccgaagtattaacgggtgaaaatgaaggatatgccatgttagaagcgttttctaaagatatagatatctttattacgggtcaccaacatcgacaaattgctgaaagatttaagcaaacggctgtgattcaacctggtacgagaggtacaactgtaggcaaagttgtcttgagtactgatgaatatgaaaatgtatccgttgaatcatgtgaattacttcctgttatagatgattccacatttactattgatgaagatgaccaacatttacgaaagcagttagaggactggttagattacgaaattactacattgccatatgatatgacgattaatcatgcatttgaggcacgtgtggcaccgcatccttttactaattttatgaattacgctttattagaaaaaagtgacgcagatgttgcctgtacagctttgtttgattctgctagtggtttcaagcaagtcgtgacgatgcgagatgttattaacaattacccatttccaaatacatttaaagttttagctgtaagtggtgccaaacttaaagaagccattgaacgatcagcagaatattttgacgtgcaaaatgatgaagtaagtgtgagcgcagacttccttggacccaaaccacaacactttaattatgatatatatggtggcgtaagttataccattcatgttggaagaccaaagggacaacgtgtgagcaatatgatgattcaaggtcacgcagttgatttaaagcagacatatacaatttgtgtaaataattatcgtgcagttggcggtggtcagtatgatatgtttatcgacgcgccagttgtgaaagatattcaagttgaaggcgcacaattacttattgattttttatcaaataataatttgatgcgtatcccgcaagttgttgattttaaagttgaaaagtga

SEQ ID NO: 415486 - DNA, 1065 bp, Staphylococcus aureus; identical to SEQ ID NO: 409284

SEQ ID NO: 415487 - DNA, 261 bp, Staphylococcus aureus; identical to SEQ ID NO: 409283

SEQ ID NO: 415488 - DNA, 630 bp, Staphylococcus aureus; identical to SEQ ID NO: 409282

SEQ ID NO: 415489 - DNA, 663 bp, Staphylococcus aureus; identical to SEQ ID NO: 408855

SEQ ID NO: 415490 - DNA, 732 bp, Staphylococcus aureus; identical to SEQ ID NO: 409080

SEQ ID NO: 415491 - DNA, 1893 bp, Staphylococcus aureus; identical to SEQ ID NO: 408859

SEQ ID NO: 415492 - DNA, 1086 bp, Staphylococcus aureus; identical to SEQ ID NO: 408860

SEQ ID NO: 415493 - DNA, 705 bp, Staphylococcus aureus
atgagtgatttaaatgacgctatgttacttattaaaggtaatttaaatttagatcctgtagaagttagaaaacaaaaggaagctaacgtgttatttttagagccaaccgtttatgagaatagggatacaggtatcgaaacagaaggttcagttgacggcggttatatttataaacaatacgatgtacaaggtaccgaagcttataaagaccgtttgaacagtgatatacacatgtttaccaacacgcctaacatgaaagatgataactttagtggcactcaatcgggcgaggcaatgaaatacaaattattcggattagaacaacgtactaaaactaaagaaggattgttcactaaagggttaagacgtcgtgctaagttgttagagacaatacttaaaaatacacggtcgattgacgctaacaaagatttcaatactgttagatacgtatacaacagaaacttacctaaatcattaatcgaagaattaaaagcttatattgattctggcgggaagattagtcaaacaactttaatgtctctattctcgttcttccaagaccctgaattggaagtcaagaaaatagaagaagatgagaaagaatctattaaaaaagctcaaaaaggtatttataaagaccctagagacatcaatgatgacgaacaagatgatgatacaaaagatactgttgataaaaaggaatga

SEQ ID NO: 415494 - DNA, 303 bp, Staphylococcus aureus
atgacattaacagaatataactatcgaatgtatgcgaaagagtatgaaatgctaacccaagaattcgaacgttacaaacttgcgtttgctattcgtgatgctgcagctactaaaaatgttgggacagaaaataaacctaaagaggaatatgtttttaacaacgcaaacgacgtattgccttatgaagaaaatatccaacggcttaacgaaggtaaagatataagatttagtagcgaacgtgatgaatacgaaccacaaaataatgaattctttaaagttatagcagaatttaacaagcaatag

SEQ ID NO: 415495 - DNA, 189 bp, Staphylococcus aureus; identical to SEQ ID NO: 407433

SEQ ID NO: 415496 - DNA, 189 bp, Staphylococcus aureus; identical to SEQ ID NO: 407433

SEQ ID NO: 415497 - DNA, 189 bp, Staphylococcus aureus; identical to SEQ ID NO: 407433

SEQ ID NO: 415498 - DNA, 345 bp, Staphylococcus aureus
atgtcaacacttggtattacagatttaaatgttattgagcaaatgacattaacagaatataactatcgaatgtatgcgaaagagtatgaaatgctaacccaagaattcgaacgttacaaacttgcgtttgctattcgtgatgctgcagctactaaaaatgttgggacagaaaataaacctaaagaggaatatgtttttaacaacgcaaacgacgtattgccttatgaagaaaatatccaacggcttaacgaaggtaaagatataagatttagtagcgaacgtgatgaatacgaaccacaaaataatgaattctttaaagttatagcagaatttaacaagcaatag

SEQ ID NO: 415499 - DNA, 303 bp, Staphylococcus aureus
ttgagatatcaagatagagctgtttttcaattagaacaaatagcaacttacaatcctaaaactagcaaaaaagaaaacacgttaatcacttatgatgcgataccatgcaatattaatcctatttctagagcaagaaagcaacttgaatttggcgatttaaaaaacgatgtaagtgtcctgaggataaaagaatcaatatcttaccctgttagccacgtgttaattaatggcattcgctacaagatagttgatacaaggacatacagacacgaaacgtcatattatttagaagaggtcaattga

SEQ ID NO: 415500 - DNA, 312 bp, Staphylococcus aureus; identical to SEQ ID NO: 408087

SEQ ID NO: 415501 - DNA, 678 bp, Staphylococcus aureus; identical to SEQ ID NO: 408086

SEQ ID NO: 415502 - DNA, 315 bp, Staphylococcus aureus; identical to SEQ ID NO: 408085

SEQ ID NO: 415503 - DNA, 4440 bp, Staphylococcus aureus
atgcataaattgattataaaatataacaaacaattgaagatgctcaatttgcgagatggtaagacatatactattagcgaagacgagcgtgcagatattacgttgaaatcgttaggcgaagtcattcatttagaacaaaataatcaaggtacttggcaagcgaatcatacttctattaataaggtgcttgttagaaaaggtgaccttgatgacattacattacagctttatacagaagctgattatgcatcatttgcgtatccttcaattcaagatacgatgacaattgggccaaatgcgtatgatgatatggttattcaaagcttgatgaatgccatcattattaaagattttcaatcaatacaagaatcacaatacgtacgcattgtgcacgataaaaatacagatgtgtatattaactatgaactacaagagcaattaacaaacaaagcttacattggtgatcatatttatgttgaagggatatggctcgaagtacaagctgatggtttaaatgtattgagtcagaatacagtggcatcgtcattaattcgcttaacacaagagatgccacatgcacaggcagatgattacaatacgtaccatcgttcgccaaggattattcaccgtgaaccgaccgatgatattaagattgaaagaccgccacagccaatacagaagaacaatacagtgatatggcgttccattataccgccattagtaatgattgctttaactgttgtcatctttttagtgagaccaattggtatttatattttaatgatgattggtatgagtacagtaacgatagtatttggtattacaacgtatttctctgaaaagaaaaagtataacaaagatgttgaaaaacgagagaaagattacaaagcttatttggataataaatctaaagaaattaataaagcgattaaagcacaacgttttagtttgaattaccattatccaacggttgctgaaattaaagatatcgttgaaacgaaagcaccaagaatatatgaaaaaacatcgcatcatcacgatttcttacattataatttaggtattgcgaatgtagaaaagtcattcaaattagattaccaagaagaagaatttaaccaacgtcgtgatgaactattcgacgatgctaaagaattgtatgaattttacacagatgtagaacaagcaccattaatcaatgatttaaatcatggaccaattgcatatattggtgcacgacatctcattttagaagaattggagaaaatgctaatccaattgtcaacgttccatagttatcatgatttagagtttctatttgtgacacgtgaagatgaagttgaaacattgaaatgggcacgttggttgccacatatgacattgagaggtcaaaacattagagggtttgtttacaatcaacgaacacgtgaccaaattttaacgtcaatttatagcatgattaaagaacgtatccaagctgtgcgtgaacgcagcagaagtaatgagcaaattattttcacaccgcaattagtgtttgtcattacagatatgtcattaattattgatcatgtcattttagaatatgtaaaccaagatttatcagaatatggtatttcattaatctttgttgaagatgtgattgaaagtttgccagagcatgtagataccattattgatatcaagtctcgtactgaaggcgaactgattacgaaagaaaaagaattagttcaattgaaatttacacctgaaaatattgataacgttgataaagaatatatcgcgagacgtttggcgaatttgatacacgtcgaacatttgaaaaatgcaattcctgatagtattacatttttagagatgtataacgtgaaagaagtagatcagcttgatgtggttaatcgatggagacaaaacgaaacatacaaaacgatggcagtacctttaggtgtaagaggtaaagatgatattttatcattgaacttacatgaaaaagcacacgggccacatggtttagttgctggtaccactggttcagggaaatctgagattatccaatcatacattttatctttagctattaattttcatccacatgaagttgcgttcctattgattgactataaaggtgggggtatggcgaacttatttaaagatttagtccatttagttggtacgattacaaacttagatggcgatgaagcgatgcgtgccttaacatcaatcaaagccgaattgagaaaacgtcaacgtttattcggagagcatgatgttaaccatattaatcaataccataagttatttaaagaaggtgttgcaacagaaccaatgccacatttattcattatttccgatgagtttgccgaattaaaatcagaacaacctgattttatgaaagaacttgtatcaacggcacgtattggacgttcgttaggtattcatttaatacttgcgacacaaaaaccatcgggtgttgttgatgaccaaatttggtctaactctaaatttaaattggcattaaaagtacaagatagacaagacagtaatgaaattttaaaaacaccagatgcagcagacattacattaccaggtcgtgcgtatttacaagttggtaataatgaaatttatgaattattccaatctgcatggagtggtgcaacatatgacatcgaaggcgataaattagaagttgaagataagacgatttacatgattaatgactatggtcaacttcaagcaatcaacaaagacttgagtggacttgaagatgaagaaacgaaagaaaaccaaaccgagttagaagcggttatcgatcatatcgaatctattacaacacgattagaaattgaagaagttaagcgtccatggttaccaccattaccagaaaatgtatatcaagaagatttagtagaaacagatttcagaaaattatggtcagatgatgcaaaagaagtggaattaacattaggacttaaagacgtaccagaagaacaatatcaaggaccgatggtattgcaattgaaaaaagctgggcacatcgcgttaatcggaagtccaggatatggtagaacaacgttcttacacaacattattttcgatgttgcaagacaccatcgtcctgatcaagcacacatgtacttgttcgatttcggtaccaatggtttgatgccagtcacagatataccacatgttgctgattattttacagtagatcaagaagacaagattgctaaggcgatacgtatatttaatgatgaaatcgatcgtcgtaagaagattttaagtcagtatcgtgttactagtatttctgaatatcgaaaattaactggtgaaacaattccgtatgtctttattcttattgataactttgacgcagtaaaagattcacctttccaagaagtttttgaaaatatgatgattaaaatgacacgtgaagggctagcattagacatgcaagtaaccttaactgcttcaagagctaacgcaatgaaaacgccaatgtacattaatatgaaaacgcgtatcgccatgtttttatatgataaatcagaggtgtcgaacgtagtagggcaacaaaaatttgcggttaaagatgtagtgggtcgagcattgttaagtagtgatgacaatgtatcattccatattggccaaccatttaaacatgatgagactaaatcatataatgatcaaattaatgatgaagtatcggcgatgacagaattttataaaggtgaaacaccaaatgatattcctatgatgccagatgaaattaaatatgaagattacagagaatcattaagcttaccagatatagttgccaatggtgctttaccaattggattagattatgaaggtgttacactacaaaaaattaaattaactgaaccagcaatgatttcatcagaaaatccgagagaaattgcgcatattgccgaaattatgatgaaagaaattgacatattaaatgaaaaatatgcgatttgtatcgcagactcaagtggagagtttaaagcttataggcatcaagtggctaactttgccgaagaaagagaagacattaaagcgattcatcaactaatgattgaagacttaaaacaaagagaaatggacggtccatttgaaaaagattcactttacattatcaatgattttaaaacatatattgattgcacgtatatcccggaagatgatgttaaaaagcttattacaaaaggaccagaacttggcttgaacattttatttgtcggcattcataaagaattaatagatgcttatgataaacagattgatgttgcacgtaaaatgattaaccaatttagtataggtattcgtatttcagaccaacaattctttaaatttagatttattcaacgagaacctgttattaaagaaaacgaagcgtatatggtcgcgaatcaagcttatcaaaagattagatggtttaaatag

SEQ ID NO: 415504 - DNA, 1335 bp, Staphylococcus aureus
atggttaaaaatcataaccctaaaaatgaaatgcaagatatgttaacgcctttagatgctgaagaagcagctaaaacaaaattacgcttagatatgagagagattcctaagtcttcaattaaaccagaacattttcatttaatgtacttattagaacaacattctccatattttatagatgctgaattaactgaactacgtgacagtttccaaatacattatgacattaatgacaatcatacaccttttgataatattaaatcatttactaaaaatgaaaaattacgatacttactcaatatcaaaaatttagaagaagtaaatcgtacacgttacacatttgttttggcaccagatgagttatttttcacaagagatggattaccaattgctaaaacaagaggtttacaaaatgttgttgatccattaccggtgtcagaagctgaatttttaacaagatataaagcactggttatctgtgcattcaatgagaaacaatcatttgatgctttagttgaaggaaacttagaactacataaaggaacgccatttgaaactaaagttattgaagcggcaacgttagatttactaacggcatttttagatgaacagtatcagaaacaagaacaagattatagtcaaaattatgcatatgtacgcaaagtagggcataccgttttcaaatgggttgctatcggcatgacaacgttaagtgtgttattaattgcatttttagcctttttatatttttcagtaatgaagcataatgagcgcattgaaaaaggataccaagcatttgtaaaggatgattatacgcaagtactaaatacgtatgatgatttagatggaaaaaaattagataaagaggcactttacatttatgccaaaagttatatccaaacaaataaacaaggtttagaaaaagataagaaagaaaatttacttaataacgtgacaccaaattcaaacaaagactacttattatattggatggaattaggacaaggacatcttgatgaagcgattaatattgccacttatttagatgataacgatattacaaagttagcgttgattaataaattaaatgagattaaaaataacggagatttatcgaatgataaacgttctgaagaaacgaaaaagtataacgataaattgcaagatattttagacaaagaaaaacaagttaaagatgaaaaagcgaaatctgaagaagagaaagcaaaagcgaaagatgagaaattaaagcaacaagaagagaacgaaaagaaacaaaaagaacaagcacaaaaagataaagaaaaacgccaagaagctgaaagaaaaaaatag

SEQ ID NO: 415505 - DNA, 243 bp, Staphylococcus aureus; identical to SEQ ID NO: 415442

SEQ ID NO: 415506 - DNA, 459 bp, Staphylococcus aureus
atgttgatgaatagcgtgattgctttaacttttttaacagcatctagcaataatggcggacttaatattgatgtgcaacaagaagaggaaaagcgaatcaataatgatttaaatcaatatgatacaacgctatttaataaagatagtaaagaagtcaacgacgcgattgctaagcagaaaaaagaacgacaacaacaaataaaaaatgatatgtttcaaaatcaagcgagtcactcgactcgcttgaatgaaactaaaaaagtgttattttccaaatctaacttagaaaagacttcggagagtgataaaagcccctatattcaaaacaagcaggagaaaaaaatattcccgtacattttgatgtctgtaggggcttttttgactttaggatttgtcattttttcaattcataaagggagacgaacgaaaaatgaatcagcacgtaaaagtaacatttga

SEQ ID NO: 415507 - DNA, 903 bp, Staphylococcus aureus
atggttattatgaagaaaacaattttactgacgatgacaactcttactttatttagtatgtcgcctaactcggctcaagcatatacgaatgatagcaaaacattagaagaagcaaagagagcacacccaaacgcacagttcaaagtgaataaagacaccggcgcgtatacttatacatatgacaaaaacaacacgccaaacaacaatcatcaaaaccagtcacgtacaaacgacaatcatcaacacgcaaatcaacgtgattttaacaacaatcagtaccattcttcattaagtggtcagtatacgcacattaatgacgcaattgattcacacacaccgcctcaaacgtcaccaagcaatcctttgacaccagcaataccgaatgtcgaagacaatgacgatgaattaaataacgctttttcaaaagataacaaagggcttattacaggcatcgatttagacgaattgtatgacgaattacaaatcgccgaatttaatgacaaagcaaagactgctgacggtaaacctttagcattaggtaacggtaaaatcattgatcagcctcttatcacaagtaagaacaacttatatactgctggacaatgtacatggtatgtctttgataaacgtgccaaagatggacacacgattagtacattttggggagatgctaaaaactgggcaggccaagcttcaagcaatggcttcaaagtagatagacacccaacacgaggatcaattttacaaacagtaaatggtccatttggtcatgtagcctacgttgaaaaagttaatattgatggaagtattctaatttcagaaatgaactggattggtgaatatatcgtttcatcaagaaccatctctgcttcagaagtttcatcatataattacatccattaa

SEQ ID NO: 415508 - DNA, 1167 bp, Staphylococcus aureus
atgaaaacaatacatttgtttcgcatctaccactcttttttattgaaaaagtggtatttgattatctatttactatttatcttagcggcactccttattacattaacgacgatccaacatgtaacagaagatgacaatcattttaatataggtgtcgtagataaagatcaatcaagtgaaacgaaattaatcttaaactctattggtaaagggagtaacctaggaaaaaatgtaagcattaaagcatatgatgataagcaagcacatactttgttaaaaaaacataaacttcaaggctattttgtttttgataaaggtatgaccaaggcattttataaacaaggcgaactaccaatttcagtatatacatatgatcaacaatccatgaaaagtgtcgtgctatctcagctaacagattctgtttaccaacgtcttatgcgatcaatgggtggcatcttagcttttcaagacttagcaccgaaagcatcacattctgacagtatcaatgttatgactgatttgctgattacaggattaaaccgttcaggtgcatttaacttagaaccgattcatttatacgatacgggcagttattatgcaattacaggatttttagcaacggtattcatctttgcactatctttatttacagttttgaaaatgaatcaagatactgtattgaaagcgcgattgaaaatgtttcatttttctaaagagcgtttattaatcattcgtgcgttgattacatggttttatactatgttatggagtatcgttggtgtagtttggattgtgttcagtattccgaatacctttgaattatataattggccaacgttagccattcatttaagctattatgttacctttttaatactgtggttattactcatcgaacttttaacaacaggcttgttgaatagtattagtaaagtcatattagctattgtcatcctggtgttatctggtttaacaatacctacgatttttttacaacatatagcaaatggcgttttcaatattcaaccgttcgcagttgtaacaaatcaattgttagaaattattttaaacaactacattttagaactgcaccctagtttctatcttagcttcatcgcacttttgataattaatttagctgtattggtttggaggtatcgtcaatga

SEQ ID NO: 415509 - DNA, 921 bp, Staphylococcus aureus; identical to SEQ ID NO: 415465

SEQ ID NO: 415510 - DNA, 660 bp, Staphylococcus aureus
atgatagaaattaataatctttcaaagcgttaccgtaacaaacagattttcaatcatttaactatgtcctttgatagtaatcgtttaaccgtattacttggtgataatggtgctggaaaatcaacattacttcgtatgattgctggtattgaaaaagctaatgatggaactatcaactatttcggcgaaaaatggaatcaaagacaaatacaaaatcacatcggttatgtgccacaagacattgcgttatttgaacacatgacagtggctgaaaacattaaattttttaaatcactttgtaaaaatccaattaatgatacaactatcaacgaatatttacagcaattaaactttgatgatacgtctgccaaagtatctacattgtccggtggaaataaacgtaaaattaatatattagtaggtttactaggtcaacctcgaattctcattttagatgaaccgacagttggtattgatttaaaatctagacatgacatccaccaactacttaacatcatgaaatctaaatgtttaattatattaactacccatcatttagatgaagtggaagcacttgcagatgatatcaagttaattggccaagatcctttttatcaacatgttttagaggacaagcaatgggcttatacctattattaa

SEQ ID NO: 415511 - DNA, 393 bp, Staphylococcus aureus; identical to SEQ ID NO: 405158

SEQ ID NO: 415512 - DNA, 999 bp, Staphylococcus aureus
atgaaaaaagtgtcaattaaagatgttgctagagaagctggtgtatcagttacaactgtgtcacatattttaaatcataatgatagtcgtttttccgcaacaacgataaaaaacgtacatgctgtttcagaacgtttaggctatgcccctaataaacatgcaaaacaattgcgcggcagtaaaattcaaactattggcgtcattttacctagcttaacaaatccgtttttctcagcactgatgcaaagtattcatgaccataaaccatctgatgttgatttatgctttttaacatctacagcaactgatttgtatgacaatattaaacatttaattgatcgaggtattgacggattaattatcgcacaatacatatcatccccggacgccctaaataactatctaaagaaacatcatgtaccttatgtcgtactggatcaaaatgaccatcaaggctatacagattttgttcggacaaatgaatatcaaggtggacaacttgcagcacaacatttaatagaactcggtcacaaccatatgataattgttgcaccatatgacatgatggcgaatatgtcgactcgtgtcgctggatttgtcgatactttgcgcgcgaatcaattgccagaaccacaaatcgtccatactgaattatctaagcgcggtgggctaaccattgttgatgacatcatggttcaatctgccactgcaatcttcgctattaacgatgaactcgctattggcattttacgaggactaattgaacatggcatcagtatcccgaaagatatctcattaataggttatgacgacattgattatgcagcgtacgtctcgccacctttaactactgtggcacaacctataactgatattggcaaaacatctttaaccttattacttcaacgattacagcacttagataaatccattgatatgattgaattaccaacgactttaaaaattcgtgcaacaactggctatcatctttcaaactaa

SEQ ID NO: 415513 - DNA, 405 bp, Staphylococcus aureus; identical to SEQ ID NO: 414319

SEQ ID NO: 415514 - DNA, 1437 bp, Staphylococcus aureus; identical to SEQ ID NO: 413351

SEQ ID NO: 415515 - DNA, 702 bp, Staphylococcus aureus
atgattaaccacttagcactaaacacaccttacttcggaatactgttatccgttataccatttttcttagcgaccatattatttgaaaaaactaatcgtttcttcttattcgcaccgctatttgtcagtatggtatttggtgtggccttcctctatttaacaggcattccgtataagacttacaaaataggtggagacattatttacttcttcttagaaccggcaacaatctgttttgcgattccgttatataaaaagcgtgaagtgcttgttaaacattggcatcgtatcataggaggtattggtatcggtacagttgtagcgttattaattattttaacttttgcgaagttagcacaatttgccaatgatgttattttatcaatgttacctcaagcagcaactacagcgattgcgttaccagtatcagctggtatcggtggtataaaagaattaacatcattagcagttattttaaatggtgtcattatttatgccctaggtaataaattcttgaagcttttccgaattactaaccctattgcccgaggattagcacttggaacaagtggtcacacattaggtgtagcaccagccaaagaattaggacctgtagaagaatcaatggcaagtatagctttagtgttagttggtgtagttgttgtagcagttgtgcctgtctttgtagcaatattcttctaa

SEQ ID NO: 415516 - DNA, 741 bp, Staphylococcus aureus
atgaaagcattaatcatagatgatgagccattagcacgtaatgaattaacatatttattaaatgaaattggtggttttgaagaaattaatgaggcagaaaatgtaaaagaaacattggaagcactactgatcaatcaatatgacattatatttttagatgtcaatttaatggatgaaaatgggatcgaattaggagctaagattcaaaagatgaaagagccacctgcgattatttttgcaactgcacatgaccaatacgcagtacaggcatttgaattaaatgcgacagactatattttgaaaccgtttggtcaaaaacgtattgaacaagcagtcaataaagtgcgtgcgactaaagccaaagatgataataacgcaagtgcaattgcgaatgatatgtcggcgaattttgatcaaagcttacctgttgaaattgacgataaaattcacatgttaaagcaacaaaatattattgggattggcacacataatggtattacaaccatacatacaacgaatcataaatacgaaacaacagagccattgaatcgttatgaaaaacgattgaatcccacttattttatacgtattcatcgttcatatattattaacacgaaacacattaaagaagtgcaacaatggtttaactacacttatatggtaatattgacaaatggtgtcaagatgcaagttggacgttcatttatgaaagattttaaagcgtcgataggattactttaa

SEQ ID NO: 415517 - DNA, 1755 bp, Staphylococcus aureus
gtgctatcgctaacaatgttattacttgagcgtgtaggtttaattattattttggcctatgtgttgatgaatattccatattttaaaaacttaatgaatcgtcgacgtacatggaaagcacgttggcaattatgtattattttcagtttgtttgccttaatgtctaatttaactggtatcgtcatcgatcatcaacatagtttgtcaggaagtgtgtacttccgtttagatgatgatgtatctttagctaacacacgtgtattaacgataggtgtcgcaggattagttggtggcccttttgtaggtctatttgttggcgttatttcaggtattttcagagtgtatatgggtggggcggatgcacaagtttatcttatctcatctatatttatcggtataattgctggttattttggcttacaagctcaaagacgcaagcgttacccgagtattgcgaaaagtgccatgattggaattgttatggaaatgattcaaatgttgagcattttaacattttcccacgacaaagcatatgcggttgacctcatatcattaattgcactaccaatgattattgttaatagcgttggtacggcgatttttatgtctattatcatttcaacattaaagcaagaagagcaaatgaaggctgttcaaacacatgacgtactgcaattgatgaaccagacattgccgtattttaaagaaggattgaatagagaatcggcacagcaaattgcgatgattattaaaaatttaatgaaagtatctgccgtagcaattacaagcaaaaatgaaatcttatcgcatgtaggtgcaggtagtgatcatcacataccaacaaatgaaatattaacaagtctgtctaaagatgtattgaaatcaggaaagttgaaagaagtgcatactaaagaagagattggttgtagtcatccgaattgcccgcttagagcagctatcgtgataccacttgagatgcatggttctatcgtcggtacattgaagatgtattttacaaaccctaatgatttaacttttgtggaacgtcaacttgcagaaggattggcaaatatttttagtagccaaattgaacttggtgaagccgaaacgcaaagtaagttattgaaagatgctgagattaagtcattacaggcacaagtgagtccacattttttcttcaattcaattaacacgatttcagctttagttagaataaatagcgaaaaggcacgagagttactattagaattgagttattttttcagagcgaatttacaaggctcaaagcaacatacgattactttagataaagagttaagtcaagtgcgtgcatacttatcactcgaacaagcacgttatccaggaagatttaatatcaatattaatgttgaagacaaatatcgcgatgtgcttgtaccaccatttttaattcaaattttagttgaaaatgccatcaaacatgcgtttacgaatcgaaagcaaggtaacgatattgacgtgtcagtgattaaagaaactgcaacacatgtacgtattattgtacaagataatggtcagggtatttctaaagataaaatgcatttgttgggagaaacatctgtagaatcagaatctggaactggtagtgctttagaaaatttaaacttacgcctaaaaggattatttggaaaatccgcagcattacaatttgaatcgacatcgagcggtaccactttttggtgtgtacttccttatgaaagacaagaggaggaataa

SEQ ID NO: 415518 - DNA, 1056 bp, Staphylococcus aureus
gtgaaagctttagtaaaaacaagagaaggacatggcaacttagaacttcttgataaagaagttgcaacaccgctagatgataaagtaaagattaaagtacattatgcaggaatttgtggcacagacattcatacttatgaagggcattataaagttaattttccagtgacattaggtcatgaattttctggtgaaatcgttgaagttggagcagacgttaaagattttaaagttggtgaccgtgtcacttctgaaactacattctatgtttgtaatgagtgtgaatactgtaaatcaaaagactataatttatgcaaccatcgaaaaggtattggaacacaagttgatggcgcatttactaattatgtcattgcacgtgaagaaagtttgcatcatattccagacgaagtatcgtatcagtctgcagctatgacagaaccattagcatgtgcacatcatggcgtttctaagattcaagtgaactctggcgatgtagcagttgtaatgggacctgggccaatcggattacttgtagcacaagtgttgaaaagtaaaggcgcaactgttgtggtaactggattggacaatgacaaagtcagattagataaagcagaagcattgcacatggattatgtagtcaatttacaacaaacagacttaaaaacgtatatcaatggaattacagacggttacggtgcagatgttgttgttgaatgttcaggtgcagttccagcagcacgacaaggtttagatattatacgcaaaaaaggtttctacagtcaaataggtatttttaaggatgctgaaattccatttgatatggaaaaagtgattcaaaaagaaataacagttgttggtagtagaagtcaaaagccagcagattgggaaccttcattgcaacttatggcggatggtttagtaaatgctgaagctttggtgacaaaaatatatgatatttcgaaatgggacgaggcgtatcaacatttaaaatctggcgaaggtattaaagcattacttaagccgctcgatttagatgaaaatgaaggagagaattaa

SEQ ID NO: 415519 - DNA, 1260 bp, Staphylococcus aureus
atgagttacttcactgattttgtaaggggatttttagatttaggtgcaactgttattttaccggttgtcatattcttgcttggcctattctttaggcagaaaattggagcggcatttaggtctggtttaacaataggtgtggcttttgtagggattttcttagtcatcgatttattagttaaaaatttagggccagcagcacaagcgatggttaaaaatttaggcgtcagtctgaatgtgattgatgtaggttggccagcaacatcatctatcgcttgggcatcatctgtcgcagcatttattattccactcggaatcatagttaacgttgtattgctagtaactaaagtgacaaagacgatgaatgtagatatttggaatttttggcattatacgtttacagcagcaatggtttatgccgtatcaggcagtatttggcaagcgttattagcagcagttattttccaagttatctgtttgaaagtagcagattggacagcaccgatgatgagtgagttctttgatttaccaggtgtatcgattgcgacaggaagcacgatttcttatgcaccaggtatttacttagttaaattgttacaaaaagtacccggtctgaataagttagatgctgatcctgaaacaattcaaaaacgttttggcgcatttggagagtctatatttgtcggcttaattttaggtttaggtattggtgtgttagcaggttacaaacctggagacatcattaatttaggaatgtcaatggctgcagtaatggtattaatgcctagaatggtaaaaatcttaatggaaggtttaatgccagtttcagagtctgcaagaacatggctaaataaacgttttggcgaacgtgaaatttatattggattggatgcggctgtagcattaggtcatccagcggttatttcgacagcattaattttagtacctatcactgttttattagccgttattttaccaggaaaccaagtactaccttttggtgacttagcaactataccatttgttgtcgcgtttattgttggtgcagcaagaggaaacattattcattctgtcattgtgggtacgattatgattgcaatttcattatatattgcaacagacgtagcacccattttcacagatatggcgaaaggtacgaatgtacaaatgccaaaaggttcatctgaaatttcaagtattgatcaaggtggtaatatcgttaactatcttatctttaaactatttagtctattcaattaa

SEQ ID NO: 415520 - DNA, 468 bp, Staphylococcus aureus; identical to SEQ ID NO: 415470

SEQ ID NO: 415521 - DNA, 2097 bp, Staphylococcus aureus
atgaacggggataatcagcaaatactcagagaaattgtattgaatcctactattcatggtaaagaacttgaatcgatatttggtttgtctcgtagacaactaggatatcgcattcaaaaaatcaatttgtggcttgaacaagagggttatccaaaacttgaaagaacaagccaaggaaattttattgtaagttctgaaatcatgacgttattcaagcgagatgtatcggagcagcaaatgttaaacggcaacaatgtcatttttagcatagaaacacgtcgttattatttaatgctcatgctttttagtaaggaaaatgcaatgtctctaaaccatttttcaattgatttacaagtcagtaaaaatactgtcattcacgatataaatcatgtgaaagagcaattggaagatcatggtttgtcacttaagtattctcgaaagcatggttatgaaattgttggtgatgaatttgaagttcgccgtttcttcattaagttgattgatcaaaggttgaatcatgatattactaaaagtgaagttttaaaggcgctcaacttaacattcgaagatatcgcatatcaaaaagacaagatcaaacaggtagaacaatttttgaagagtcgctttatagacaaatcacttagttcattgccttatgtcctttgtgtgattcgtagacgaattcaaagtggtcatgtgatgaatccattaaatattaattatcagtatttgagggatacgaaagaatatcaagcaacggagattatgacgcaacatgagcctgatttgccagaagcggaaaagttatatttgacattacacttactttcaacaagtgtgcaatggactgatttgcaggaatcagataacatatcgaatttaacgatggccatcgctcaaatgattcaccattttgaacaaatcacttttattaacattgaagataaggagaaattatcacagcaactcttgttacatttaacgcctgctttttataggattaaatataacttaacggatcgtgatgaattaataaatcctttacaaggaaattatcaatccttatttcatatggtgaaacaatcatgtcaatcgttaactgaatatttcggaaaatcgttgcctgataatgaaatagcatatttaaccatgttgttcggaggtagtttgagacgtcaagatgaaaacttcgatggcaagataaaagctattatcgtgtgtacacaaggcacgtcagtatcacaaatgatgttatacgagttgcgaaacttatttccagaaattattttcttagatgcgatttcacttagaacatttgaaaattacacattagattatgacatcgtcttttcaccaatgtttgtcctaacacataaaaaattatttatcacaaaagtagctttatctgaaaatgagcaacgaaagttacgtaaagaagtgatgaagtacattaataaggaatcggctgacattgataaggaaataaacaagttaatggcattaattgaacgcacaacgacagttaatgacattacagaactacgtgatggtttagaagattttattgccaattataattcaatttcaaccattaatggatcgattgtcacacaaaataagacattagatttagctgacttgataccggcaaggcacgtgaaaagaatgcatcatgttgaaaatattgatgaagctattgctaaagcaagtgatgtgttagttgctaatcattttattgatattaaatatattcatgagatgcaacaggtatttgatgattcgtatatggttatcatgcaaaatattgctattccacatgcatactctgaaaagcatgtacataaaacagcgatgagtatgttgatattacaagaaccaatatacatgtcagatggcacagcaatccatattattgtacctattgctgctgttgataaagtgacacacttaagagcgttactacaattgagagatgtggcgcaagacaatgacgcaattaagcgcatcatacaaagtcgcaaaaattctgatgtaaatgagattttaaaaaattattcaaataaagaagcgagggaaaatggatgggacagcaattag

SEQ ID NO: 415522 - DNA, 1530 bp, Staphylococcus aureus; identical to SEQ ID NO: 413355

SEQ ID NO: 415523 - DNA, 1146 bp, Staphylococcus aureus
atgcttacagaacaagagaaagacattatcaaacaaacggtgcctttacttaaagagaaagggacagaaattacgtcaatcttttatccaaaaatgtttaaagcgcatcctgaacttttaaacatgtttaatcaaacgaaccaaaaacgaggcatgcaatcttcagcattagcacaagctgtaatggccgctgcggttaatatcgataacttaagtgttattaaaccagtcattatgccagtcgcatataaacactgtgcattacaagtttatgctgaacattatccaattgtgggggaaaatttattaaaagcaatccaagacgtgacaggtttagaagaacatgaccctgtgattcaagcttgggcaaaagcatatggtgttattgcggatgtgttcatccaaattgaaaaagaaatttatgatcaaatgatgtggattggttttaaaccattcaaaattaccaatattaaacaagaatctgaagacattaaatcatttacagttgaaactgaagaatatgactttagtgaatttacaccaggccaatacatcacagttgatgtttctagtgataaacttccatatagagctaaacgtcactattctatcgtatcaggtgaaaaaaaccatttaacttttggcgttaaacgtgatgtcacaacagaacatgaaggcgaagtttcaacaattttacacgatgagattaaagaaggcgatatgattaatttagctgcgcctgtaggtggattcgtattagagaatacgactgaaccacaacttttcttaggttcaggtattggcgtcacacctttagtagcaatgtatgaagctgcctctgccaaaggtttagatacacagatggttcaagttgctgaaaatgaacaacatttacctttcaaagacaacttcaacagtatcgcaagccattatgacaacgctaaattatatacacacttaaaagataaacaaggctatattggcactgaagaattacaagcatttttagcaaataaacctgaaatttatatctgtggtggtacaaaattcttacaatctatgatcgaagcacttaaatctttaaattacgatatggatcgcgtacactacgaaacatttattccaagactaagcgttgcagtataa

SEQ ID NO: 415524 - DNA, 174 bp, Staphylococcus aureus; identical to SEQ ID NO: 405125

SEQ ID NO: 415525 - DNA, 357 bp, Staphylococcus aureus; identical to SEQ ID NO: 405124

SEQ ID NO: 415526 - DNA, 1476 bp, Staphylococcus aureus
atgaagtttaaaagactagcaactatattttcagcagtattagtgttatcaggatgtggctcaatgcattcatctggcaaagacttaaatatttcgttaccgttaaaaacaaagtctattgcaccttatgaaacagatgtaccagttaagattggtgctgcagaatcattatttaaaacaaatgatcaaggaaaaatagaaaaagcattagtgaaatcgtatcatcaaccaaatgatacaacgttagatatagaattaaaagataatattaaatttcaaaacggtcaaaaattgactgcagaaaaagtgaaatctagccttgaaaatagcatgaaaaaaagcgacttggtcaaatattcattaccaatatcatcaattaccgctaaaggtcaaaaactgacaattaaaaccaactccgcttaccctgaacttgtatctgaattagctaatccttttatggcaatttattatacagatgctaaatcagatgttaatcaaactcctgttggtacaggcccttaccaaataaaagattataagcaatctcgaaaaatatcattgtcgaattttaaggactattggcaaggtaaaccgaaacttgatcatattactgtgacgtaccaagaagacggcaataatcgcgtcagaaatttagaatctcaaaaagatgatttaataactgatgtcccagttaataaagttcatgacatagaaaataatcaaaatttaaaagtgtcaaaagaatctggatttagaacttctttacttatgtataatcatactaataaaaaaatgactaaatccgttcgtgaagcattagatcatatcattgatagacaaggtattgcagatcatatttatcaaggttatgcgaaacctgcaacgagtccatttaatgataaaattccatatattaaagaacctaagttaaccaaacaaaatatcgaacaagcaaaaacgttattagctaaagatggttatacaaaagaacaccctttaaaaattaagttaattacgtatgacggtcgtccagagctatcgaaaattgcgcaagtattacaatcagatgctaaaaaagcaaatattgaaatcgacattaaaagtgttgatgacatagaaggttacttaaaagaccgttctgcatgggatgcaacgatgtatagtttcggaacaatccctcgcggtgatacaggttatttctttaatcaagcatataaaaaagatggtgctattaataaaggagactacaataatagcaacgtcgatgatttaattaatcaattgaatcatactgtagatgttaaggaacgtcacaatatttctaatgatattattaaattatcaagtcgagatgtaccaaacagttatattgcttacaacgatcaaatagtcgctgctaactctaaggttaaaaattataaagtaacacctgaaggtatctatttaatcgattatcgaacaacgattgaacgataa

SEQ ID NO: 415527 - DNA, 1506 bp, Staphylococcus aureus
atgaatttcgattggataaaaacgcgttcagacttcgatgatgacaagcctgccgttattgatcacgcaaaacaaacatcttggacataccaacaactcaatgcacgcgctgataatatggcacattatttaacatctcaaggtgttaaaaaaggcgatgttatcggtatttttgcgccaaatgatattgcaatattagatttattgtttgcttgttttaaaacaggtgcggtttttttaccattgaattggcggcttaacccaaaagaaattgcagccattgtggaagatgcacaattaaaactgctcttctatgctgaaaaacatttaagttcactcaccgatattgaccaaaacttattgcatatggatattgatgtggcgcaatatgatgaaatcgtaaatccagattatcaccaaccttttcaagcaacacctgttgaaccacaagatcttgcagcattaatttatacaagtggtacaaccggatcacctaaaggtgtgatgttctcatatgaatcatttgttcataacggtgcaaacttagagctgacgtacaagttcaattcaaactatattacgattgtatcaacaccaatgttccatgttttagggtttaacgatactgtattaccagtattaatgtcaggtggcacacttattcttcaacgttactttaacggcgaagaattgaatgacatgattgcacaatatcaccctacatttattatcatgattccgacaatgtattatagtacgctacgtgctagtaattttaatcctgaaaattttagagctatggattatatcatccaaggtggttcacaaccattaccaagtatccaagcagcttttaaacaatatggcataaacattattaacggctatggtttaactgaagcacctcttgtacttgttaatacaccggaaaattcaaaacgtaagccaatgagtattggtaaagcagtcatgttcgttgatgcacgtatccttgatgataacggtgaggaagtacctactggtgagattggcgaacttgcaattaaggctaaaaatgtcacgccaggatattggaataaaccagcagagactgccaaagcatttcatggtcgttatttattaactggtgacttagcgaagatggacgacgatggcgatatatttattattgaccgcaaaaaagaattaatcataactggtggcgaaaatgtcttaccatctgaagtcgaaaatgctttagctgagcatccactagtagaccggtgtgtggtcgttggctatgatcatccaaaatatggtgaatcaattgctgcagccattatacttcgcgaagatgaacctcattacgctgaaattttagatcaacatatgcgaagtcgtttagcaggttataaagtcccaagaatgtatgtaccagtgacacatatgccgttaaacagtacgcagaaaccagataaacttgcgattcgacaaatgatgaatgacaaagtctcacaaacactttaa

SEQ ID NO: 415528 - DNA, 1212 bp, Staphylococcus aureus; identical to SEQ ID NO: 415475

SEQ ID NO: 415529 - DNA, 1185 bp, Staphylococcus aureus; identical to SEQ ID NO: 413356

SEQ ID NO: 415530 - DNA, 1896 bp, Staphylococcus aureus
atgaaaaagcaaataatttcgctaggcgcattagcagttgcatctagcttatttacatgggataacaaagcagatgcgatagtaacaaaggattatagtaaagaatcaagagtgaatgagaaaagtaaaaagggagctactgtttcagattattactattggaaaataattgatagtttagaggcacaatttactggagcaatagacttattggaagattataaatatggagatcctatctataaagaagcgaaagatagattgatgacaagagtattaggagaagaccagtatttattaaagaaaaagattgatgaatatgagctttataaaaagtggtataaaagttcaaataagaacactaatatgcttactttccataaatataatctttacaatttaacaatgaatgaatataacgatatttttaactctttgaaagatgcagtttatcaatttaataaagaagttaaagaaatagagcataaaaatgttgacttgaagcagtttgataaagatggagaagacaaggcaactaaagaagtttatgaccttgtttctgaaattgatacattagttgtaacttattatgctgataaggattatggggagcatgcgaaagagttacgagcaaaactggacttaatccttggagatacagacaatccacataaaattacaaatgagcgtataaaaaaagaaatgatcgatgacttaaattcaattatagatgatttctttatggagactaaacaaaatagaccgaattctataacaaaatatgatccaacaaaacacaattttaaagagaagagtgaaaataaacctaattttgataaattagttgaagaaacaaaaaaagcagttaaagaagcagacgaatcttggaaaaataaaactgtcaaaaaatacgaggaaactgtaacaaaatctcctgttgtaaaagaagagaagaaagttgaagaacctcaattacctaaagttggaaaccagcaagaggttaaaactacggctggtaaagctgaagaaacaacacaaccagtggcacagccattagtaaaaattccacaagaaacaatctatggtgaaactgtaaaaggtccagaatatccaacgatggaaaataaaacgttacaaggtgaaatcgttcaaggtcccgattttctaacaatggaacaaaacagaccatctttaagcgataattatactcaaccgacgacaccgaaccctattttagaaggtcttgaaggtagctcatctaaacttgaaataaaaccacaaggtactgaatcaacgttgaaaggtattcaaggagaatcaagtgatattgaagttaaacctcaagcaactgaaacaacagaagcttctcaatatggtccgagaccgcaatttaacaaaacacctaagtatgtgaaatatagagatgctggtacaggtatccgtgaatacaacgatggaacatttggatatgaagcgagaccaagattcaacaagccaagtgaaacaaatgcatacaacgtaacgacaaatcaagatggcacagtatcatacggagctcgcccaacacaaaacaagccaagtgaaacaaacgcatataacgtaacaacacatgcaaatggtcaagtatcatacggtgctcgcccaacacaaaaaaagccaagcaaaacaaatgcatacaacgtaacaacacatgcaaatggtcaagtatcatatggcgctcgcccgacacaaaaaaagccaagcaaaacaaatgcatataacgtaacaacacatgcaaatggtcaagtatcatacggcgctcgcccgacatacaagaagccaagcgaaacaaatgcatacaacgtaacaacacatgcagatggtactgcgacatatgggcctagagtaacaaaataa

SEQ ID NO: 415531 - DNA, 1764 bp, Staphylococcus aureus; identical to SEQ ID NO: 413357

SEQ ID NO: 415532 - DNA, 756 bp, Staphylococcus aureus; identical to SEQ ID NO: 414317

SEQ ID NO: 415533 - DNA, 2250 bp, Staphylococcus aureus
atgttagaaacaaataaaaatcatgcaacagcttggcaaggatttaaaaatggaagatggaacagacacgtagatgtaagagagtttatccaattaaactacactctttatgaaggtaatgattcatttttagcaggaccaacagaagcaacttctaaactttgggaacaagtaatgcagttatcgaaagaagaacgtgaacgtggcggcatgtgggatatggacacgaaagtagcttcaacaatcacatctcatgatgctggttatttagacaaagatttagaaacaattgtaggtgtacaaactgaaaagccattcaaacgttcaatgcaaccattcggtggtattcgtatggcgaaagcagcttgtgaagcttacggttacgaattagacgaagaaactgaaaaaatctttacagattatcgtaaaacacataaccaaggtgtattcgatgcatattctagagaaatgttgaactgccgtaaagcaggtgtaatcactggtttacctgatgcatacggacgtggacgtattatcggtgactatcgtcgtgtagctttatatggtgtagatttcttaatggaagaaaaaatgcacgacttcaacacgatgtctacagaaatgtcagaagatgtaattcgtttacgtgaagaattatcagaacaatatcgtgcattaaaagaattaaaagaacttggacaaaaatatggtttcgatttaagccgtccagcagaaaacttcaaagaagcagttcaatggttatacttagcataccttgctgcaattaaagaacaaaacggtgcagcaatgagtttaggtcgtacatcaacattcttagatatctatgctgaacgtgaccttaaagcaggcgttattactgaaagcgaagttcaagaaattattgaccacttcatcatgaaattacgtattgttaaatttgctcgtacacctgattacaatgaattattctctggagacccaacttgggtaactgaatctatcggtggtgtaggtattgacggacgtccacttgttacgaaaaactcattccgtttcttacactcattagataacttaggtccagctccagaaccaaacttaacagtattatggtcagtacgtttacctgacaacttcaaaacatactgtgcaaaaatgagtattaaaacaagttctatccaatatgaaaatgatgacattatgcgcgaaagctatggcgatgactatggtatcgcatgttgtgtatcagcgatgacaattggtaaacaaatgcaattcttcggtgcacgtgcgaacttagctaaaacattactttacgcaatcaatggtggtaaagatgaaaaatctggtgcacaagttggtccaaacttcgaaggtattaacagcgaagtattagaatatgacgaagtattcaagaaatttgatcaaatgatggattggctagcaggtgtttacattaactcattaaatgttattcactacatgcacgataaatacagctatgaacgtattgaaatggcattacatgatacagaaattgtacgtacaatggcaacaggtatcgctggtttatcagtagcagctgactcattatctgcaattaaatatgcacaagttaaaccaattcgtaacgaagaaggtcttgtagtagactttgaaatcgaaggcgacttccctaaatacggtaacaatgacgaccgtgtagatgatatcgcagttgatttagtagaacgcttcatgactaaattacgtagtcataaaacatatcgtgattcagaacatacaatgagtgtattaacaattacttcaaacgttgtatacggtaagaaaactggtaacacaccagacggacgtaaagctggcgaaccatttgctccaggtgcaaacccaatgcatggccgtgaccaaaaaggtgcattatcttcattaagttctgtagctaagatcccttacgattgctgtaaagatggtatttcaaatacattcagtatcgtaccaaaatcattaggtaaagaaccagaagatcaaaaccgtaacttaactagtatgttagatggttacgcaatgcaatgtggtcaccacttaaatattaacgtatttaaccgtgaaacattaatagatgcaatggaacatccagaagaatatccacagttaacaatccgtgtatctggttacgctgttaacttcattaaattaacacgtgaacaacaattagatgtaatttctcgtacattccatgaaagtatgtaa

SEQ ID NO: 415534 - DNA, 1557 bp, Staphylococcus aureus
atgacggcatacaaaccttatagacatcaattgagacgatcgttatttgcgtctactatttttccagtatttttagtcattattattggactagtaagcttctatgccatctatatttggattgagcatcgtacgattcatcaacatgttgatgaaagtcagtcatctttacatcacactgaaaagcagattcagacatttattacacagcataataattcgtttcaagagctcgatttaacaaatcatcatgatgttaccgctacaaaacgtgaattattaaaattaatacaccaacagcccgcaacactttattatgaattatctggaccaaatcagtttataaccaataattatgaacatttaaacactaaaaatatgtatttattttcaacgcatcagcttaaattcaataatagtacatatatgcttaaaatttatatggctaacaccccacgtttaagtgaaattaagaaagatagccgacaattcgcacttatcgttgatcaatatgacaatattttatacgccaacgatgaccgttttactataggtgaaaagtatagaccgcaacaattcggatttatgaatgaatctgtaaaattaaaccatgctgaccatcgtctcattatttataaagatatacatgaaaacattgaagatggtatcacgttgttaattgttatggccgtagttcttgttttactagtaatatttggtttcattagcgcagataatatggctaaacgacaaacaaaagatatcgaaacgattattcaaaaaatttactatgccaaaaatcgtcatctaggtacatatacgcctttaaaaaacaacagtgaactagaagaaattaataattatatttacgatttatttgaatcaaatgagcaactgatccattctatcgagcatacagaacgtcgcttgcgtgatattcagttaaaggaaatagaacgccaattccagcctcatttcctattcaatacgatgcaaacaatacaatatttaattacgttatctccgaaattagcacaaactgtggtccaacaattatcgcaaatgttacgttactcattacgtacaaactcacatacagtggaattaaacgaagagttgaactacattgaacagtatgttgcaatacaaaacatccgttttgatgacatgattaagctccatattgaaagttctgaagaagcgcgtcaccagacaattggtaaaatgatgcttcagccactcatagaaaatgctattaaacatggtagagatactgagtcattggacattactatacgcctgacattggcacgtcagaatttacatgttttagtttgcgacaatggtatcgggatgtcgtcatctcgcctgcaatatgtacgccaatctcttaataatgatgtatttgatactaagcatttgggattaaatcatttacacaataaagcaatgattcaatatggttcacatgcacgacttcatattttttcaaagcgtaatcaaggtacgttaatttgttataaaataccactttcaagggggaatgtagatgtttaa

SEQ ID NO: 415535 - DNA, 759 bp, Staphylococcus aureus
atgtttaaggtagttatttgtgatgatgaacgaattattcgagaaggtttaaagcaaatcattccttggggagactatcatttcaatacaatatacactgctaaagatggtgttgaagcattatcactaattcaacaacatcagccagaattagtaattactgatattcgtatgccacgtaaaaatggcgtcgatttactcaatgatattgcgcttctagattgtaatgtcatcatattatcgagttacgatgactttgaatatatgaaagccggcattcaacatcatgttcttgattatttattaaaaccagtagaccatgcacaattagaagttattttaggaagacttgtccgtaccttattagagcaacaatcacagaacggccgtagcttagcatcttgtcatgatgccttccaaccactattaaaagtagaatacgatgattattatgtaaatcagattgttgatcaaattaagcaatcttatcaaacgaaagtgactgtttcagatttaattcaacatatcgatgttagtgaatcgtatgcgatgcgaacatttaaagatcatgttggtattacaattgtcgattatttaaatcgctatcgtattttacaatctctgcaattgttagatcgacattacaaacactatgaaattgcagacaaagtaggcttttcagagtataaaatgtttagctatcattttaaaaaatatttacaaatgtcgccaagtgattattgtaagcaagctaaatag

SEQ ID NO: 415536 - DNA, 1380 bp, Staphylococcus aureus
atgaacttttttgatatccataagattccgaacaaaggcattccattatcggtacaacgtaaattatggcttagaaacttcatgcaagctttctttgtagtgttctttgtttatatggctatgtatttaattcgaaacaactttaaggcggcccaaccgtttttaaaagaggaaattggattatctacattagaacttggttatatcggattagcatttagtatcacgtacggtttagggaaaacattacttggatattttgtcgatggacgtaacacaaaacgtattatctcgttcttacttatcttatctgcgattacagttttaattatgggatttgttttaagttactttggttctgtaatgggattattaattgtactttggggacttaacggggtgttccaatcagttggtggacctgcaagttattcaacgatttcaagatgggcgccaagaacgaaacgtggccgatacttaggattttggaatacatcacataatatcggtggtgccattgcaggtggtgttgcactttggggtgctaatgtattcttccatggaaatgttatagggatgttcattttcccatcggtgattgcattacttattggtatcgcaacattatttatcggaaaagatgatccagaagaattaggatggaatcgtgctgaagaaatttgggaagagccggtcgataaagaaaatattgattctcaaggtatgacgaaatgggagatctttaaaaaatatatcctgggaaatcctgttatatggattctatgtgtttcaaacgtctttgtatacattgtacgaatcggtattgataactgggcaccgttatatgtgtcagagcatttacactttagtaaaggcgatgcagttaatacgatattctactttgaaattggtgcattagttgcaagtttattatggggctacgtatcagacttattaaaaggtcgtcgtgcaattgtagctattggctgtatgtttatgattacatttgttgtcttattctacacaaatgctacaagtgtcatgatggttaacatttcattgtttgcattaggtgcgttaatctttggtccgcaattattaattggtgtatcattgactggttttgttcctaaaaatgccatcagtgtagcaaacggaatgacaggttcattcgcgtatctattcggtgactcaatggcgaaagttggtttggcggctattgctgatccaacacgtaacggtttaaacatctttggatatacattaagtggatggacagatgttttcatcgtcttctatgttgcattattcctaggcatgattctattaggaatcgttgctttctatgaagaaaagaaaattagaagtttaaaaatttaa

SEQ ID NO: 415537 - DNA, 495 bp, Staphylococcus aureus; identical to SEQ ID NO: 405107

SEQ ID NO: 415538 - DNA, 1041 bp, Staphylococcus aureus
atgacaaaattaaaagttggtgtgataggtgttggtggcattgcacaagaccgtcatattccagcattgctgaaactcaaagacacagtctcattagttgcagtacaagatattaatacagtgcagatgattgatgttgcgaagcgctttaatatacctcaggcagttgagacacctagcgagctgtttaaacttgttgatgcggtggtcatttgtacacccaataaattccatgctgatctttctatagaagcattgaaccatggtgtccatgtcttatgcgaaaagccaatggcaatgacgacggaagagtgtgatcgcatgattgaagcggctaataaaaatcacaaattattaactgtcgcttatcattatcgtcacacagatgtcgctatgactgctaaaaaagcaattgaagcaggtgtggttggtaaaccattagtagcacgtgtacaagcgatgcgtaggcgtaaagtacctgggtggggcgtttttaccaataaagcgttgcaaggtggcggtagtttaatcgattatggttgccacttgttagacttatctttgtggctattaggtaaagatatggtgccgcatgaagtgctaggaaaaacatataatcaattgagcaaacaaccgaatcaaattaatgattggggaacatttgatcacactaaatttgatgtcgatgatcatgttactagttatatgacatttgccaatcgagcaagcatgcagtttgaatgttcgtggtctgcaaatataaaggaagataaggtacacgttagtttatcaggagaagatggcggtatcaatttatttccatttgaaatatatgagccccgctttggaactatttttgaaagcaaagctaatgttgagcataacgaagacattgctggtgagagacaggcgcgtaactttgtcaatgcgtgtttaggtatagaagagattgtggtgaaaccggaagaagcacgcaatgtaaatgcccttatagaagcgatttatcgtagcgatcttgataacaagagcatacaactttaa

SEQ ID NO: 415539 - DNA, 1077 bp, Staphylococcus aureus
atgacgattaaagttggaatcattgggtgtggtggtattgcgaatggcaagcacatgccaagtttacaaaaagttgaaaatgttgaaatgatcgcattttgtgacgtagacatttcgaaagcagcgagtgcggcagaagcatacggaactgacaatgcaaaggtttatgatgattacaaagcattgttaaaagatgacacgattgatgttatccatgtttgtacgccaaatgactcgcattgtgaaattactgtagcagggttgcatgccggtaagcatgtgatgtgtgaaaaaccaatggctaaaacgacagcagaagctcaaaaaatgatagatacagctaaatcaacaggtaaaaaattaacaataggttatcaaaatcgcttcagaccagatagtcaatttttacatcaagcagcgcaacgtggcgacttaggagacatttacttcggaaaggcacatgccattcgtcgtcgtgcagtaccgacatggggtgtctttctaaacgaagaagcccaaggtggaggacctttaatcgatattggtacgcacgcattagatttaacgttatggatgatggataattatgaaccagaatcagtgatgggttcaacattccataaattaaataagcagcatgatgcggcaaacgcttggggttcatggaatccagatgaatttacagttgaagactctgcgtttggctttattaaaatgaagaacggagcgacgatcattttagaatccgcttgggcgattaattctttagaagtggatgaggcaaaatgttcattatcaggaacgaaagcaggtgctgatatgaaagatggtctacgtattcatggtgaagatatgggcacactttataccaaacacgttgaattggaaaacaaaggcgtcgacttttatgaaggtaatgaagtggatgaagctgaagaagaagcaaaagcttggattgatgcagttgtaaatgatactgaaccagttgtgaaaccggaacaagcaatggtagttacaaaaattcttgaagcgatttatcagtctgcaaaatcaggcaaagcaatttactttgaataa

SEQ ID NO: 415540 - DNA, 840 bp, Staphylococcus aureus
atgacaaagaagaaaaacatattaaaagcaatcggtatttacagttttatagcgatgatgtttgtcatcattttatatccactactgtggacatttggcatttcccttaatccaggtacgaacttgtatggtgccaaaatgataccagacaatgcaacatttaaaaattatgcattcttactattcgatgacagtagtcaatacctgacttggtataaaaatacgcttatcgtagcatctgcaaatgcactgtttagtgtgatatttgtcacgttaacagcatatgctttttctagatatcgctttgttggtcgtaaatacgggctgattacatttttgattttacaaatgttccctgtattaatggcaatggtcgcaatctatattttgctaaatacaattggtttattagattctttatttggactaacactggtatatattggtggatcaataccgatgaatgcctttttagtgaaaggttacttcgatacgattccaaaagaacttgatgaatctgccaaaattgatggtgcagggcatatgcgtattttcttacaaattatgcttccattagctaagccgattttagcagttgttgctttgttcaattttatgggaccatttatggactttatattacctaaaatactattaagaagtcctgaaaaattcacattagcagttggattgttcaactttattaatgataagtatgcaaataatttcacagtgtttgcagcaggggcaattatgattgcagtacctatagcaatcgtattcttgttcttgcaacgctatttagtatcaggtttaacaacaggtgcgacaaaaggttag

SEQ ID NO: 415541 - DNA, 1269 bp, Staphylococcus aureus
atgacgaaacgtaaccctaaattagcggcattattatctgttatacctggtttgggacagttttataataaaagacccattaaaggtacgatattttttatctttttcatcagttttatttctgtattttatagctttttaaatattggtttttggggattgttcacattagggacagtacctaagttagacgattctcgtgtcttacttgcacaaggtattatttctatcttactcgttgctttcgcaatcatgctatatgtcattaatattttagatgcatatcgtaatgctgaacgatttaatcgcaatgaggaaataaaggatccgaaggcgcgtatggtggcaacatgggacaagacgttcccatacttactaatctcaccaggtacattcttattgatatttgtagttgtatttccattaatatttatgtttggagtagcatttacaaactacaatttatacaacgcgcctccgagacacacattagaatgggttggtttagataactttaaaacgttattcacaattggcgtttggcgcaaaacatttttcagtgttattacttggacattagtatggacgcttgttgcaacgacacttcaaattgcattagggctgtttttggcaattattgtaaatcaccctgtcgtcaaaggtaagaaatttatccgtactgtgttaatcctaccttgggctgtaccatcatttgtgacaattttaatatttgtagcgttatttaatgatgaatttggtgcgataaataatgatattttgcaacctttattaggtgtagcaccagcatggttaagtgatccgttttgggcaaaagtggcattaatcggcattcaagtatggcttggattcccatttgtctttgcactgttcactggagtactgcaaagtatttcatcagattggtacgaagcagcagatatggatggtgcgtctagttggcaaaagtttagaaacatcacattcccgcatgtcatttacgccacagcgccattgttaattatgcaatatgcaggtaatttcaataattttaatcttatttatctatttaataaaggcggtccaccagtgtcagggcagaatgctggtagtacagatatcttgatatcttgggtgtataatctgacatttgagtttaacaacttcaacatgggtgcagttgtgtcattaattattggatttattgttgctattgtcgcatttattcaattcagacgtacaagtacgtttaaagatgagggaggtttataa

SEQ ID NO: 415542 - DNA, 579 bp, Staphylococcus aureus
atgacaaagcgaccaaaacgtattttggcaacaattatcatttttctttcactattatttacgattatttatatagatgacattcaaaaatggtttaaccaatataccgataaattgacacaaaatcataaaggacaaggacactcaaaatgggaagacttttttagagggagtaggattactgagacttttggcaaatatcaacattcaccatttgatggtaagcattatggcattgattttgcattgccaaaaggtacaccaattaaagcgccgacgaatggtaaagtaacacgtatctttaataatgaattaggcggcaaggtattacagattgccgaagacaatggagaatatcaccagtggtatctacacttagacaaatataatgtcaaagtaggtgatcgagttaaagcaggtgatattattgcatattcaggcaatacaggtaaacaaacgacaggcgcacatttacattttcaaagaatgaagggtggcgtaggtaatgcatatgcagaagatcctaaaccgtttatcgagcagttacctgatggggaacgtagcctatatgatttgtag

SEQ ID NO: 415543 - DNA, 627 bp, Staphylococcus aureus
atggcaaaagtattatatattacagcacacccttttaatgaactggtatcaaattctatggcggctggtaaagcatttatcgaaacatatcaacaacaacatcctgatgatgaagtgaaacatattgatttatttgaaacttatattccagttattgacaaagatgtattaactggttggggaaaaatgagtaatggcgaaacgttaactgatgatgaacaaatgaaagtttcaagattgagtgacattttagaagaatttttaagtgcagataaatatgtatttgtaacgcctatgtggaacctttctttcccacctgtagttaaagcatatattgatgctatttcaattgcaggtaaaacttttaaatattctgctgaaggaccacaaggtttactaactgacaaaaaagtattacacattcaatcacgtggtggatattatactgaaggacctgctgctgattttgaaatgggtgaccgttatttaagaacaattatgacattcttaggtgtgccatcatatgaaacaatcattattgaaggacacaatgccgaaccgcataaaactgaagaaattaaagcaactagtattaataatgctgaaaaattagcaacaactttttaa

SEQ ID NO: 415544 - DNA, 774 bp, Staphylococcus aureus
atgaaagcacataaaattttctggttaaacttagcagcaattattattatttcaattgtagtcagtggcggtatgtttttggcaatgaagtgggaacaaattcatttgaaagatggtcttaaaaaagtactaagtacgtatcctattaaaaacttagaaacgctttatgaaattgatggtcacgataatccccattatgaaaataatgatcaagacacatggtatatagaatcctcttattcagttgttggatcagatgagcttttaaaagaagaccgtatgttgttaaaggtagataaaaacacacataaaataactggtgaatatgacacaactacaaacgatagaaaagatgctactgactcgacatacaaaagttatccagtaaaagtagttaataataaaatcgttttcacaaaagacgtaaaagatcccgcgctgaaacaaaaaatcgaaaacaatcaatttttgattcaaagtggtgatttaacaagcattttaaatagcaatgatttgaaagtcacacatgatcctaccactgattattataatttatctggtaagttgtcgaatgataatccaaacgttaaacaattaaaacgtagatataatattcccagtaatgcatcaacaaaggtggaattaaagggaatgagtgatttaaaaggcaataatcatcaagatcagaaactttatttttatttttcaagtcctggaaaaaaccaaattatatacaaagaaagccttacttataataaattaagtgaacattaa

SEQ ID NO: 415545 - DNA, 2007 bp, Staphylococcus aureus; identical to SEQ ID NO: 413360

SEQ ID NO: 415546 - DNA, 1776 bp, Staphylococcus aureus
gtgaagaaaatcattagtatcgcaattatagttttagcgttggtattaagtggttgtggtgtccctacgaaatcagaagtggctcaaaagtcatcgaaagttgaagtgaaaggcgagcgaccaacaatacatttcctaggacaagcaagttatgaaaatgatatgaatatcgttaaagatcaattggaaaatgcaggatttaacgtgaagatgaatatccaaccagattatggtagctatcgtacacaacgtcaagccggcaattatgatatccaaattgatgactggatgacagtgtttggtgacccgaactatgctatgacggcattatttagttctacaggatcaaatagtttattgaaagataaacatgtagaccagttgttaaataaagcttctactcaaaatgaagcagatgttaaacaaacatataagcaaattgaagatgaagttgtatttgataaagggtatatggcgcctttatatggatcaaaaaagaatttagtatatgacaataaagtgttagataaaaatagtgttggattgccaaattcacgtgcattaatatggcaacaatttgattacaacaatagtagagaacgagatacgcggccacttgtgatgacacaacaagatggtgaaattcctacattggatccaatacgttcaattgcgccgtcagtatattcaattaatatgaatatgtacacaaggttattattattagatgaaaatgatcacttaacaacgaaaggttcgttaagtcgtgattatgctgtgaataaggacaataaagcattttatttcttgttaagagatgatgattattttgcgaaagtggtcaatggacaagcacgtaatactggagagcgtgtatcggctgaagatgttaagttttctttagatagagcacgtgataaaaagtctgtgcctaacaataatacttacaatatgcacaaacatataaatgacatcaagatattaaaagatgaggacatcgatcagttgcgtaaagagaaagacaaggatgataaatcaatctatgataagttgattaaagcttataacgtcaaatcgttaacgacagatggtcaaaaagtaaataataaagacggtatttatcaaattgttaaaattacgacagatcaatcgatgcctcgagaggtaaattacttaacacactcttcggcaggcattttatctaaaaaatttgttaatcaagtaaatcaagaatatccaaaaggatatggggatagcagtacaattcctgcaaattcagatggaaaaaatgcgctttatgcaagtggcgcatacattatgacacagaaaaatgcatatcaagcaacgtttcaacgtaatccaggattcaacgaaacagaaaaaggtagttatggatcacctaaaattaaaaatattacattgaagtttaatggtgatccgaataatgcattgtcagaacttagaaatcattcaattgatatgttggcagatgtgaatcaaaaacattttgatttaattaagtcggataaaaatttaagcattattcgcaaaaatggacgcaagtcagtctttttaatgctaaatattaaaaaaggtatatttaagacgcatccaaacttgagacaagcagtagttaatgcgatagatcaggatcaatttattaagttttatcgtggcgataaatttaaaattgcatcaccgattacaccacttgtcgatactggtaacgagcaacgtcaagatttagaaaaagtagaaaaagccattaatcaataa

SEQ ID NO: 415547 - DNA, 1593 bp, Staphylococcus aureus; identical to SEQ ID NO: 413362

SEQ ID NO: 415548 - DNA, 177 bp, Staphylococcus aureus; identical to SEQ ID NO: 408080

SEQ ID NO: 415549 - DNA, 723 bp, Staphylococcus aureus; identical to SEQ ID NO: 408079

SEQ ID NO: 415550 - DNA, 444 bp, Staphylococcus aureus; identical to SEQ ID NO: 408078

SEQ ID NO: 415551 - DNA, 222 bp, Staphylococcus aureus; identical to SEQ ID NO: 408076

SEQ ID NO: 415552 - DNA, 372 bp, Staphylococcus aureus; identical to SEQ ID NO: 409074

SEQ ID NO: 415553 - DNA, 681 bp, Staphylococcus aureus; identical to SEQ ID NO: 408074

SEQ ID NO: 415554 - DNA, 1113 bp, Staphylococcus aureus; identical to SEQ ID NO: 408073

SEQ ID NO: 415555 - DNA, 282 bp, Staphylococcus aureus; identical to SEQ ID NO: 405087

SEQ ID NO: 415556 - DNA, 879 bp, Staphylococcus aureus; identical to SEQ ID NO: 415448

SEQ ID NO: 415557 - DNA, 1455 bp, Staphylococcus aureus
atgaccaaagaacaacaacttgcagaacgaattattgctgcagtaggtggtatggataatatagatagtgtcatgaactgcatgacacgtgtgcgtattaaagtattagatgaaaataaagtagatgaccaagaactaaggcatattgatggtgtcatgggtgttatacacgatgaacgcattcaagttgtggttggacctggtacagtcaataaagtggctaatcatatggcggaattaagtggtgttaaactaggtgacccaataccacaccatcacaatgatagtgaaaaaatggactataaatcatatgcagctgataaagcaaaggcgaataaagaagcacataaagcaaaacaaaagaatggtaagttgaataaagtattgaaatcaattgccaatatctttataccgttgattcctgcatttattggagctggattaattggtggtattgcagcagtactgagtaacttaatggtggcaggctatatttcaggtgcttggattacgcaacttataacagtattcaatgtcattaaagacggtatgttagcatacttagctatttttactggtattaatgcggctaaagaatttggtgcaacaccaggacttggtggcgtgattggtggtacaacgttattaacgggtattgctggtaaaaatattttaatgaatgtcttcactggagaaccattgcaacctggacaaggtggaattattggcgttatttttgccgtttggattttaagtattgtcgaaaagagattgcataaaattgtgccaaatgcgattgatattattgtaacgccgactattgcattgttgattgtaggactattaactatctttatctttatgccattagcaggttttgtttcagacagtttagtttcagtagttaacggaattattagtattggtggcgtatttagtggatttatcattggagcaagcttcctaccgttagttatgttagggcttcatcatatttttacgccaattcatatagaaatgattaaccaatctggtgctacttacttattgccaattgcagcgatggctggtgctggacaagtaggtgccgcattagcactttgggtaagatgtaaacgcaacacaacattacgtaatactttaaaaggtgcattgccagttggtttcctaggtatcggagaaccattaatctatggtgtgactttgccattaggtcgacctttcttaactgcttgtattggtggtggtattggtggcgctgtaataggtggaattggacatattggtgccaaagcaataggcccaagtggtgtgtcactcttaccattaatctcagataatatgtatttaggttatattgcaggattacttgctgcatatgctggtggattcgtttgtacatatttatttggaacgacaaaggcgatgcgacagacagatttgttgggtgattaa

SEQ ID NO: 415558 - DNA, 897 bp, Staphylococcus aureus
atggaaaatagtacgaccgaagcgcgtaatgaagcgacgatgcatcttgatgaaatgactgtggaagaggctttaattacgatgaataaagaagatcagcaagtcccgttagcagttcgaaaggcaataccacaattgacaaaagtaataaaaaaaacaattgcacagtataaaaagggtggacgattgatctatatcggtgcaggtacaagtggaagattgggtgtcttagatgcagcggagtgtgtacctacattcaatactgaccctcatgaaattataggtattattgctggtggacaacatgctatgacgatggctgtagaaggtgcggaagatcacaaaaaattagcggaagaagatttgaaaaatatagatttaacatcaaaagatgtcgttataggaattgccgcgagtggcaaaacgccatatgttataggcggtttaacatttgctaacacaatcggtgctacaacagtatctatttcatgcaatgaacatgcagttataagtgaaattgcgcagtatccagtagaagttaaagttggtccagaagtattaactggttcaacacgtttaaagtctggtacagcacaaaagttaattttaaatatgatttcaaccatcacaatggttggtgtcggaaaagtttacgataacctcatgattgatgttaaagcaaccaatcaaaaactgatcgaccgttcagtgcgtattattcaagaaatatgtgctatcacatatgatgaagcaatggcgttatatcaggtatctgagcatgatgtgaaagttgcgacagttatgggtatgtgtggcatttctaaggaagaagcaacaagacggttattaaacaatggtgacattgttaaacgagcaatcagagatagacaaccttag

SEQ ID NO: 415559 - DNA, 1056 bp, Staphylococcus aureus
ttgacaggcttttcagtgtatttaggacaacctttagatgaagcgtatattaagcgaatgattaaacaaggttaccaaatgatttttacatctgtacaaataccagaagaagatgacgagacaaaatatcattatttcacaaaactactcaatttattaaaatatgaacaagtgacttacctcatagatgctaatccatctattttaacaccatctttttatgagcatcttcgacaatatgatgcacaatttatgattcgtatcgatcatagtacatcaattgaggcaatcgaagcgataatggcacagggtttaaagtgctgtttgaatgcaagtattatttcccgggaattgttaacaagcttacatcaacaattgaatgattttacattactttcattttgtcataactattatccaagaccagatacgggattatctgttgacttggtcaataagaaaaatgaactcatttatcaatttaatccaaaggcacaaatatatggttttattgtagggagtggtttgcgaggtcctttgcataaaggcttgccaacaattgaagcaacgagacatagtcatcctgtcgttgcagctaaattattacaagaaactggtgtatctgaagtgttagttggagactcattgattgaaatgaggcaggcaaaacaacttatagatttttgcaagcataggcatttcacgttatgtattgaagaagtgtttgatacgacagtgacttaccttttcgatatgtgtcataaagtacgcccggataatccggaaaatgtcattcgttcggaaacgtcaagacaaatatgtccacattcgattcaaccacagtttacgacgcaacgacgcattggttcagtaaccgttgataatttgaataacggacgttatcaaggcgaaatgcaaattgtgagacaaacgcttagtgcacatgacaatgtgaatgttgttgcacaaattattaaagaagacttaccactgttaagttgtatcgagccgaatgatacatttgattttcaaaaaactagggagtgtaagaagtga

SEQ ID NO: 415560 - DNA, 2046 bp, Staphylococcus aureus; identical to SEQ ID NO: 413364

SEQ ID NO: 415561 - DNA, 1641 bp, Staphylococcus aureus
atgaaacaacgcattggagcttacttaattgacgcttttcatcgagcaggcgtcgataaaatttttggtgttcctggtgattttaatctcgcttttctagacgatattatcagcaatcccaatgtagattgggtaggaaatacaaatgaattaaacgcaagttacgcagcggacggttatgcccgtcttaatggactcgctgcattagttactacatttggtgttggcgaattaagtgccgtcaacggtatcgcaggttcatatgctgaacgcatacctgtcattgcgattacaggtgcgccgacacgtgctgttgaacaagccggtaaatatgtacatcactcacttggtgaaggtacatttgacgactaccgaaaaatgtttgcacatataaccgttgcacaaggttatatcacacctgaaaatgcaacaaccgaaataccacgtttaattaatacagcaatcgccgaaagacgcccagttcatttacatttaccaatcgatgtcgcaatctctgaaattgagataccgacaccatttgaagtgacggcaactaaagatacggatgcatcaacatatatagagttattagcaactaaactgcatcaagcgaagcagcctatcatcattactggacatgaaattaacagttttcacctccatcaagaattagaagattttgtaaatcaaacacagataccagtagcacaactttcattaggaaaaggtgcttttaatgaggaaaatccatattatatgggtatttacgacgggaaaattgccgaagataaaatacgagattatgtggacaacagcgatttaattttaaatattggagccaaattaacagattcagcaacagcaggattttcataccaattcaatatcgatgatgtcgttatgttaaatcatcacaatatcaaaattgatgatgttacaaatgatgaaatatctctaccatcgttgttaaaacagttatccaatatttcatatacgaacagtgcaacgttccctgcgtatcatcgtccaacatcacccgattatactgttggcacagaaccattaacacaacaaacttattttaaaatgatgcaaaatttcttaaaaccaaatgatgtcattattgctgatcaaggtacatcattctttggtgcttatgatttagcattatacaaaaacaatacttttatagggcaaccgttatggggttctatcggctatacattacctgcaacattaggttcacaattagcagacaaagatcgtcgtaacttattattaattggtgatggctcattgcaactaactgttcaagctatttcaactatgattagacagcatattaaaccggtattatttgtgattaataatgacggctatacggtagaacgacttattcacggcatgtatgaaccttataatgaaattcacatgtgggattataaagctttaccagctgtatttggtggtaaaaatgttgaaattcatgacgttgaatcatcaaaagatttacaagacacgtttaatgcaattaatggtcatcccgatgtgatgcattttgtcgaagtcaaaatgtctgtcgaagacgcaccgaagaaactgatcgatatcgctaaagctttttcacaacaaaataaataa

SEQ ID NO: 415562 - DNA, 558 bp, Staphylococcus aureus
atgattaattttaataaaaccgctttagtgttaatcgacctgcaagaaggtatacttaagatggattatgcgccacatacagctgaaaatgtcgttcaaaacgctaataaattaatagatgtttttagaaaaaacaatggctttatcgcttttgttcgcgtgaatttctatgatggtaaagatgtattgcaaccaaatgcaatgatctcattaccaccaaaagaaggcgacgactacagtcgtttccatcatttattagacaagagagatgacgattttgtcatagacaaacgacattttagtgcatttgtaggaacagatttggacttacaattgcgacgtcgaggaattgatacgattgttcttggtggtgtcgcaacgcatattggcgtagatacgacagcgcgagatgcctatcaattaaactacaatcagttttttgttacagatatgatgagtgcacaaaacgaaacgctacatcaatttccaatagataatgtattcccattaatgggacaaacaataactacaaacgactttctaaatatattgaactaa

SEQ ID NO: 415563 - DNA, 1350 bp, Staphylococcus aureus; identical to SEQ ID NO: 415450

SEQ ID NO: 415564 - DNA, 1035 bp, Staphylococcus aureus
atgatgattacagtaggtatcgttggcggtagcggttatggcgcaattgaattaattcgattgttacaaacacatcctcatgtaacgattgcacacatctactcacattcaaaagtagatgaaccgttgaaattaacatttccacatttacaacatattatgcaacatttcgaagcacttacagtggacaataatgactgtgatgtaattttctttgcgacaccagcacccgtaagtaaaacatgtatccctcccttagtagaaaaaggtattcatgttatcgatttatctggcgcatttagaattaagaatcgtgaaatatatgaagcatattacaaagaaactgctgcagcacaagatgatttgaatcatgctatttacagcatttcagaatggcaatcgtttgataacaatggaacgaagctcatttctaatcctggctgtttccctacagcaacattattagcattacatccacttattagcgaaaaaatagtagatttgtcatctattattattgatgctaagaccggcgtgtcaggtgctggtcgttcattatcacaacgtgttcatttttcagaaatgaatgaaaatctaagtgcttatgcaatcggaaaccataaacacaaaccggaaatcgagcaatatttatctatcattgcgggtcaagatgtatcagtcatatttacaccacatctcgtaccaatgacacgaggtattttatcaacaatttatgtcaaattttcatctgaatatacgactgaatcattacataaattaatgacctcttattatgctaatcagccatttgtcagaattagagatattgggacttttccaaccacaaaagaagtactcggtagtaactactgcgatatcggtatctatgtagatgaaacaacacaaacagcaattttagtatcagtgattgataaccttgtcaaaggcgcaagtggtcaagccattcaaaatttaaatatattatatgattttgaagtaacgactggcctaaatcaatcaccagtttatccataa

SEQ ID NO: 415565 - DNA, 1242 bp, Staphylococcus aureus
atgaaacatcaagaaacgacatcacaacaatataacttttcaattattaaacatggcgatatcagtacacctcaaggcttcacggctggtggtatgcacatcggtttacgcgctaacaaaaaagactttgggtggatttactcatcgtctttggcaagttcagctgccgtatatactttaaatcagtttaaagctgcaccacttattgtcactgaagacactttacaaaagtctaaaggaaaattacaagcacttgttgttaattcagctaatgcaaattcttgtaccggtcaacaaggcatagatgatgcacgacaaacacaaacatgggttgctcaacaacttcaaataccatctgagcatgttgctgttgcttcaactggggtcattggtgaatatttgcctatggataaaattaagactgggaccgaacatattaaggatactaattttgcaacgccaggtgcgtttaacgaggcaattttaacaactgatacctgtacaaaacatatcgctgtatcactaaaaatcgatggtaaaaccgttacaattggtggtagcgccaaaggttcaggtatgattcatccaaatatggctaccatgcttgcttttataacaaccgatgcatcgattgaatcgaatacacttcatcaattattaaaatcttcgactgaccatacatttaatatgattactgttgatggcgatacaagtacaaatgacatggtattagtcatggcaaatcaccaagttgaacaccaaatacttagtcaagaccatccacaatgggaaacatttgttgatgcattcaattttgtctgtacatttttagctaaagctatagccagagatggcgaaggcgcaacaaagttaatcagcgtcaatgtgtcaggcgctaaatcaatatcagatgcaagaaaaatcggtaaaactatcgtaagttcaaatctagtaaaatcagctatttttggcgaagatgccaattttggtcgaatcattacagctattggctatagcggatgtgaaattgatcctaaatgcacatatgttcaactgaaccaaatacctgtcgtggataaaggtatggctgtactatttgatgagcaagctatgtcgaacacattaactcatgaacatgtcacaattgacgttcaacttggtttaggtaacgctgcagcgactgcatacggttgtgatttatcctatgattatgtgcgtattaacgcatcatatcgaacataa

SEQ ID NO: 415566 - DNA, 765 bp, Staphylococcus aureus; identical to SEQ ID NO: 405075

SEQ ID NO: 415567 - DNA, 645 bp, Staphylococcus aureus
atgacagtatttgtaatgcaattacagagtaacttgaaaagtattgaagaattaatatcacaaagtcgttggtcatataaaaaaccgcgtacagtcaactatagatacaatcaagataaactcatgcacagattgggagatattttagtgcaatatggaattcaacatgacacaggtttattaccacatgaatggcattatcacatttcgccacgaggtaaggcagatattgttcaacacaatcgtgatggacagcccatctatgtgagcttatcatatagttatccttatatcgtgtgtgttgtcgataaagaaccagttggtatagatatcgaaaagatatcacaacgtttagactggcgtacgttagtgacgtgtttctctacaaacgaagcacatcaaatatgtagtttaaatgatttttatcaaatatggacacaaaaagaaagttttacaaaattgattggtgaaggtttaatcaaaggattggacatttatgatatgacacaatcacacttttatcaatcacgtgaagtgaagttcaaacaatttatttttgatcagtttatggtacaggtatgtttcttaggagaggcaccctggggttataaaaaagtgtctgtatttcagttattgagtagttaa

SEQ ID NO: 415568 - DNA, 7176 bp, Staphylococcus aureus
atgattatgggtaatttgagatttcaacaggaatattttcgtatatacaaaaataatacagaatcaacgacacaccgtaatgcgtattgggttaaactcgctaaaaatgttgaagctactaaaatgatgtatgcattatcgacaattgtgcaacaacatgcatctataagacatttttttgatgttactaccgatgacaatttaacaatgatacttcatgaatttctgccttttattgagataaaacaagttccatcttcttccgcaaactatgatttagaagctttttttaagcaagaattaagtacttaccattttaatgattcacctttattcaaagttaaattgtttcagttcgctgatgctgcatatatactattagattttcatgtgtccattttcgatgatagtcaaattgatatttttcttgatgatttatgcaatgcatatcgtggcaatactgttattaacaatactcgacagcatgcacatataaatagaaatgatgataaagacaatcaagatgcatcgcatatagcattagactcaaactattttcggttagagaataactctgacatccatattgatagttattttccaattaagcatccatttgaacaagctttatatcaaacgtatttgattgatgatatgacatcaatagatatggcatcgttggctgttagtgtgtatttagctaatcatataatgagtcaacaacatgatgtcacattaggtatacatgtaccatcacatttaccaaatgatttacacggaaatattgtgccgttaacgttaacaatcgatgcaaaagatgtatgtcaacgttttacaacagattttaataaatgtgtgttgcaaaatatgtcgcaattacagtgcgcgaagtcttcgctttcactagagactatttttcattgttatcatcatatgatgtcttgttgtaatgatgttattgaggatgtacatcaaatacatgatgcacatacatctttagcggatattgaaatttttccacatcaacacgggttcaaaattatatataacagtgcagcatatgatttgctctcaatcgagacgctgagtgacttagttcgaaatatttatttgcaaattactgaagaaaatggaaataaacgaacaactgtagatgaacttaatttgatgacagaacgtgatattcaattatatgacgatatcaatttaagtttgcctgagatagatgatgcgcaaacagttgttaccttatttgagcaacaagttgaagcaacgccgaatcatgtcgctgtgcaatttgacggagtgtttataacatatcaaacattgaatgcacgcgcgaatgatttagcacaccgtttgagaaaccagtatggtgttgaacctaatgatcgtgtcgctgtcatagctgaaaaaagtattgagatgataatagcgatgataggtgtgttgaaagctggtggggcttacgtgccaattgatccgaactatccaagtgatcgtcaggagtacattttaaaagatgcaacgcctaaagttgtaataacgtaccaagctttatatgaaaatggtaaacaaaatattaatcacattgatttgaataagatagcgtggaaaaatattgataatctttctaaatgtaacacgttagaagatcatgcttatgttatttacacgtcggggacaactggtaaccctaaagggacactaattccgcaccgaggtattgttcgcttggtccatcgaaatcattatgtaccattaaatgaagagacgacaattttgttatcaggaactatagcctttgatgctgcaacatttgaaatatatggtgcattgctcaatggtggaaagctgattgttgctaaaaaagaacaattattaaatccaatagcggtagaacaattaatcaatgaaaatgacgttaatactatgtggttaacctcctcattatttaatcagattgctagtgaacgaatagaagtattggtaccgttaaagtatttattaattggtggagaagtattgaatgctaagtgggtggatttgcttaatcaaaaaccgaagcatcctcaaattattaatggttatggaccaactgaaaatacaacatttacaacgacgtataatatacctaacaaagttccaaatcgtattcctattggtaaaccgattctgggtactcatgtttatatcatgcaaggcgagcgtcggtgtggcgttggtattcctggagaattatgtacaagtggctttgggttagctgcaggttatttaaatcagccagaattgacagcagataaatttatcaaagattcaaatataaatcagctgatgtatagaagtggtgatatcgttcgtttgttacccgatggcaacatagattatttatatcgaaaggacaaacaagttaagattcgagggtttaggattgagttgtcagaggttgagcatgcgctcgagcgtatacaaggtattaataaagcagttgttattgttcaaaatcatgatcaagatcagtatatcgttgcttattatgaagcgatgcatacattatcacataataagattaaatcacaattacgtatgaccttaccggagtacatgataccagttaatttcatgcatattgagcaaattcctattactattaatgggaaattagataagaaggcattgcctatcatggactatgtcgatacggatgcctatgtagcaccgagtacagataccgaacacttgctatgccaaatttttgcagatattttacatgtgaatcaagtaggtattcatgataatttctttgaattaggtggccattcattaaaagcaacgttagtggtgaatcggatagaggcatctactgggaaacgattacaaattggtgatttattacaaaagccaactgtatttgaactagcacaagcgattgctaaggttcaagaacaaaactatgaagtgattccagaagctatagttaaagatgattatgtgctgagctctgcacaaaagcgtatgtatttattatggaaatcaaaccataaagatacggtgtataacgtaccttttttatggcggttatcatcaggacttaatgtagctcaattgcaacaagcagttcagcatttgatagcgcgacatgagattctacgaacacaatatattgttgtagatgatgaggttcgacaacgtattgtggcagatgttgtagctgactttgaagaagttaacacgcattttacggatgaacaagaaattatgcgccaatttgtggcaccttttaatttggaaaagccaagtcaaattagagtgagatacattagaagtcccttacatgcatacctgtttatagatacacatcatatcattaatgacggtatgagtaatatacaattaatgaatgatcttaacgcactttatcaacataaattattgttaccacttaaattgcaatataaagactatagtgagtggatgtcgcatcgtgatatgacgaaacatagacaatattggttatctcaattcaaagatgaagtacctattttaagcttaccgacagactatgttagaccaaatattaaaacgacaaatggagcaatgatgtcatttacaatgaatcaacaaatgagacagctacttcaaaagtatgtagaaaagcatcaaattactgattttatgttctttatgagtgtggtcatgacgttgttaagcagatatgctcgaaaagatgatgttgttgtcggtagtgtgatgagtgcgcgtatgcataaaggcacggagcaaatgctaggcatgtttgctaatacgttggtatatagagggcaaccgtcacctgataaaatgtggacacagtttttacaagaggttaaggaaatgagtttggaggcatacgagcatcaagaatacccattcgaatgtttagtaaatgacttagatcaatcacatgatgcctcacggaatccattatttgatgtcatgttagtactacaaaacaatgaaacgaatcatgctcattttgggcatagtaaattaacacacattcaacccaaatcagtgacggcgaaatttgatttatctttcatcattgaagaagatcgcgatgactatacaatcaatatcgagtataataccgatttatatcactcagaaacagttcgtcacatgggtaatcaatgtatgattatgattgattatattttgaagcatcaagatacactacaaatttgtgatataccaaacggtacggaggaacttctaaattgggtcaatacgcatgttaacgatcgaatgcttaatgtcccgggaaataaatctatcataagttactttaatgaagttgtctcacgacaaggtaatcatgttgcgctagtcatgaatgatttgacaatgacgtatgaaacattacgcaactatgtggatgccattgcgcacatgctcctatcaaatggtgtgggcaatggtcaacgggttgccttgtttacagaacgtagttttgaaatgattgcggcgatgttggcgacagttaaagtaggtgcatcttatatacctatcgatattgattttccgaataaacgacaaggtgcaattttggaggatgctaaagtaactgcagtcatgtcttacggcgttgaaattgaaacgacattaccagtcattcaattggaaaatgctaaaggctttgttgaatcaaaggaaaatgaacaatatgatgatttacatggcaatcaacttgaaaacacagcgatgttagataatgagatgtatgctatttacacatctggtacgaccgggatgcctaaaggggttgccatacgacaacgaaatttgttgaatttagtgcatgcatggtcaactgaattgcaattaggcgacaatgaagtatttttgcaacatgcaaatattgtttttgatgcatcagttatggagatttattgttgtttgttaaatggtcatacgcttgtgattccagatagagaggaacgtgttaatccagaacagttacaacaactcattaataagcatcgtgtgacggttgcgtcgattccgttacagatgtgtagtattatggaagacttttatattgaaaagttgattacaggcggggcaactagtacggcatcctttgttaaatatattgagaagcattgtggcacgtatttcaatgcctatggaccatctgagtcaacagtcatcacatcgtattggtcacatcattgtggtgatttgatacctgagacgattccaattggcaaacccttatctaacatccaagtgtatattatgtcagatggtttgttatgcggtattggtatgccaggcgagttgtgtattgcaggtgatagtttagcgataggatatattaaccgtccagaattaatggctgataaatggcaaaataatccatttggtaaaggaaagttgtatcatagtggtgatttagcacgttatacatctgatggtcaaattgaatttttaggaagaatagataaacaagtgaaagttaacgggtaccgtattgaacttgatgaaattgaaaatgtaatattagctattcgtggtatatctgattgtgttgtaacagtaagtcactttgatacgcatgatatattgaatgcttattatgtcggagagcaacaagtggagcaggatttgaagcaatatttaaatgatcagctgcctaagtatatgattcctaagactataacgcatatcgattgtatgccattaaccacgaatgacaaggtggatactacgcgtttgccaaatccatcacctatacaacagtctaataaagtgtatagcgaaccctctaatgaaattgagcagacatttgttgatgtatttggagaggtattgaaacaaaatgatgtcggtgttgacgatgatttctttgaacttggtggtaactcattagaggcgatgttagttgtctcgcatttaaaacgatttggccatcatatttcaatgcagacattataccaatataaaaccgtgcgacagattgttaattatatgtaccaaaatcaacaatcattagttgcattaccggataatctttcggaattacaaaagattgttatgtctcgttataacttgggtattttagaggatagtctaagtcatcgacctctaggaaatacactattgactggcgcgacaggttttttaggtgcttatctgattgaagcactacaaggatacagtcatcgcatttattgtttcatacgtgctgataatgaggaaatagcatggtataagttgatgacgaatttaaatgattatttttcagaagagacggttgaaatgatgttatcaaacattgaagtcattgttggtgatttcgagtgtatggatgatgttgttttacctgaaaacatggatacgattattcatgcaggtgctcgtacggatcactttggtgatgatgatgaatttgaaaaagtaaatgttcaaggtactgttgatgtcatacgtttggcacaacaacatcatgcaaggttaatatatgtgtctacgataagtgtgggaacttattttgatatagacacagaagatgtgacattttcagaagcggatgtctataaagggcaactactaacatcaccatatacacggagcaaattttatagtgaattaaaagtattagaagctgtaaataatggcttagatggtcggattgtacgtgttggtaatttgacgagtccttacaatggaagatggcatatgagaaatataaagactaaccgtttttcaatggtaatgaatgatttgttacaactggattgtatcggggttagcatggctgaaatgcctgtagatttttcttttgtggatacgactgcaagacaaattgtcgcattagcacaggtcaacacaccacaaatcatttaccatgtgctatcacctaataaaatgccggtgaaatctttgttagaatgcgttaagcgcaaagaaattgaactcgtcagcgatgaatcatttaatgaaattttacagaaacaagacatgtacgaaacgattggattaactagtgttgaccgtgaacaacaactagcaatgatagatacaacattaacattaaaaataatgaatcacatcagtgaaaaatggccaacgataactaacaattggctgtatcattgggcacaatatatcaaaacaatattcaataagtaa

SEQ ID NO: 415569 - DNA, 1251 bp, Staphylococcus aureus
atgaaacgcttaagtacgactttgaaagtacgattgattagcaattttttacagctaattattacgacagcatttataccgtttatagcactatatttaacagatatgttaagtcaatcaattgtcggtatatatcttgttggtttagtggttctaaaatttccattgtccattatatctggttaccttattgagatttttccgaaaaagttgctagtacttatttatcaagcgacgatggtgataatgcttgtgttcatgggcgtatttgggtcacatcaattgtggcaaattattggtttttgtgttgcatatgccatatttacaatcgtttggggattacaatttccagttatggacacattaattatggatgcaattaccgaagacgtggaacattatatttacaagattagctattggatgacgaacttatcggtagctattggggcattgttaggtggcttgatgtatggctacagtatgttactacttttcttaatagcagcttgtatatttttaattgtactctttattttatatatttggttacctcaagaccgaaatcaagtaaagcaaagtgatgacaagaggcatgcaagtcgttatcaaaaattacaaataatgaatatatttcgcagttataaattagttttgaaagaccgtaattatatgttattgatttcggggttcagtatcatcatgatgggtgaattttcaatctcctcatatattgctattagactaaaggatcagtttgaaacaataagtataggttcatatgatattacaggtgctaagatgttagcaatcttgctaatgattaatacggtcgtcgtcattttactcacgtattcaatctcgaaagttgtattgaaaatagattttaaaaaagctttaatcactggtttgctgatttatattgttggctatagtggtctaacctatcttaatcagtttggcttattagttgtttttatgataattgcgactgtaggtgagattatttattcgcctatagtttcagaacaacgctttaaaattattcctaaagctaaaagaggaacatatagtgcagttaatgcattaggtattcatttttcagaaacactagctaggttagggattgtgttgggtgttttcttaacgtcattacaaatgggactgtatatatttatcgttttaacaattggtgctagcatgcttgttgctggtgtattcgggggacaaaaacaagtgaatacaaattga

SEQ ID NO: 415570 - DNA, 1026 bp, Staphylococcus aureus
atgaaaatcgtagcattatttccagaagcagtagaaggtcaagaaaatcaattacttaatactaaaaaagcaataggattaaaaacatttttagaggaaagaggacatgagttcattatattagcagataatggtgaagacttagataaacatttaccagatatggatgtgattattagtgcgccattttatcctgcatatatgactcgtgaacgtattgaaaaagcaccgaacttgaaattagcaattacagcaggtgtaggatctgaccatgtagatttagcggcagcaagtgaacacaatattggtgtcgttgaagttacaggaagtaatacagttagtgtggcagaacatgcggttatggatttattaatacttcttagaaactatgaagaaggtcatcgtcaatcagtagaaggtgaatggaacttgtctcaagtaggtaatcatgcgcatgaattacaacacaaaacaattggtatttttggatttggtcgaattggacaacttgttgctgaaagattagcgccatttaatgtaacattacaacactatgatccaatcaatcaacaagaccataaattgtctaaatttgtaagctttgatgaacttgtttcatcaagtgatgcgattacaattcatgcaccattaacaccagaaactgataacttatttgataaagatgttttaagtcgtatgaaaaaacacagttatttagtgaatactgcacgtggtaaaattgtaaatcgcgatgcgttagttgaagcgttagcatccgagcatttacaaggatatgctggtgatgtttggtatccacaacctgcacctgctgatcatccatggagaacaatgcctagaaatgctatgacggttcactattcaggtatgactttagaagcacaaaaacgcattgaagatggagttaaagatattttagagcgtttcttcaatcatgaacctttccaagataaagatattattgttgcaagtggtcgtattgctagtaaaagttatacagctaaatag

SEQ ID NO: 415571 - DNA, 360 bp, Staphylococcus aureus
gtgaatactatagatacgcatactaaagaacaacaattctcgaatctagtaagatcttatcgtaaagaatacgtgggtaaaggacccaatagtattcgagtgtcgtttaaagataattgggcgattgcacatatgacaggtgttttgagtaaagttgagagtttttacctaaacgacaaacgcaatgaatcaatgctccattatacacgcacagagaagattaaacagatgtataaagaaatagatgtaaatgagatggaaagtcttgtaggcgctaagtttgtaaaattatttacagatattgatttgaatgatgatgaagtcatttcaatatttgttttcgataagtcaatagaataa

SEQ ID NO: 415572 - DNA, 762 bp, Staphylococcus aureus
atgacacgtcccacaaataacaaatttatattacctattatcacatttattattttcttaggcatttgggaaatggtcattattattgggcattaccaacctgtattgttacctggtcctgctcttgtaggaaaaagtatatggactttcattgttactggagaaattttccaacatttagcaattagtttatggagatttgtagcgggctttgttgtcgcattgttggttgctattccattgggcttcttgcttggaaggaatcgttggctatacaacgctatcgaaccgctatttcaattgattagaccgatatctccgatagcatgggcaccatttgttgttctatggtttggtattggtagtttgccagcgattgcgattatttttatcgctgcttttttcccaattgtgttcaatactattaaaggcgttagagacattgaacctcaatatttaaaaatagcggcaaatttaaatttaactgggtggtcattgtatcgcaatatattatttcccggggcatttaaacaaatcatggctgggatacatatggcggtaggaacaagttggatatttttagtttctggtgaaatgattggtgcacaatcgggattaggttttttaatcgttgatgcacgaaatatgttgaacttagaagatgttttagcagcaatattctttatcggattatttggttttattattgatcgattcattagttatattgagcagtttatacttagaagatttggtgaataa

SEQ ID NO: 415573 - DNA, 972 bp, Staphylococcus aureus
atgaaaaggttaagcataatcgtcatcattggaatctttataattacaggatgtgattggcaaaggacgtctaaagaaccgtctaaaaatgcccaaaatcagcaagtgattaaaattggatatttgccgattacacattcagctaatttgatgatgactaaaaaattattatcacaatacaatcatccgaaatataaactagaattagttaaattcaataattggccagatttaatggacgcattaaacagtggtcgtattgatggtgcatcaactttaatagagctagcgatgaaatcaaaacagaagggctcaaatataaaggctgtggcattgggccatcatgaaggcaatgtcattatgggacaaaaaggtatgcacttaaatgaatttaataatggcgatgattaccattttggtataccacatcgttattcaacacattatcttttacttgaggaattacgtaaacaattaaagattaaaccggggcattttagctatcatgaaatgtcgccagcagaaatgccagccgcattgagtgaacacagaattacagggtattctgtagccgaaccattcggtgcactgggtgaaaagttaggcaaaggtaagactttgaaacatggtgatgacgttatacctgatgcgtattgctgtgtgctagtactgagaggggaattgcttgatcaacacaaggatgtagcgcaagcatttgtacaagattataaaaagtctggctttaaaatgaatgatcgcaagcaaagtgtagacattatgacgcatcattttaaacaaagtcgtgacgttttaacacagtcagcggcatggacatcctatggtgatttaacaattaagccatccggctatcaagaaattacgacattggtaaaacaacatcatttgtttaatccacctgcatatgatgactttgttgaaccgtcattgtataaggaggcatcgcgttcatga

SEQ ID NO: 415574 - DNA, 513 bp, Staphylococcus aureus
atgacattatttttattagaagctaacaatcttgattttgcatcaacgaaagaagaactagaagcaaaggcagcatcactatctacgaagacaattccaacattaattgaagtacaagctactgaaaatttaactcatggttattttattgtggaagcaaatgacgaagcagaagctaaacaatttttaacagaagcagatattagtattcaattagtcaaagaagtacgcttagttggtaaagatttagatgaagttaaaaatggtgatgcacatgttgattaccttgtaacttggaacattccggaaggcattacgatggatcaatatttagcacgtaaaaagaaaaattctgttcattatgaagaagtgccagaagttgaatttaaacgcacatatgtatgtgaagatatgtctaaatgtatttgtttatacaacgcacctgatgaagaagcggtacgtcgcgcgcgaaaagcagttgatacaccgattgatggcatcgaaaaactttaa

SEQ ID NO: 415575 - DNA, 204 bp, Staphylococcus aureus; identical to SEQ ID NO: 414932

SEQ ID NO: 415576 - DNA, 960 bp, Staphylococcus aureus
atgaatgggaaaaaggcaaatacgataaacagatacaaatattttcatcatgtcaatcatcaaaaaattcaacaaagttctaaaaagacgctgtgggcatcactaatcatcacattgttatttacagtgattgaatttgtcggaggtttagtatctaattcattggcattactgtcagattcatttcatatgcttagtgatgtattagcacttggtttatctatgttggccatttattttgcaagtaaaaagccgactgcacgatacacatttggatatttaagatttgagatattagttgcatttttaaatggtttagcattaattgtaatttcaatctggattttatatgaagctattgtacgtattatttatccgcaaccaattgaaagtggcattatgtttatgattgctagtattggtttactcgttaatattattttgacaattatccttgtaaggtctttaaaacaagaagacaatatcaatattcaaagtgcattatggcatttcatgggagacttattgaactctattggtgtcatcgttgcagttgtattgatttactttacaggatggcgcatcatcgacccaatcattagtattgtaatttcactcatcattttacgtggtggttataaaattacgcgtaatgcgtggttaattttaatggaaagtgtgcctcaacatttggatactgatcaaattatggcagatattaaaaacatagatggcatattagatgtacatgaatttcatttgtggagtattacaacagagcattattcattaagtgcccatgttgtgttagataaaaaatatgagggtgatgattatcaagcgattgatcaagtatcatcattgttgaaagaaaaatatggcattgcacattcaacgttgcaaattgaaaacttgcaattgaatccattagatgagccatacttcgacaaattaacataa

SEQ ID NO: 415577 - DNA, 1488 bp, Staphylococcus aureus; identical to SEQ ID NO: 415479

SEQ ID NO: 415578 - DNA, 384 bp, Staphylococcus aureus
atgcgacttattttaatcgttattggcttaatatttacagcgcttggtattgcaggtgccgtattacctttactgccaacgaccccttttttactcgtagcagttttttgttttgctcgaagttcagatcggttttacaattggcttattaatcaaaaaatttataaagaatatgtagaaaacttttatttacatcgaggctacacgctacaacagaaaattaaaattttaattagcttatacattgtaataggtttttcaatttatatggtggatgttcttgcagtccgtgtaggattaatcataatggttatcatacaaaccgctgtactctttacatttgtaaaaacattacccaaatcaaatcataaaatagaggagtga

SEQ ID NO: 415579 - DNA, 327 bp, Staphylococcus aureus; identical to SEQ ID NO: 413366

SEQ ID NO: 415580 - DNA, 1146 bp, Staphylococcus aureus
atgaaaaaaattatggttattttcggtacgagacccgaagcaataaaaatggcaccattagtaaaagaaattgatcataatgggaactttgaagcgaacattgtgattacagcacaacatagagatatgttagatagtgtgttaagtatatttgatattcaagctgatcatgatttaaatattatgcaagatcaacaaacgttagcggaccttacggcgaatgcgcttgctaaacttgatagcatcattaatgaggaacagccggatatgattttagtacatggtgatactacaacgacttttgtaggaagtttggcagcattttatcatcaaattccggttggacatgtagaagctggacttcgaacacatcagaaatactcaccatttcctgaagagttaaatcgagtcatggtaagtaatattgctgaattgaattttgcgccaacagtaattgcagctaaaaatttactttttgaaaacaaagacaaagagcgtatctttattactggaaatacagttattgacgcattgtcaacaacagttcaaaatgattttgtttcaacgattattaataaacataaaggcaagaaagttattttactaacagcgcatcgtcgtgaaaatattggggaaccgatgcatcagatttttaaagcagtaagagatttggcagatgaatataaagatgttgtcttcatttatccaatgcatcgtaatccaaaggtaagagcgattgccgaaaaatatttatctgggagaaatcggattgaattaattgagccattagatgcgattgagttccataattttacaaatcaatcgtacctcgtgctgacagattctggtggtattcaagaggaggctcctacatttggaaaacctgtgttggtattaaggaatcatacagagcgtcccgaaggcgttgaggcgggaacatcgagagtaattggcacagattatgacaatattgttcgaaatgtgaaacaattgattgaggatgatgaagcgtatcaacgtatgagtcaagcgaataatccatatggtgatggacaagcatcacgacgtatttgtgaagcaatagaatattattttggattgcgctcagacaagccggatgaattcgtacctttacgtcacaaataa

SEQ ID NO: 415581 - DNA, 1263 bp, Staphylococcus aureus; identical to SEQ ID NO: 415480

SEQ ID NO: 415582 - DNA, 888 bp, Staphylococcus aureus; identical to SEQ ID NO: 415481

SEQ ID NO: 415583 - DNA, 558 bp, Staphylococcus aureus; identical to SEQ ID NO: 415482

SEQ ID NO: 415584 - DNA, 1167 bp, Staphylococcus aureus
atgaaattttttgtactttgtgcaattatcagcatgaacatatttatagtaatctctacatttactaaagaagtattagggttccctatagagccggtgtattactcaaccatggttggtatagcattaattactacggtgtttgctatttataagataattgtcacgcaagaaattccgcgagggttaatattattaattgctatatgtttgctttatctagctttttattatttttcaccagataaggaagagaaactagctaaaaataatattctattctttttaacatgggcagttccagcggcaattagtggtatttatattaaatatataaacaaggctacggtagaaagattttttaaattagtatttttcatattttctatttcatttatttttgtaattttaataccaaaacttacaggtgagatacctagctatatcaattttggacttatgaactatcaaaacgcttcgtacctttcagcatttactgccggattaggcatttatttcattatgaaaggttcagtgaaacataagtggatatatgttctatttacaataattgatatccctattgtgtttataccaggagggcgtggaggtgctattttattaattctttacggcttatttgcatttatacttattacgtttaaaagaggaatacctattgcagtaaaaagcattatgtatatttttgcattaagcatatctagtgtattgatttactttctttttacaaaaggttcgaatactagaacattttcatatctacaaggtggaacacttaatttagaaggtacttctggaagaggaccgatttatgaaaaaggtatttactttattcaacaaagtccgttattaggctatgggccatttaactattataaactaatcggaaatataccacataacatcattattgagttgattctatcatttggcttattagggttttttatcataatgatttgcattttgctactagtttataaaatgattaggaactatgatccaaacactatagatttactcgttatgtttatagcaatctatccaatcacattattaatgtttagttcaaattatttagttgtaagtgaattttggtttgtgttgttctattttattacaaaaggacggcgtcatcatggttaa

SEQ ID NO: 415585 - DNA, 1110 bp, Staphylococcus aureus
atgagaattttaaatattgtatcgagtaatattgttcaagacccaagggtacttaaacaaatagaaacaattaaaggcgttacgaatgattataaaattgttggaatgaataattcacaagctactaataggcgattggaaaatttagattgtaattatcgtttgttaggtagcaaggtagatcccaaaaatattctttctaaattaattaagcgtataagatttgcaacaggtgttatccgagaaattaaagcttttaaacctgacgtgattcatgcaaatgatttcgacgtattattaatggtctatttaagcaattataaaaaagctaatattgtttatgatgcgcatgaaatatatgcgaaaaatgcctttattaataaagttccacttatttcaaagtttgtagaaagtatagaaaaacacatagtaaaacatcgtgttaatgccttcgtaacagtaagtcatgcagcaaaagaatattatcaatctaaaggatataagaaggaagcgaatgttattacgaatgcacctattttaaatgatagcagagaatttaaagaaatcgaaaactttaaagaaatcgtatatcaaggtcaaattgtaatggacagaggatatgaagagtttattattgcttcatcagcttttaaacagaatgctccttcattcataattcgagggtttggtccgcatgaagaagtgataaaagaactgattagttataactcggaaaatattaggttggataaaccagttgaagtaaaagaattggttgataagttagcagaaagtaatgttggtgttatcttgacgaaacctgtatctattaattttgaatatacagtatctaataaaatttttgaatgtatacatgctggtttaccagtaattttatctcctgtcaaagagcatatttatctcaatgaaaaatataaatttggcattgttttaaaggaagttacgccgttagaaattgaaaaggcggttagaaaattaagagataatcacgatttgtttaatcatttacgtcaaaatgcaattaaggcgtctaaaattttgaattggcaaatagaaagtgaacgattagtagaattatataaattttaa

SEQ ID NO: 415586 - DNA, 627 bp, Staphylococcus aureus
atgaggatagcgattgaaaagataattggtttgctgaaaaaccagtcctctaaagaatcgaatgttaagattcatcgcttggcgtatattacaaactcaaaatttgatggcaataactatatagatagatggtgtaaaatcaggaattctcacattggtgaatacagttatattggatttggtagtgattttaataatgtagaagtaggaagatattgttcgatatcttcggatgtaaaaattgggttaggaaaacatcctacacacttttttagctcatcaccgattttttattctaataataatccatttaacataaagcaaaagtttatagactttaatgaccaaccaagccgtacaacaattaaaaatgatgtgtggattggtgcaaatgtaattattatggatggattaacaataaatactggtgcagtcatagcagccggctcagttgttactaaaaatgtaggagcatatgaggttgttggtggggttcctgcaaaagtgattaagaagcgatttgacaataaaacaattgaaaaacttttggaaagcaagtggtgggagaaaacgcctgacaaactaaaaggattttcggttgaatatttaaataaaaaggatacttaa

SEQ ID NO: 415587 - DNA, 1125 bp, Staphylococcus aureus
atggaaaaactgaaattaatgacaatagttggtacaaggcctgaaatcattcgtttatcatcaacgattaaagcatgtgatcaatattttaatcagatattagtacacactggtcaaaattatgattatacattgaatcaaattttctttgatgatttggaattaagacaaccggaccactacttagaggcagttggaagtaaccttggagaaacgatggggaatattattgcgaagacatatgacgttttattacgcgaacaaccagatgcacttttaattcttggtgatacaaatagttgtttagcagcagtatctgctaaacgattaaagattcctgtgttccacatggaagcgggtaatagatgctttgatcagaatgtacctgaagaaatcaatcgtaaaattgttgaccatgtcagtgatgtgaatctaccttatacagaacatagcagacggtatttattagatgaaggcttcaataaagcgaatatctttgtgacaggatcaccgatgacagaagtgatagaagcgcatcgagataaaattaatcacagtgacgttttaaataaactaggattagaaccgcaacaatacattttagtatctgcgcatagagaagagaatatcgataatgaaaagaattttaaatcattaatgaatgcgataaatgatattgccaaaaagtataaaatgcctgtgatttattcaacgcatccaagaagttggaagaaaattgaagaaagtaaatttgaatttgatccattagttaaacagttaaagccatttggtttctttgattataatgcattgcaaaaagatgcatttgttgtgctatcagatagtggaacattgtcagaagagtcgtctattttgaagttccctggtgtccttattcgaacttccacagaaagaccggaagtactagataaaggtacggttattgtaggtggtattacctataacaatctaatccaatccgttgaactagcaagagagatgcaaaacaataacgaaccgatgattgatgctattgattataaagacactaacgtttcgacaaaggtagttaaaattattcaaagctataaagatattatcaatcgaaatacttggaggaaatga

SEQ ID NO: 415588 - DNA, 765 bp, Staphylococcus aureus
atgattgatattcataaccatatattgcctaatatcgatgacggtccgacaaatgaaacagagatgatggatcttttaaaacaagcgacaacacaaggtgttacagaaatcattgtaacatcacatcacttacatcctcgatataccacacctatagaaaaagtgaaatcatgtttaaaccatattgaaagcttagaggaagtacaagcactaaatctaaagttttattatggtcaggaaataagaattaccgatcaaatccttaatgatattgatcgaaaagttattaccggtattaatgattcacgctatttactaatagaatttccatcaaatgaagttccacactatactgatcaattatttttcgaattacagagtaaaggctttgtaccgattattgcacatccagagcggaataaagcaataagtcaaaaccttgacatactatacgatttaattaacaaaggtgctttaagtcaagtgacaacggcgtcattagcgggtatttccggtaaaaaaattagaaaattagcaattcaaatgattgaaaacaatctgacacatttcatcggttcagatgcgcataacacagaaatcagaccgttcttaatgaaagacttatttaatgataagaaattacgtgattattatgaagatatgaacggatttattagtaatgcgaagttagttgttgatgataaaaaaattcctaaacgaatgccacaacaagattataaacagaaaagatggtttgggttataa

SEQ ID NO: 415589 - DNA, 687 bp, Staphylococcus aureus; identical to SEQ ID NO: 405043

SEQ ID NO: 415590 - DNA, 669 bp, Staphylococcus aureus
atggaaagtacattagaattaacaaaaattaaagaagtattacaaaaaaacttgaagattttaattattttaccgctattatttttaattattagcgctattgttacatttttcgtcttatcacctaaatatcaagctaatactcaaatcttagtgaatcaaactaagggtgacaatcctcagtttatggcacaagaggttcaaagtaatattcaacttgtaaatacgtataaagaaattgttaaaagtcctagaattttagatgaggtgtcaaaggacttaaatgataagtattcaccatctaaattgtcgagtatgttgacaattacaaaccaagaaaatacgcaacttatcaacatccaagttaaaagtggtcataaacaagattcggaaaaaattgcgaatagcttcgctaaagttacaagtaaacaaattccgaagattatgagtgtggataacgtatcaattttatctaaagcagacggtacagcagttaaagtcgcaccaaaaactgtagtgaatctaatcggtgcattctttttaggattagttgtcgcgcttatatatatcttcttcaaagtaattttcgataagcgaattaaagatgaagaagatgtagagaaagaattaggattgcctgtattgggttcaattcaaaaatttaattaa

SEQ ID NO: 415591 - DNA, 1176 bp, Staphylococcus aureus
atgtttattggcaagaatttagaatacgtgagaaagcttaatgctctaagtagaaaagaattatcagaaaaaataaatgtgagtgaacaagcaatttggcaatatgaaacaaaaaatatgatgccagaaattagtaaaatttatgatatgacatctatttttaatgttaaatctagctactttattagcgagcagcccgaagagctcctaataaattctgtcgataaacatagtatagcttttagagcaaaaaattataaagtatctacgaaactattaaataagcaatattatcaagcaatgtatttatctaatttaactagctacttattttcttttgtaacgataccggataatattattttatctttaataaataatttagatgaattgttgaatggcaatttagaatcactaaataaaaaagaaagcataaaagaaattgctaaagttgtgagggctaaaattcttcaagatgaaagcaacgaagcactattatttatgcttgaaaaagcgggtatagttatatacgaaaagcgaattaatgatagcatagacgcatatagtttttggagtaaagatcagacaccttttattatactgggtacaaataggggggtagcagttagaaggaattttgatcttgcacatgagctgggacatctcgttctacatcgtcatattcaattcgacttattatctcctgaagaatataagacaattgaacatgaggcagatattttcgcctctgaatttttactacctgaagaagcgtttaaaaaagactttgatcaaatgaccaaaaaatcaaatcctgattatttagctgtattgaaagaaaaatggtatgtttctatacaagcaattgcaatgagagcttattatctaggcctaatgtctagtactcagtacagatatttttgggcatcattaaataaaaaaggctataaaagtaaagagcctttagacgacgtgattgaaatgtcacgtcctgtcaaaatgaatagtttattaaagttgtattttgatagaaatatactgacaccacaaaaattattgaattatttaaaagtcgatgaaacatttttgaatcatctagcaggtattaatttaaaactctttaaggattatgttaatgaaaatagagaatataatataacgaatctatataaataa

SEQ ID NO: 415592 - DNA, 777 bp, Staphylococcus aureus; identical to SEQ ID NO: 410930

SEQ ID NO: 415593 - DNA, 1536 bp, Staphylococcus aureus; identical to SEQ ID NO: 415485

SEQ ID NO: 415594 - DNA, 1227 bp, Staphylococcus aureus
atgaagaaccaattgatagatagattaacaagatatacgacaattgatacgcaatctgatccaaaatctacaacaacaccttcaactgaaaagcaatgggatttgttacatttattagaaaaagaattacaacaattaggattgccaactgatttagatgaaaatggctacttatttgctacattagaaagtaacatcgatgccgacgtcccaacagttggatttttggcgcatgttgatacatcacctgatttcaatgcttcaaatgttaaaccgcaaattattgaaaactatgatggtaagccatacaaactaggcaatactaaacgtgtcttagatcctaaagtatttccagaacttaacagtttagttggtcatacattaatggtaactgatggtacatcgttactaggtgcagacgataaagcgggtattgtggaaattatggaagctatttgttatttacaagaacatccagaaattaaacatggtaccattcgcattggatttacaccagacgaagaaatcggtcgtggtccacataaatttgatgttgaccgcttcaatgctgattttgcttatactatggatggtagtcaatatggagaattacaatatgaaagctttaacgctgctgaagcggttattacatgccacggtgtaaatgttcatcctggttcagctaaaaatgcaatggtaaacgcaatacgtttaggtgaacaattcgatagtttgctacctgatagtgaagttccggagcgaacagaaggatacgaaggcttttatcacttaatgaactttgaaggaactgttgaaaaagcaactttgcaatacattattcgtgatcatgataaaaaacaattcgaattgcgtaagaaacgtattttagaaatacgtgacgatatcaatgcccattttgaaaattatccagttaaagttgatatatcggatcaatatttcaatatggcagaaaaaatattaccattgcctcatattattgatatacctaaacgtgtctttgccaaattagatattccagcaaacactgaacctattcgtggtggtacagatggttcacaattgtcatttatggggttaccaactccaaacatctttacaggttgcggtaacttccacggcccatatgaatatgcatccattgatgttatggaaaaagcagtacaagtaatcattggaattgtagaagatatcgctgaaaatcactaa

SEQ ID NO: 415595 - DNA, 795 bp, Staphylococcus aureus; identical to SEQ ID NO: 408177

SEQ ID NO: 415596 - DNA, 762 bp, Staphylococcus aureus; identical to SEQ ID NO: 408179

SEQ ID NO: 415597 - DNA, 243 bp, Staphylococcus aureus; identical to SEQ ID NO: 415442

SEQ ID NO: 415598 - DNA, 459 bp, Staphylococcus aureus; identical to SEQ ID NO: 415506

SEQ ID NO: 415599 - DNA, 294 bp, Staphylococcus aureus; identical to SEQ ID NO: 405170

SEQ ID NO: 415600 - DNA, 393 bp, Staphylococcus aureus; identical to SEQ ID NO: 405158

SEQ ID NO: 415601 - DNA, 762 bp, Staphylococcus aureus; identical to SEQ ID NO: 415468

SEQ ID NO: 415602 - DNA, 792 bp, Staphylococcus aureus; identical to SEQ ID NO: 414985

SEQ ID NO: 415603 - DNA, 705 bp, Staphylococcus aureus; identical to SEQ ID NO: 414318

SEQ ID NO: 415604 - DNA, 702 bp, Staphylococcus aureus; identical to SEQ ID NO: 415515

SEQ ID NO: 415605 - DNA, 438 bp, Staphylococcus aureus; identical to SEQ ID NO: 405148

SEQ ID NO: 415606 - DNA, 1695 bp, Staphylococcus aureus
atgacaaaaacgaaacaagcaatacatattgataacatatactgggaacgtgttcagttatatattgaaggacatagtgaaggtgtcgatttaacatcaggacaatttgttctgaggaatttaaccgaaacaaaaacattagaagcaaatgaaatgaaaatagacggtaatacatttatatgtagattcaacgtcgcaatattagacgatgggtattatttaccaatggataaatatttatttgtttatcatgaccagttagagtatattggacaacttaatccaaatattattgatcaagcttatgcggcattaaatgaagagcaaattgaagaatacaatgagctgactacacaaaatggaaaagtgaactatttattagcgtatgatgctaaagttttccgtaaaggtggcgtatcacaacatacggtctataccattactccggaaatagcaagtgacgttaacgaatttgtatttgatattgaaatcaccttacctcaagagaaatcaggggtcattgcgacaagtgcacactggcttcataaacaaggtcataaagcttcatttgaaagtagaagtttcttatttaaagctatttttaatattacaaagttactacatattaaaagaagcaaaacaatattattcacatcagattcgcgtccgaatttatcagggaatttcaagtatgtatatgatgagttactacgccaaaaagtagattttgattatgatattaaaacggtatttaaggcgaatattacggatagacgcaaatggagagacaagtttagattgccatatttacttggtaaggccgattatatttttgttgatgatttccatccattaatttatacggttcgctttagaccatcacaagaaattattcaagtgtggcatgctgttggtgcctttaaaacagttggctttagtcgtacaggtaaaaaaggtggtccgtttatcgattcattaaaccatcgtagttacacgaaagcatatgtttcatcagaaaccgatattccattttatgctgaagcatttggaattagagaagaaaatgttgtaccaacaggtgtaccacgtactgatgtactatttgatgaagcttatgcaacacaaattaaacaagagatggaagatgaattgccaattataaaaggtaagaaagttattctattcgcaccgacatttagaggtaatggtcacggtacggcacattatccattttttaaaattgattttgaacgtttagcaagatactgcgagaagcataatgcagttgtgttattcaaaatgcatccgttcgtaaaaaatagacttaatatttcacgtgaacatagacaatactttatcgatgtgtcagatcatcgtgaagttaacgatattctctttgttacagacttgttgattagtgattattcatctttaatatatgaatatgcagtatttaaaaagccgatgattttctatgcatttgacttagaagattacattacgacgcgtgatttctatgaaccatatgaatcatttgttccaggtaaaattgtacaatcctttgatgcattaatggatgctttggacactgaagattatgaggttgaaaaagttgtaccattcttagataaacattttaaatatcaagatggtcgctcaagtgaacgtttagtcaaagatttgtttagacgctaa

SEQ ID NO: 415607 - DNA, 717 bp, Staphylococcus aureus
atgatttatgcaggtattttagcaggaggtattggttcgagaatggggaacgtgccattaccaaaacaatttttagatattgataataaaccgattttaatccatacaattgagaagttcattttagtgagtgaatttaatgagattattatcgcaacgccagcacagtggatttcccatacacaggatattttaaaaaaatataacattacagatcaacgtgtcaaagtagttgcaggtggtacggatcgaaacgaaacaattatgaacattatcgaccatattcgcaatgtaaatggaattaataatgatgatgtgattgtaactcatgatgccgtaagaccatttttaactcaacgtattattaaagagaacattgaagtagcagcaaaatatggtgcagtagatacagtcattgaagcaattgatacgattgtaatgtctaaagataaacagaacatacacagtatccctgtaaggaatgaaatgtatcaaggccaaacaccacaatcatttaatattaaattattacaagatagttatcgcgccttaagtagtgaacaaaaagaaatcttatcagatgcatgtaaaataattgtcgaatctggacatgcagttaaattggtacgtggagaactatacaacattaaagtgacaacaccgtatgatttaaaagtagcaaatgccattattcaaggtgatattgccgatgattaa

SEQ ID NO: 415608 - DNA, 1044 bp, Staphylococcus aureus; identical to SEQ ID NO: 413353

SEQ ID NO: 415609 - DNA, 147 bp, Staphylococcus aureus; identical to SEQ ID NO: 413354

SEQ ID NO: 415610 - DNA, 2097 bp, Staphylococcus aureus; identical to SEQ ID NO: 415521

SEQ ID NO: 415611 - DNA, 1146 bp, Staphylococcus aureus; identical to SEQ ID NO: 415523

SEQ ID NO: 415612 - DNA, 174 bp, Staphylococcus aureus; identical to SEQ ID NO: 405125

SEQ ID NO: 415613 - DNA, 357 bp, Staphylococcus aureus; identical to SEQ ID NO: 405124

SEQ ID NO: 415614 - DNA, 1476 bp, Staphylococcus aureus; identical to SEQ ID NO: 415526

SEQ ID NO: 415615 - DNA, 1506 bp, Staphylococcus aureus; identical to SEQ ID NO: 415527

SEQ ID NO: 415616 - DNA, 345 bp, Staphylococcus aureus; identical to SEQ ID NO: 405115

SEQ ID NO: 415617 - DNA, 1164 bp, Staphylococcus aureus
atggtaaaacttacaacaaagatagcttccttaaaactattcgcaagttatgctatagcaacttatattttagttatgttaacgagtgcattaaatctttttaaaggttatgtggccgatacgttctatattgctgaaacattgctaatcattttaaccatcattttaattatcattttaacaacggaacaaacatggaagcatcatgacctatggcgacgtatcgtcgaagtgttgttattgttgatggcattaacaggcaacgtatttacattattaatgtttgtaagtattagacgttaccaacgtacatcgcaaatacatagttataacgggtgggaatcgtttatacgaaaaactactagacatcgtattgcgattatcgggttacttattttagtctacatgctgacattatcaattgtgtcacaatttacatttgatacgacattggctactaaaaatcagttcaatgcactgttacatggaccgagtctagcctatccgtttggtactgatgatttcggtagagacttatttacacgcgtagttgtaggaacgaagctgacattttcaatttcaattatttcagtagttattgcagttatttttggtgtgttactaggcactatcgcaggttattttaatcatattgataatttaataatgcgaattttagatgtagtgtttgcaattccatcattattgttagcggtggcaattattgcatcatttggagcaagtattccaaatttaattattgctttaagtatcggtaatataccatcatttgcacggacaatgcgtgccagtgttttagaaattaaacgcatggaatatgtagatgcagcacgtatcactggtgaaaacacttggaatatcatatggcgttatattttaccgaatgcgattgcgcctatgattgtacgtttttcattaaatataggtgtggttgtattaacaacaagtagtttaagtttcctaggacttggtgttgcacctgatgtagctgaatggggcaacattttacgtaccggtagtaactacttggaaacgcacagtaatttagctattgtacctggtgtttgtattatgttcgtcgttttagcatttaattttataggtgatgcagtgcgtgatgcactagatccaagaattcattaa

SEQ ID NO: 415618 - DNA, 1719 bp, Staphylococcus aureus; identical to SEQ ID NO: 408077

SEQ ID NO: 415619 - DNA, 681 bp, Staphylococcus aureus; identical to SEQ ID NO: 408074

SEQ ID NO: 415620 - DNA, 600 bp, Staphylococcus aureus; identical to SEQ ID NO: 408072

SEQ ID NO: 415621 - DNA, 282 bp, Staphylococcus aureus; identical to SEQ ID NO: 405087

SEQ ID NO: 415622 - DNA, 897 bp, Staphylococcus aureus; identical to SEQ ID NO: 415558

SEQ ID NO: 415623 - DNA, 762 bp, Staphylococcus aureus; identical to SEQ ID NO: 415572

SEQ ID NO: 415624 - DNA, 1146 bp, Staphylococcus aureus; identical to SEQ ID NO: 415580

SEQ ID NO: 415625 - DNA, 2610 bp, Staphylococcus aureus; identical to SEQ ID NO: 411243

SEQ ID NO: 415626 - DNA, 777 bp, Staphylococcus aureus; identical to SEQ ID NO: 410930

SEQ ID NO: 415627 - DNA, 501 bp, Staphylococcus aureus
atgactacagagacatggaatcgatataattccagtatttctacatatgatgtaaataacttaggttacaactatagaatggatgatctacgtgcttctttaggtatttctcaatttaaaaatatgaaaagaaacaaaatacacagaaagaatttagtaaacaaatatagagaattattgttgggttataaagaaataactattccatttctaacaaataatactgatagttctaattatatttttgttatatttgtaaaaaatcctattttgaaagaaaaaatgattactgatcttagaaatgagaagatacagactagtttccattatactcccttacataaatttagttattataaatcaaaaaacttattaccaattgtagaggaggtttctaaaggtttagttacattacccttacataatcgtttatctatcaatgatgtaaaaagggtctgcactattattagtaaaagtatacaggaatggagagagcaataa

SEQ ID NO: 415628 - DNA, 747 bp, Staphylococcus aureus
atgaatcggctaaatacaaattactttgataacttttatattgattggcagaacaatgaaatatcagaaaattatgttgaattttgtcaaaagcaaattaataacttaagtcacattgttccttcattaaaaaaagagaaaagaaaaatcatcgatacttgttgtggctgtggttttcattctaaatttttgatagataaaggtcatcatgttattagctttgacaaatctgaggaaatgttgaactttgcatataaaaaaaatggcattttaggtaaaagacaatctttagatgaagaattcccagaaaatcacgtcgacttaattcttaatttaaatacttctatcggatataaaaaaaatgatttaaaaaatttgttaagaaatagttatacctccttaaaaaaaggtggtattttaattatagatttgatgaaccccgcctttttctataaaaattttgaagaacaaatgattttcaacttcaaagattacgaagttaatcaaactattaaaataaataaaatttataatagtatagtttcaacatgggatgtttataaaaataacgaatatagcaaagacctttcaagagaattaaaatttaaattatatactactaatgatataatttgcagtagtttgtattataactttactttatccaatatatctttctatggagacatgaaaggaaatgaatttcatgaaaattcaccaagactaatagtaaaaataacgaaataa

SEQ ID NO: 415629 - DNA, 3075 bp, Staphylococcus aureus
ttgacaaagaaatatttaaacacccagaatgaaatatcagcattttggaatactcaaaagatatttaaaaaatcaattgacaatagaaaaggacaggaaagttttgttttttatgacggccccccaactgcaaatggccttcctcatgctggccatgttcttggaagagtaatcaaggatttagttgcaagattaaaaactatgcaaggtttttatgtagaaagaaaagcaggatgggatacccatggcttaccagttgaattagaggttgaaaaaaaaattggaattaaaggaaaacaagacattgaaaagtatggaatagaaaattttataaatgaatgtaaaaaaagtgtatttaattatgaaaaagaatggcgggatttttctaaagatttaggatactgggttgacatggactccccctatataactcttgagaataattatattgaaagtgtatggaatatattatctacattccataaaaaaggactattatataagggacataaggtgactccttattgtacacatgatcaaaccgctttaagttctcatgaagtagcgcaaggctataaaaacgttaaagatttatcagctgttgttaaatttcaacttacaaatagtaaagatacttatttcttaagttggactaccactccctggactttgcctgcaaatgtagcattagctataaataaagatcttaattattcaaaaattcgggtagaaaatgagtattatatcttagctacagatctaattaattctataataactgaaaaatacgaaattattgataccttttcaggaagtaatttaattaatttaaaatacattcctccttttgaaagcgacggtttagttaatgcatattacgttgttgatggagaatttgttactaactcagaaggaactggtattgttcatatagcaccagctcatggggaagatgactaccaattggttttagagcgtgatttggatttcttaaatgttataacaagagaaggagtatataatgataggttccctgaattagttggtaataaagctaaaaatagtgatatagaaatcataaaattattatccaaaaaacaacttttatataaaaaacaaaaatatgagcataattatcctcattgttggagatgtggtaatcctttgatatattatgcgatggaaggttggtttattaaaacaactaattttaagaatgaaattattaacaataataataatatagagtggtttccttctcatattaaggaagggagaatgggaaatttcttagaaaatatggttgattggaacattggtagaaatagatattggggaacaccattaaatgtatggatttgcaatgattgtaatcacgaatacgcaccaagtagtattaaggatttacaaaataattccatcaataaaattgatgaagatattgagttgcatagaccttatgttgataatatcactcttagttgccctaagtgtaatgggaaaatgtctcgagtagaagaagtaatcgatgtttggtttgatagcggctctatgccgtttgctcagcatcattatccttttgataaccagaaaatttttaatcaacactttccagctgattttattgcagaaggagttgatcaaacgagaggctggttttacagtttactagtaatttctactattctaaaaggaaaatcttcttataaacgtgctttatctttaggacatattctagacagtaatggtaaaaaaatgtctaaaagtaaaggaaacgttattaatccaactgaattaattaataagtacggagccgattctttaagatgggccttaatttcggatagtgctccatggaataataaaagattctcagaaaatatagtagctcagaccaaatcgaaatttatagatacgcttgataatatttataaattttataatatgtataataaaatagatcactataatcctaataatgaaattacaaaaagtagaaatacattagataattgggctctttctcgcttaaacaccttaataaaagaaagtaatatttatgtaaataattacgatttcacttccgcagccagattaattaacgaatataccaatacaataagtaattggtatattcggagatcgagaggacgattttgggaacaaggaatttctaacgataaaaaagatgcgtacaatacgctttatgaaattttaacaactttatcaagactagtggctccatttgttccatttatatctgaaaaaatccattataatttgactggaaaaagtgtgcatttacaagattatccacaatataaagaaagttttattaatcaagcattggaagatgaaatgcataccgttataaaaattgtagaattatctagacaggctcgcaaaaatgcagatttaaaaattaagcaacctttatcgaaaatggtgattaaacctaatagtcaattaaacttaagttttttacctaattactattcaataataaaagacgaattaaatataaaaaacattgaattaactgataatattaatgactatattacctatgagcttaaattgaatttttcttctgtgggaccaaaactagggaacaaaacgaaaaatattcaaacattgatagactccctatcagagtatgataaaaaaagtttaattgagtctaataacttcaaaagtttatcttctgatgctgagttaactaaggatgattttataattaaaaccttacctaaggatagttatcaactcagtgaagataatgactgcgttatattattagataaaaatttatctcctgaattaattcgcgaaggacatgctagagagctcattagattaattcaacaattaagaaaaaagaaaaatttaccaataaatcaacgtattgatatttatatcggtgtaactggggaattattagaatcaataaaaaccaataaaaatatgtttaaagaaaatttgctgattaaaaatatacacttaaatgttatagatgaatatgaaaatactattcattttaataataaagaaataaaaatttccttattatattaa

SEQ ID NO: 415630 - DNA, 363 bp, Staphylococcus aureus
atgtataattttgattattctaaattaccaattaaaaatattcaaaaaatatttcctattgcagggggatatgtgaatctatctttttcagttgatgcttccaacaaaaaatattttttaaagctacaacctaatactaaatcaaatttttttgattatgagttatccagtttaaaagaattaactgataaaaatattcctgttcctcaaattattaataaaggagaattagacaataattcttttttactgttagagttcattgaaaatggccatgcttatcctgaaagctatagaaaactaggtaaaatagttgcaaacatgcataaaaaggttctgttgcaaagtaaaaaatatagctaa

SEQ ID NO: 415631 - DNA, 156 bp, Staphylococcus aureus; identical to SEQ ID NO: 409125

SEQ ID NO: 415632 - DNA, 1326 bp, Staphylococcus aureus; identical to SEQ ID NO: 409127

SEQ ID NO: 415633 - DNA, 861 bp, Staphylococcus aureus
atgcattatggcgttgtgcctataactgatgacggtcgtttaagtgcaaaagaagttgtagggaataaaaaggctttaacagagtttcaagatagatttaacgaatatgttaatcaacgtggttatgatctggaacgtgggcaatcaagacaagttacaaatgcaaagcatgagcaaataagtcagtataagcagaaaacagaatatcataaacaagaatatgagcgtgagagccaaaaatcagactatataaagcaaaaaaacgataaattgatgcaagagtatcaaaaatcattaaatacgcttaaaaagcctataaatgttccatatgagcttgaaacggaaaaagtaggtggtttatttaacaaagaaacacaagaaactggaaatattgtaataagccaagaagattttaatgcttttcaaaagcaaatagaagctgcacaatcaatctcagatgactatgaacgtattaagtctggagataaattaaatgaaatggaaaaggaatataaagaagttagagatacctttttaaaaacatatgagatgtatcaaggtttacaacaagaaaatagagaattgaaagaagagaataaagagataaaagatgatttggataaaactaataaacttttatatcactgtaaaattgctatttctaagttgttagaagaattgaatcgtatgtttgaaagaagagaatttgtagataaaatacgagggttagggaaagataatgaccaagttctgaatgttatgcgtattatagacaaagagaataatcctcaacattatcaagaacaaaaacaagaagaacaaaaaagtgagccaaaacgtgatagaggtatgagtagataa

SEQ ID NO: 415634 - DNA, 222 bp, Staphylococcus aureus
atgaaaaatacatatattaaaacactagaaactttaaaaggtaaatgtaatttagtaacaaattctgaatctctttcagacttaaaagacagtgatatattttggactgacgcaatgttatctatgttagaaaatatgaaaaaagaacaagtaacagttgaagaaggaattgcctatttagagaatattattcaaaaaagtggaagtaattataaaaattaa

SEQ ID NO: 415635 - DNA, 735 bp, Staphylococcus aureus; identical to SEQ ID NO: 407375

SEQ ID NO: 415636 - DNA, 1269 bp, Staphylococcus aureus
atgccgtattctattatcagagttgctaaagtaaaatcaaaaacgaatacaaaaggtattcaaaaacatgtacaaagacaaaataaaaattatgaaaatatggatattgatttagaaaaatcatacttaaattatgatttagtcaatgatagtccgattgattataatcaaaaaatcgatgagaaaattgaacaaaattataatgggaaacgcaaaattagaaaagacgcagtaaaacatattgatggtttaattacatctggtaatgaattttttaaaaatcaaacacttgaagaaacaaagcagttttttgaacatgctaaaacgtttttagaacaagagtatggaaaagataatttattatatgcaacagtgcatatggacgaaaaaacacctcatatgcattatggggtagttccgattacagaagatggtcgattgagtgcgaaagaggttttaggtaataaaaaggcactaactgaatttcaagatagatttaacgaacatatcaatagttgtggttatgacttgagtagaggtataacaaggggcgttacaccgagacgacatgagcagataagtcgttataaaaatttaacagattatcacaaagaagaatatgagcatgagagccgaaaattagaccgtataaagcaagaaagcgaagaagtaatggaacagtatcaaaatgctttagatgttctaaaaaagcctataaatgtcccatatgagcttgaaactgaaaaagttggtggactgttcaacaaagaaacacaggaaacaggtaacgtcgttattgataaaaatgaatttgatttattgcaggaacaagtaaaagcttctcaactcattactgatgattatgaatatattaaaagcggaaaggctttaaaagattttgaggaaaaaaacaaaagattagaagatagattattagacgaacagattaaaaatggaaaagtaatagatgaatacaatgatttagcggatagttataataatttattggaacaaaatcaagaaaaagaaaaagagttaaaccgttcgtataaactatttaacaatgtgtttaagttgattaaaggtgtgatgaaagaagaaacatatcattcgttgattaaccatattgataatcacttagaaagctcaaaaatgcgagaaacaatgattgtagatgataacgatgaacaattctttaagaaaaaatatcaaaggcatgaaccagaaattatttttgaagatgaacgagatgatggctacactttataa

SEQ ID NO: 415637 - DNA, 1206 bp, Staphylococcus aureus; identical to SEQ ID NO: 412952

SEQ ID NO: 415638 - DNA, 486 bp, Staphylococcus aureus
atgactgctggaacacaacaagctatgaattttgaaagtcatcgcttatgcacgattaaggcaaagcaagagctacgaattggtacgtggtcaattttaccatttgacattgaacatgacgctaacgagcctgtggctttcttattacaaagcacattaggttataaggttctgtatgttactgatacaaagtatttgaaatacaaatttaacggcattacgcacatgatgttagaagttaattatatctatgaacaaatgcaggaaaacataaaaaacggcagtgtgcacagcgcattagcaaacagaattatggagtctcattttagcttagaacatgctatcggaatgttaaaagcaaatgatttaactagactcgaagaaatacatttaattcatttaagtagccaaaattcaaatgcaaaatacattaaaagtgaaatacaaaaagtgacgggcgcgcccgtttatgttggaggtttataa

SEQ ID NO: 415639 - DNA, 231 bp, Staphylococcus aureus
atgttaactaagaatattaagtatccttatgtaaaatttggttttgatgttgtaggtgtgcttgctagtattggtatttttttaatatttgtttttaatacacatgctaacttcggctctgatggtagttcttcatttggaataaatgttacaggttctagcatggttttattatctagtttaattttgattgttgttatatgtggttctgttgcaaagttgaatttatag

SEQ ID NO: 415640 - DNA, 324 bp, Staphylococcus aureus
atgtctgaacatctgtggcgtgtagaagttgaattgaaaagagatatggttgattactggaatgattgttttaatgacttacacattttgaaacctgcgtggactactttagaaaaaattaatgagcaagctatggtttatactttgctgcatgaagaaagtatgtggggaaaattaagtaggaatactaagtataaatttaaaaatttaattaaagaaatatctccagttgatttaacggaattaatgaaatcgactttaaaagcaaacgaaaaacaattgcaaaagcagattgatttttggctatcagattttgaattttga

SEQ ID NO: 415641 - DNA, 213 bp, Staphylococcus aureus; identical to SEQ ID NO: 408127

SEQ ID NO: 415642 - DNA, 2907 bp, Staphylococcus aureus
atgaatttattcagacaacaaaaatttagtatcagaaaatttaatgtcggtattttttcagctttaattgccactgttacttttatatctactaacccgacaacagcgtctgcagcagagcaaaatcagcctgcacaaaatcaaccagcacaaccagctgatgccaatacacagcctaacgcaaatgctggtgctcaagctaatcctgcagcacagccagcaaaccaaggtggacaggctaatccagcaggaggagcagcacaaccagctggacaaggtaatcaagctgatccgaataacgctgcacaagcacaacctggaaatcaagcagcaccggcaaaccaagcaggtcaaggaaataaccaagcaacacctaataataatgcaacaccggcaaatcaaacacagccagcgaatgctccagcagcagcgcaaccagcagcacctgtagcagcaaacgcacaaactcaagatccaaatgctagcaatactggtgaaggcagtattaatacgacattaacatttgatgatcctgccatatcaacagatgagaatagacaggatccaactgtaactgttacagataaagtaaatggttattcattaattaacaacggtaagattggtttcgttaactcagaattaagacgaagcgatatgtttgataagaataaccctcaaaactatcaagctaaaggaaacgtggctgcattaggtcgtgtgaatgcaaatgattctacagatcatggtaactttaacggtattacaaaaactgtaaatgtaaaaccagattcagaattaattattaactttactactatgcaaacgaatagtaagcaaggtgcaacaaatttagttattaaagatgctaagaaaaatactgaattagcaactgtaaatgttgctaagactggtactgcacatttatttaaagtaccaactgatgctgatcgtttagatttacaatttattcctgacaatacagcagttgctgatgcttcaagaattacaacaaataaagatggttataaatactattcattcattgataatgtaggtctattctcaggatcacatttatatgtcaaaaatagagatttagcaccgaaagcaactaacaataaagaatatactattaatactgaaatcggtaacaatggtaattttggtgcttcattaaaagcagatcaatttaaatatgaagtaacattaccacaaggtgtaacttacgttaatgattcattaactacaacattccctaatggtaatgaagacagtacagtattgaaaaatatgactgttaattatgatcaaactgcaaataaagttacatttacaagccaaggtgtgacaacggcacgtggtacacacactaaagaagttttattcccagataaatctttaaaattatcatataaagttaatgttgcgaatatcgatacacctaaaaatattgattttaatgaaaaattaacatatcgtactgcttcagatgttgtaattaataatgcgcaaccagaagttacactaactgcagatccattttcagtagcggttgaaatgaacaaagatgcgttgcaacaacaagtaaactcacaagttgataatagtcattacacaacagcatcaattgcagaatacaataaacttaaacaacaagcagacactattttaaatgaagatgcgaatcacgttgaaactgcaaatcgtgcatctcaagcggatattgacggtttagtaactaaattacaagctgcattaattgataatcaagcagcaattgctgaattagatactaaagctcaagaaaaggttacagcagcacaacaaagtaaaaaagttacgcaagatgaagttgcagcgcttgtgactaaaattaacaatgataaaaataatgcaatcgcagaaattaataaacaaataacatcacaaggtgtcacaactgaaaaagataatggtatcgcagtgttagaacaagatgtgattacaccaacagttaaacctcaagcgaaacaagatattatccaagcagttacaactcgtaaacaacaaattaaaaagtcaaatgcatcattacaagatgaaaaagatgtagcaaatgataaaattggtaaaattgaaacaaaggcaattaaagatattgatgcagcaacaacaaatgcacaagtagaagccattaaaacaaaagcaatcaatgatattaatcaaactacacctgctacaacagctaaagcagcagctcttgaagaatttgacgaagttgttcaagcacaaattgatcaagcacctttaaatcctgatacaacaaatgaagaagtagcggaagctattgaacgtattaatgcagctaaagtttctggtgttaaagcaattgaagcgacaacgactgcacaagatttagaacgcgttaaaaacgaagaaatattcaaaattgagaatattacggattcaactcaaactaaaatggatgcttataaagaagttagacaagcagctacagctagaaaagcgcaaaatgctacagtttcaaatgcaactgatgaagaagtagcagaggcaaatgcagcagtagatgcagctcaaacagaaggtttacatgacatccaagttgttaaatcacaacaagaagtggctgatactaaagcaaaagtattagataaaatcaatgcaattcaaacacaagcaaaagttaaacctgcagctgatacagaagtagaaaacgcatataatacacgtaaacaagaaatccaaaatagcaatgcttcaactacagaagaaaaagaagctgcatatacagaattagatgctaaaaagcaagaagcaagaacaaatcttgatgctgcaaatacaaacagtgatgtaacaacagctaaagacaatggtattgctgcaattaatcaagtgtaa

SEQ ID NO: 415643 - DNA, 156 bp, Staphylococcus aureus; identical to SEQ ID NO: 409129

SEQ ID NO: 415644 - DNA, 852 bp, Staphylococcus aureus
atgcgtttacgtcgtgtatctccaagaaaagttatagcgccattaattaaagcgcacaaagcaggactagcattaacaacaaaccaattagaatcgcattatctagcaggaggaaatgttgacagagttgttgatgctaatattgctgcacaacgtgctgacattgatcttcctttcgaacgtgctgctgcaattgaccttgcaggacgtgacgtattagaagcggttcaaatgtctgttaatcctaaagtcattgaaacaccatttatcgcaggtgtagcaatgaacggtattgaagtgaaagccaaagctcgtatcacagttagagctaatattgctcgacttgttggtggtgcaggtgaagaaacaatcatcgcacgtgttggtgaaggtatcgtttcaacaattggttctagtaagcatcatacagaagtacttgaaaacccagataatatttctaaaacagttttaagcaaaggtttagattcaggtactgcatttgaaattttatcaattgatattgctgacgttgatattagtaaaaatattggtgcagacttacaaactgaacaagcattagcagacaaaaatattgcacaagcaaaagctgaagaacgtagagctatggctgtagcaactgagcaagaaatgaaagcgcgtgtacaagaaatgcatgctaaagtagttgaagccgaatctgaagtaccattagctatggctgaagcattacgttcaggtaatatcagtgttaaagattattataatttgaaaaatatcgaagctgatacaggcatgagaaatgcaattaataaacgaactgatcaaagtgatgatgagtcacctgaacattaa

SEQ ID NO: 415645 - DNA, 1146 bp, Staphylococcus aureus
atgaaacagcgtggtaaaaggattcgcccatctggtaaagatttagtctttcattttacgatagcgtcactcctgcctgttttcctgctggttgtcggactgtttcatgtgaagacaatccagcagatcaactggcaggattttaacctatcacaagcagataagattgacattccctatttaattatcagtttcagtgtcgcaattcttatctgcttgctggtagcgtttgtattcaaacgggttcgctatgatacggttaaacaactttaccaccgtcaaaaactggcaaagatgatacttgaaaacaagtggtatgaatctgaacaggtcaaaacagagggtttctttaaagatagtgctggtcgtacaaaggaaaagataacctacttccctaaaatgtattatcgacttaaaaatggcttgatacagatacgggtggaaatcacgctgggaaaatatcaagaccaactcttacacttggaaaagaaattagagagtggcttgtactgtgagctgacggataaagagttaaaggattcctatgtggaatatactttgctctatgacaccatagccagtcgtatttctattgatgaagtagaagctaaagatggtaaacttcgcttaatgaaaaacgtatggtgggaatatgataagctccctcatatgttgattgctggtggtacaggtggcggtaaaacttactttatactgacactgattgaagccttgcttcatacagattcaaaactgtatattcttgacccgaaaaatgctgatcttgcggacttaggttctgtgatggcaaatgtctactatagaaaagaagacttgctttcttgcattgaaacattctatgaagaaatgatgaaacgtagtgaggaaatgaagcagatgaagaactataagactggcaaaaattatgcttacttaggtctcccggcacacttcttaatctttgatgaatacgtcgctttcatggaaatgctgggaacaaaagaaaacaccgcagttatgaataagctgaaacagattgtcatgttaggtcgtcaagctggcttctttctaatactggcttgtcaacgtccagacgcaaaatatttaggcgacggaatccgtgatcagtgtgcgacatgtttctaa

SEQ ID NO: 415646 - DNA, 1860 bp, Staphylococcus aureus
atgaataaagtaaaaacaaataaaacacttcgtcatagtgaatactatggcatgacacaaatatttgatgaactgtatgtaaaaagtgataaaaaagaagtttttacagagctcatgacaattattatgagtgatgaaaatattcgactagcatacagaaatatcaagaataacaagggcagttatacagcgagtaccgataagaaaagtattcgagacattaaaacactgtcagaagatacctttctaactgaggttaaagttctttttcgctgttacaaaccacgagcagttagacgtgtagaaattcccaaaccaaatggaaaaacacgccctctgggcattccatcaatctgggataggttaatacaacagtgtattttacaagtcttagaaccgatatgcgaagctaaatttcacaattatagttatggatttcgaccaaaccgttccacacatcatgcgattgctacctgcaatcgactggcaaatagggggaagctacactttgtagtagatgttgatattaaaggattctttgataatgtcaatcactctaaacttttgcgtcaaatgtggacgattggaatccgtgataaatggctattaggtattattcgatccatgctaaatgctcctatagtcctaccaaccggtaaagtcgaacaccctaaaaaaggtgtacctcaaggtggtgtcctatcccctttactatctaatatcatattgaatgaattagattggtgggttgcttcacaatggcaaaataccacgattgagacagaaaagattatggataggcgagataaaggcaaaggcattgataagactaatcagtatcgggcattaagacgaacaaacttaaaagaaatatacattgttcggtatgctgacgacttcaaaatcttttgtagaaaacgaagtcatgcagataaaatatttcacgcaacgaaaatgtggcttaaagaacggttatcacttgaaattagcgaagaaaaatccaaaattgtcaatctcaaaaaaggtaaatcagaatatctaggatttgaattaaagctaatcaagaaaggtaaaaaatacgtagtcgaaagtcatatgagcaaaaaatcaatgacaagagttaaaatccaattaaagaaacaattacgtaaagttgccagaccgaagaatcattgcgaacaagcaaaagaaattggattatataattctatggtgattggaatccatcaatattatggaattgcaacctgtgtaaatctcgattgcagtaaaatagcctatacactaaaaccgttcatcaatcacaaactgccgacaaagaaacatggaaagatattaaatacatttatcaaatcgaagtatggaaaaagtaaagaaatgcgatggttgaataatgtgccaattgtaccgctcaactatgttcagtttagacttgctgtccccctatcagagggaacttgcaagtacactgaaagtggacgaagcaagatacacagtaaattaaaattagacctagcccttttacttcacatgatgagaaatagtaattatgaaagaagtattgaatttgtggataacagaatatctaaatattctgctcaaaagggaaaatgtgctatcacgggtaaatttctcgaatacgaagaaatccattgccaccatatcgtaccagtaaaacaacagggtacagacaaatacagcaacctcattattattcacaaaaatgttcacgcattagtccatgctatcgaagaaaaaatcatacacaaatacctgaatgtattaaatctaaccaatgaacaaatagaaaaactaaatgaattacgtgtcaaagctggtaatagtgttttaacagtttaa

SEQ ID NO: 415647 - DNA, 741 bp, Staphylococcus aureus; identical to SEQ ID NO: 415516

SEQ ID NO: 415648 - DNA, 1056 bp, Staphylococcus aureus; identical to SEQ ID NO: 415518

SEQ ID NO: 415649 - DNA, 1434 bp, Staphylococcus aureus
atgttgtgcctccctattcacaaatgtgtaaatttattctatacttttgtatatcatagtaatctactcaagattattttacaaggagtgattatcataattacttatttagaatcttttaagtcgttgtatcacaaggcattttacaagtttgtattatcggtattaagcttgccaatatttttatatgcagtgataaagtttttcttttctgctaagagaaaaaatttttacgctaataattctgaaatttcagaaattgaacgagcgttacatcaaaaatataaatatttatcgcagcaaaagtcatccacacaaatacataaagaagcattaaaaatattcaaggcacaaagttctaatacgagttcaaagaatattgaacaagcacatttttcaacatactttgaaaatttattatttcataagttcatcatgatcaaagtaatattggccttgccgatgttcatcttattgactatttatttacagccattagttagatatatttttgagcgaattgtcatggctgtgattgtcatcattggtgttattgtcagtgtgtttaccattctgtatttttcaccgcttgatgcggcttatagcatactgggacaaaatgcaacaaaggcacagatacatcaattcaatgtattacatcatcttaacgaaccttattttattcaattgtgggataccatcaagggtgtttttacctttgacttaggtacgacttacaaagggaatgaggttgtgactaaagcagttggcgaaagaattccaattacaataattgtcgcagtattagcgctaattgtggcattaattattgcaataccaattggtattatcagtgcgatgaagcgaaatagttggcttgatatcacgttaatgataattgcattaattggtttatctattccaagtttctggcaagggctattattcattttagcgttctcattgaaattggatattttgccaccatcttatatgccagaacatccaatatcgttgattttacctgtacttgtcattggaacaagtattgctgcttctatcacgcgtatgacaaggtcttctgtacttgaagtaatgcgcagcgattatgttttaactgcttatgcaaaaggattatcgacgacacaagttgttattaaacatattttgaaaaatgccattattccaattgtaacgttagttggtcttctagtggcagagttactaggcggttcagcagtgacggaacaagtatttaacattaatggtatcggtcgttatatcgtccaaaaacaactaatacctgatatcccagcagtcatgggtggggtcgtatatatatcaattgtaatatctttagcaaacttaattattgatatattttatgctttaatcgatccaaaattacgtagtgaaattaacgaaaggaagtga

SEQ ID NO: 415650 - DNA, 723 bp, Staphylococcus aureus; identical to SEQ ID NO: 408079

SEQ ID NO: 415651 - DNA, 444 bp, Staphylococcus aureus; identical to SEQ ID NO: 408078

SEQ ID NO: 415652 - DNA, 1113 bp, Staphylococcus aureus; identical to SEQ ID NO: 408073

SEQ ID NO: 415653 - DNA, 2790 bp, Staphylococcus aureus; identical to SEQ ID NO: 408557

SEQ ID NO: 415654 - DNA, 1185 bp, Staphylococcus aureus
atgaattcaatcattgaattaactgattattatagctctaataattatgcaccacttaagcttgtcatttctaaaggtaaaggtgtcaaagtttgggatactgatggcaaacaatatatagattgcatttcgggtttttcagttgcaaaccaaggccattgtcatccaacaattgttaaagcgatgacagaacaagcttcaaagttgtctatcatttcacgtgtcctttatagtgacaatctcgggaaatgggaagaaaaaatttgtcatcttgctaagaaagacaaagtactctcccttaactctggtactgaagctgttgaagcagccattaaaattgctagaaaatggggctctgaagttaaaggcattactgacggacaagttgaaatcatcgctatgaataacaattttcacggtcgtacacttggctcattatcactatctaaccacgacgcatataaagcaggatttcaccccctacttcaaggcactacaactgtagattttggagacattgaacaattaacacaagctatttcaccgaatacagcagcaattattttggaaccaattcaaggtgaaggtggcgttaatataccaccgaaaggatatattcaagctgtgcgtcaactatgtgataaacatcaaatattaatgattgcagatgaaattcaagttggtcttggtagaactgggaaatggtttgcgatggaatgggaacaagttgttccagacatttatattttaggtaaggcattgggtggcggcttataccctgtatctgctgtacttgcaaataatgatgtcatgcgtgttctaacaccaggtacacatggttcaacatttggtggtaaccctttagccattgcaatatcgacggcagcgcttgatgtacttaaagatgaacaactggttgaacgatcagaacgcttaggttcatttttattaaaagcgttgctacaacttaaacatcctagtattaaagaaattagaggtcgtggtttatttataggcatagagcttaacacagatgctgcaccttttgtggatcaactgattcaacgtggaatcttatgcaaagacacgcatcgtactatcattcgattgtctccacctctagttattgataaagaggaaatccatcaaattgttgcagcttttcaagacgtttttaaaaattaa

SEQ ID NO: 415655 - DNA, 513 bp, Staphylococcus aureus; identical to SEQ ID NO: 415574

SEQ ID NO: 415656 - DNA, 204 bp, Staphylococcus aureus; identical to SEQ ID NO: 414932

SEQ ID NO: 415657 - DNA, 960 bp, Staphylococcus aureus; identical to SEQ ID NO: 415576

SEQ ID NO: 415658 - DNA, 510 bp, Staphylococcus aureus
atggggcagttacaggatatggagacacttatctcatttttaaaattaaataaggatcagcctcaaacgttaacaatactttgtggtcatggtaagaaatttgcagatgtcaaaacggcaatagaagaccatcgtattgaaaatgttaaaatgtttgagtttttaacaggtacagactatgctgacgtattaaaaattgcggatgtatgtattgcatcgctgattaaagaaggcgtcggtttaggcgttccgagcaagaattatggctaccttgcagctaagaaaccgttggtactcatcatggataagcaatctgatatcgttcaacatgttgaacaatatgatgcgggtatccaaattgataatggcgatgcacatgccatttataacttcatcaacactcactcgagtaaggaattgcacgagatgggtgagcgcgcacatcaactgtttaaagataaatatacgagagaaattaatactatgaagtattacaatctgttgaagtga

SEQ ID NO: 415659 - DNA, 657 bp, Staphylococcus aureus
atgagtgaaaaaaagattttgattttatgtcagtatttttatccggaatatgtatcttctgcgacgttaccaactcaattggcggaagatttaattgcgaatcacattaatgtcgatgtcatgtgtggatggccatatgaatatagtaatcataaacaggtttctaaaaccgagatgcatcgtggaattcgcattcgacgtctcaagtattcgaggtttaataacaaaagtaaggttggaaggatcatcaatttctttagtttattttcaaaattcgtgattaatatacctaaaatgttgaaatatgatcagattcttgtttactctaatccaccaatcttgccattaataccagacgttttacacagactgcttaagaaaaaatattcttttgtggtgtatgatatagcacctgataatgcgattaagacaggtgcaactcgtccaggtagcatgattgataagctgatgcgttacattaatagacatgtctacaagaatgctgaaaatgtcattgtccttggtacggaaatgaaaaactacttactaaatcatcaaatttctaaaaatgctgacaatatccatgtgattcctaactggtatgacatgcgtcaattacaagacaatcgtatctataatgacacatttaaagcttag

SEQ ID NO: 415660 - DNA, 1167 bp, Staphylococcus aureus; identical to SEQ ID NO: 415584

SEQ ID NO: 415661 - DNA, 288 bp, Staphylococcus aureus
ttgcaaacccttgctagtaaatttgaagatttagatatagacagtcacgacaatttgaatagtttcaaagcacgcatcggcagtactatcgataagttagctaaagctccaccccttaataagtatacatttactgaattaatgattatcatatctataatttacttcaaaaacctgtatattggaagattagataaaccttcatcgaggaagaaaaaaggaggtaatttaatttttgagatagtttataataatcaaatgcttaattcctcaactgccaaactataa

SEQ ID NO: 415662 - DNA, 450 bp, Staphylococcus aureus
gtgtataagagacagaagaaatatttaataaagttttgtcaagatcttatagaacatataaaagagcacagaaatcaaatcaatgattgtcactttacaaatatattaaataaagatgcagaaaaaactaatagttcaagtatcttaacttcattatttttaactgcaaacaatataccaaataatctatcatctaatttttctaaagcagtggaatattattttgcaaaaaacaaggaaatatatggagatggatatgaaaagtatttagacgagtattttagaaatgttttaggcgaaaaaagttatttaattttgatagatgatttttcagggacaggaaaatcaatcagcgactttattgatgcaataaaaaagtatatactaacattaaaaatagagattattatattttgcatacatataaccgaagatgcagaaaaaaaataa

SEQ ID NO: 415663 - DNA, 879 bp, Staphylococcus aureus; identical to SEQ ID NO: 409123

SEQ ID NO: 415664 - DNA, 846 bp, Staphylococcus aureus; identical to SEQ ID NO: 407199

SEQ ID NO: 415665 - DNA, 315 bp, Staphylococcus aureus; identical to SEQ ID NO: 408085

SEQ ID NO: 415666 - DNA, 459 bp, Staphylococcus aureus; identical to SEQ ID NO: 415506

SEQ ID NO: 415667 - DNA, 1689 bp, Staphylococcus aureus
ttggttaaaagtaagatatatatagataaaatctattgggaacgtgttcagttattcgttgaaggacatagtgaaaacctagatttagaagatagtaattttgtattaagaaatttaactgagacacgtacaatgaaggcgaatgatgtcaaaatagatgggaatcaattcgtttgtcgtttcaatgtagctatcttagataatggttattacttacctgaagataagtacttattagtgaatgagcaagaacttgattatattgcacagttaaacccagatgtgattaatgatgcatatcaaaatctaaagccagaacaagaagaagaatacaacgaattagaaacacaaaatggtaaaatcaatttcttattgcagacttacctaaaagaatttagaaaaggcggcatttcgaagaaaacggtttatactgttacacctgaaatttctagcgatgttaatgaatttgtccttgatgttgttgtaacgactccggaagttaaaagtatttatatcgttcgtaaatataaagaattacgtaagtatttccgcaaacaatcatttaatacaagacaatttatttttaaagcgatatttaatacgacgaaatttttccacttgaaaaaagggaatacggtgttgttcacatcagactctagaccaacgatgtctggaaactttgaatacatctataacgaaatgttacgtcaaaatttagataaaaagtatgatattcacactgtttttaaagcgaatattacagatagacgtggcatcatcgacaagtttagattgccatatttacttgggaaggcagactacatctttgttgatgactttcacccattgatttatacagtgcgttttagacgttctcaagaagttattcaagtatggcatgccgttggtgcctttaaaacagttggctttagtcgtactggtaaaaagggtggaccatttattgattcattaaatcatcgtagctatacaaaagcttatgtatcatctgaaaccgatattccattctacgctgaagcatttggtattaaagagaaaaatgtagtgcctacaggtgttccacgtactgatgtactatttgatgaagcttatgcgacacagatcaaacaagagatggaagatgaattaccaattattaaaggtaagaaagtcattcttttcgcaccaacatttagaggtagtggtcatggtacagcacattacccatttttcaaaattgatttcgaacgtttagcaagatattgcgaaaaaaataacgcggttgtattatttaaaatgcatccatttgtgaaaaatagacttaatattgcagacaaacataaacaatattttgttgacgtttctgactttagagaagttaatgatatactgttcataacagatttattaattagtgactattcatctttaatatatgaatatgcagtatttaaaaagccaatgattttctatgcatttgatttagaagattatattacgacgcgtgatttttatgaaccatatgaatcatttgttccaggtaaaattgtgcaatcatttgacgcattaatggacgccttggacaatgaagattatgaaggagaaaaagtcattccattcttagataaacattttaaatatcaagatggccgatcaagtgagcgtttagtcagaaatttatttggtagctaa

SEQ ID NO: 415668 - DNA, 1212 bp, Staphylococcus aureus; identical to SEQ ID NO: 415475

SEQ ID NO: 415669 - DNA, 495 bp, Staphylococcus aureus; identical to SEQ ID NO: 405107

SEQ ID NO: 415670 - DNA, 969 bp, Staphylococcus aureus
atgaaaataggtgtattttcagtattattttacgataaaaattttgaagatatgttagattatgtcgcagaatctggattggatatgattgaagttggaacaggtggtaacccaggagataaattttgtaagttagatgagttgttagaaaatgaagacaagcgacaagcatttatgaagtcaatcacagacagaggcttacaaataagtggtttcagttgtcataacaatccaatttctccagatccgatagaagcgaaagaagccgatgaaacgttacgtaaaacaatccgtttagcaaatctattagacgtgccagttgttaatacattttctggcattgcagggtcagatgataccgctaaaaagcctaattggcctgttacaccttggccaacagcctactctgaaatttatgattatcagtggaatgaaaagttgataccatattggcaagatttagctgagtttgcaaaagagcaagatgtaaaaattgccatagagttacatgcaggatttttagttcatacaccatatacgatgttaaagttacgtgaggctacaaatgaatatatcggtgctaacttagatcctagtcatttatggtggcaaggtattgatccaattgctgcgattcgcatattaggccaagcaaatgcaattcatcacttccatgctaaagatacgtatattaatcaagaaaatgtaaatatgtatggtctaactgatatgcaaccatatggtaacgttgcgacaagagcatggacattccgtacagttggttatggacatagtccatatgtatgggcagatatcataagtcaacttattattaatggatatgattatgtattaagtattgaacatgaagatcctattatgtcagtagaagaaggtttccaaaaagcttgtcaaactttgaaatctgttaatatttacgacaagccagcagacatgtggtgggcataa

SEQ ID NO: 415671 - DNA, 1272 bp, Staphylococcus aureus; identical to SEQ ID NO: 413358

SEQ ID NO: 415672 - DNA, 627 bp, Staphylococcus aureus; identical to SEQ ID NO: 415543

SEQ ID NO: 415673 - DNA, 1434 bp, Staphylococcus aureus; identical to SEQ ID NO: 415649

SEQ ID NO: 415674 - DNA, 222 bp, Staphylococcus aureus; identical to SEQ ID NO: 408076

SEQ ID NO: 415675 - DNA, 732 bp, Staphylococcus aureus; identical to SEQ ID NO: 413363

SEQ ID NO: 415676 - DNA, 2790 bp, Staphylococcus aureus
atggcataccaaagtgaatacgcattagaaaatgaaatgatgaatcaacttgaacaattgggttacgaaagagtaacgatacgtgataataagcaattgcttgataattttagaacgattttaaatgagcgtcatgcggacaaattagaaggcaatcccttaacagataaagaatttcaacgtctgttaacgatgattgatgggaaaagtattttcgagagtgcccgtattttacgtgataaattaccacttagacgtgatgatgagtctgagatttatttgtcgtttttagataagaaaagttggtgtaaaaataagtttcaagtgacgaatcaagtatctgtcgaggatacatataaagcacgttatgatgtaacgatattaatcaacggactaccccttgtccaagttgaattgaaacgtcgaggtattgatattaatgaggcgtttaaccaagtaaaacgttaccgcaaacaaaattacacaggcttattccgctacatacaaatgtttatcattagtaatggtgttgaaacgcgatacttttctaataatgatagcgaactattgaagagtcacatgttttattggagtgataaacagaataaccgaatcaatacattacaatcatttgctgagtcgtttatgagaccctgtcaattagctaagatgatatcgcgctatatgattattaatgaaacagatagaatactgatggcaatgcgtccgtatcaagtgtatgcggtagaagcacttattcaacaagcgactgagacagggaataatggatatgtatggcatacaactggaagtggtaagacattgacttcttttaaagcgagtcagattttatcacagcaagatgacattaagaaagttatctttttggttgaccgtaaagacttggatagtcaaacagaagaggaatttaataaatttgctaagggtgctgtagacaaaacttttaatacctcgcaactggtacgccaactaaatgataaaagtttgccacttattgtaacgacgattcaaaaaatggctaaagcgattcaagggaatgcccatttattagaacagtataaaacgaataaagttgtatttattattgatgagtgtcatcgcagtcaatttggtgacatgcatcgtctagttaaacaacatttcaaaaatgcccaatactttggattcactggtacgccacgttttccagaaaatagtagtcaagatggtagaacaactgcagatattttcggtagatgcttacatacgtatttaattagagatgccattcatgatggtaatgtacttggtttctcagttgactatattaatacttttaaaaataaagctttaaaagcagaagataacagcatggttgaagcaattgatacggaagaagtatggttagcggataaacgtgtggaattagtaacacgacatatcatcaataatcatgataaatatacacgtaatcgtcaatattcaagtatatttacagtccaaagtattcacgcgcttattaaatattatgagacatttaagcgacttaacaaaaagttggaacaaccgttaacgatagctggtatatttacgtttaaacctaacgaagatgatcgtgatggtgaagtgccatatcattcacgtgaaaaattagagataatgattagtgattataataaaaagttcgagacgaatttttcaacagacacaactaatgagtattttaatcatatttcaaaaaacgttaaaaagggcgttaaagatagtaaaattgatatcttaatcgttgttaatatgttcttaactggttttgatagtaaagtactgaacactttatatgttgataagaatttaatgtatcatgatttaattcaagcgtattcacgtacaaatagggttgaaaaagaatcaaagccatttggtaaaattgtaaactatcgtgacttgaaaaaagagacagacgatgcactgagagtattctcacaaacaaatgatacggatacaattttaatgcgcagttatgaagagtataaaaaagaatttatggacgcttatcgtgagcttaaaatgattgtgccgacaccacacatggttgatgacattcaagatgaagaagagctaaagcgctttgttgaagcttatcgtttattagctaaaataatattacgtttaaaagcatttgacgagtttgagtttacaattgatgaaattggaatggatgaacaagagaatgaagactataaaagtaaatatttagctgtgtacgatcaagtaaaaagagcgacggctgagaaaaataaagtatccattttaaatgatattgatttcgaaatagaaatgatgcgtaatgatacgattaatgtgaattatattatgaatatattgagacaaattgatcttgaagacaaagcggaacaacgtcgtaaccaagaacaaattagacgcattttagatcatgcagatgatccgacattgaggttaaaacgagatctaattagagaattcatcgacaatgttgtaccttctttaaataaggatgatgatatcgatcaagaatatgttaatttcgaaagtattaaaaaagaagcggagttcaaaggatttgctggagagagatctatcgatgaacaagccctaaaaacaatttcaaatgactaccagtatagtggtgttgtaaacccacatcaccttaaaaaaatgattggtgatttgccattgaaagaaaagcgtaaagcaagaaaagccattgaatctttcgtggcagaaacaactgaaaaatacggtgtgtaa

SEQ ID NO: 415677 - DNA, 879 bp, Staphylococcus aureus; identical to SEQ ID NO: 415448

SEQ ID NO: 415678 - DNA, 1056 bp, Staphylococcus aureus; identical to SEQ ID NO: 415559

SEQ ID NO: 415679 - DNA, 1242 bp, Staphylococcus aureus; identical to SEQ ID NO: 415565

SEQ ID NO: 415680 - DNA, 1251 bp, Staphylococcus aureus; identical to SEQ ID NO: 415569

SEQ ID NO: 415681 - DNA, 1035 bp, Staphylococcus aureus
atgatgactttagaaacgcttatcaaagaacaattagatcctcatttagtagaagttgatgaagggacgtattatccgagaacatttattcaacaattatttgtagatggttatttcggtgaggcggcattgagaaaaaatgctgaagtaatcgaagctgtatcgcagtcttgtttgacaacaggattttgtttatggtgccaattagctttttcaacgtatttagaaaatgccacgcagccacatttaaataatgacttacaacagcaattgttatctggagaaatattaggtgctaccggattgtctaatccgatgaagtcatttaatgatttagaaaagttgaaccttgaacacacttatgttgatggacaattggttgtcagtggacgtatgccagctgtaagtaatattcaagaagaccattattttggtgcgatttcgaaacatgaatcatcagatgaatttgtcatgttcattctacgtgccaatcaagatggtatcactctcgttgaaaaaaccaattttttaggggtcaacgggtcagcaacgtatcaaatcacattgaatcaagtcgtagtgccacaatcacaaatcatcacgcatgatgcgaagcagtttgcggcaactattcgcccgcaatttattgcttaccaaattccaataagattaggctcaattaaaagttctttagagttaattgatgcattttcaaatgcgcaaaacggaataaatcaatatttagagtatgatgttgaagcttttaaaaaacgttatcgtcaacttagagaggaatattatgcaatattagatgacggtaacttaacttcacatttaagtgaattaatatcattgaagaaggacattggctatttattgttagatgtaaatcaagcttctgtcgtcaatggtggttcaagagcgtacacaccatattcgccacaagttcgcaagttaaaagaaggattcttcttcgcagcattaacgccgacattaagacatttaggtaaacttgaagcagagttgaaggggtaa

SEQ ID NO: 415682 - DNA, 384 bp, Staphylococcus aureus; identical to SEQ ID NO: 415578

SEQ ID NO: 415683 - DNA, 627 bp, Staphylococcus aureus; identical to SEQ ID NO: 415586

SEQ ID NO: 415684 - DNA, 1125 bp, Staphylococcus aureus; identical to SEQ ID NO: 415587

SEQ ID NO: 415685 - DNA, 777 bp, Staphylococcus aureus; identical to SEQ ID NO: 410930

SEQ ID NO: 415686 - DNA, 975 bp, Staphylococcus aureus; identical to SEQ ID NO: 408213

SEQ ID NO: 415687 - DNA, 1359 bp, Staphylococcus aureus
atgattatgaatgttgaatattctaaaataaagaaagcagtacctattttattattcttatttgtattcagtttggttatagacaactcatttaaattgatttctgtagccattgctgatgacttaaacatatctgtaacgacagtaagttggcaagcgacattagccggtttagtaattggtattggcgctgtagtatacgcttcattatctgatgccattagtatacgcacactatttatttatggcgtgatattaatcattatcggatcaattattggttacattttccaacatcaattcccattacttttagttggacgtattattcaaactgccggtttagctgctgcagagacattatatgtgatatatgttgcaaagtatctttctaaagaggaccagaagacttaccttggcttaagtacgagcagttattccttgtcattagttatcggtacattatcaggtggatttatttctacgtatttacactggacaaatatgtttttaattgcattaatcgtagtatttacgttgccattcctatttaaattattaccaaaagaaaataatacgaataaagctcatttagattttgttggcttaattctagtggcaactattgctacaacagtcatgctgtttattacgaactttaattggttatatatgattggtgccttaattgcgattatcgtttttgcgctatatattaaaaatgcgcaacgtccattagtaaataaatcatttttccaaaataaacgttatgcttcatttttatttatagtatttgtaatgtatgctatccaattgggttatatttttacgttcccattcataatggagcaaatttatcatctgcaactagacacaacatcactgttattagtaccgggttatatagtagcagtcattgttggtgcattaagtggtaaaatcggcgaatatctgaattcaaaacaagcgattatcacagcaattattttaatagcactgagcttgattttacctgcatttgcagtaggtaatcacatttcaatcttcgtcatttctatgatattctttgcaggtagctttgctttaatgtatgcacctttacttaacgaagccattaaaacaatagatcttaatatgacaggtgtggctattggtttttataatttaattattaatgtggcggtatctgtaggtattgcgattgctgcggctctaatcgattttaaagcattaaatttcccaggcaatgatgcattaagttcacatttcggtattattttaattattttaggtttaatgagtattgtcggattagttttattcgtcatcttaaatcgttggacacaatctgaaaaataa

SEQ ID NO: 415688 - DNA, 708 bp, Staphylococcus aureus; identical to SEQ ID NO: 405485

SEQ ID NO: 415689 - DNA, 741 bp, Staphylococcus aureus
gtgacgcaaacacaaccaaaatttttaacgatttataatacgttatataaagaaattcaaataggaaaatatccgagtggccatgcattacctactgaaaaggaactttgtgcgcgctttgatgtcagtcgtatgactttgcgccaagctataaaattgttagccgaagatggcatcgtagagagtacaagagggaagggacactttgttattccacaaacaaatgcccaacacgcttcaagtatggatcaatttaagcatccacttgatcaaatattgctagctcgcgtatctatgtcatcaattaattatcgtgttgatttagaaagtgaatatacaaatcatttgtttgcaaaccatccttctgccgtcattgcaatggaacgctattatcaaaaaaaggacaatcattctaagcaagctgatgcattttgctttacctttataccgttaaatgtcattgacacatttaaagtgaatacacaaaacgaagacgacatgaagacattcgttgagcaaacgatttatagcaatgcatatcaatcagatttaaaaatgtctattaccaaagcgccccgcttcaaaaatcatagtcacgtgtttgatggtgatacacattgttggctgattattgaaacactgtacgcacaaacaccttatccaattatgattaataagtggtatattccacaggaaatatctgaattaacactgacacgtataagacaatcggattattaa

SEQ ID NO: 415690 - DNA, 726 bp, Staphylococcus aureus; identical to SEQ ID NO: 408099

SEQ ID NO: 415691 - DNA, 600 bp, Staphylococcus aureus
atggcatttaaattaccaaatttaccatatgcatatgatgcattggaaccatatatagatcaaagaacaatggagtttcatcacgacaaacatcacaatacgtacgtgacgaaattaaacgcaacagttgaaggaacagagttagagcatcaatcactagcggatatgattgctaacttagacaaggtaccggaagcgatgaggatgtcagtccgtaataatggcggtggtcattttaaccattcattattctgggaaatactatcacctaattctgaagaaaaaggtggcgtaatagatgacatcaaagcgcagtggggcactttagatgaatttaaaaatgaatttgcaaataaagcaacaacattatttggatcaggttggacttggttagttgttaatgatggaaaattagaaattgtgacaacgccaaaccaagataatccattaacagaaggcaaaacaccaatcttactatttgatgtttgggagcatgcctactatctgaaatatcaaaataaacgtccagactatatgactgcattttggaatattgttaactggaaaaaagttgatgaattataccaagcagcaaaataa

SEQ ID NO: 415692 - DNA, 1431 bp, Staphylococcus aureus
atgaagagtgattcactaaaagaaaatattatttatcaagggctataccaattgattagaacgatgacaccactgattacaatacccattatttcacgtgcatttggtcccagtggtgtgggtattgtttcattttctttcaatatcgtgcaatactttttgatgattgcaagtgttggcgttcagttatattttaatagagttatcgcgaagtctgttaacgacaaacggcaattgtctcagcagttttgggatatctttgtcagtaaattatttttagcgttaacagtttttgcgatgtatatggtcgtaattactatatttattgatgattactatcttattttcctactacaaggaatctatattataggtgcagcactcgatatttcatggttttatgctggaactgaaaagtttaaaattcctagcctcagtaatattgttgcgtctggtattgtattaagtgtagttgttatttttgtcaaagatcaatcagatttatcattgtatgtatttactattgctattgtgacggtattaaaccaattacctttgtttatctatttaaaacgatacattagctttgtttcggttaattggatacacgtctggcaattgtttcgttcgtcattagcatacttattaccaaatggacagctcaacttatatactagtatttcttgcgttgttcttggtttagtaggcacataccaacaagttggtatcttttctaacgcatttaatattttaacggtcgcaatcataatgattaatacatttgatcttgtaatgattccgcgtattaccaaaatgtctatccagcaatcacatagtttaactaaaacgttagctaataatatgaatattcaattgatattaacaatacctatggtctttggtttaattgcaattatgccatcattttatttatggttctttggtgaggaattcgcatcaactgtcccattgatgaccattttagcgatacttgtattaatcattcctttaaatatgttgataagcaggcaatatttattaatagtgaataaaataagattatataatgcgtcaattactattggtgcggtaatgaatttagtattatgtcttgttttgatatatttttatggaatttacggtgcggctattgcacgtttaattacagagtttatcttacttatttggcgatttgttgatattactaaaatcaatgtgaagttgaatattgtaagtacgattcaatgtgtcattgctgccgttatgatgtttattgtgcttggtgtggtcaatcattatttgccccctacaatgtacgctacgctgctattaattgcgattggtatagtagtttatcttttattaatgatgactatgaaaaatcaatacgtatggcaaatattgaggcatcttcgacataaaacaatttaa

SEQ ID NO: 415693 - DNA, 1239 bp, Staphylococcus aureus
atggaaaatcaacacaatagtaaattactaacattgttacttatcggtttagcggtttttattcagcaatcttcggttattgccggtgtgaatgtttctatagctgactttatcacattactaatattagtttatttactgtttttcgctaaccatttattaaaggcaaatcattttttacagtttttcattattttgtatacatatcgtatgattattacgctttgtttgctattttttgatgatttgatatttattacggttaaggaagttcttgcatctacagttaaatatgcatttgtagtcatttatttctatttagggatgatcatctttaagttaggtaatagcaaaaaagtgatcgttacctcttatattataagcagtgtgactataggtctattttgtattatagctggtttgaacaagtcccctttactaatgaaattgttatattttgatgaaatacgttcaaaaggattaatgaatgaccctaactatttcgcgatgacacagattattacattggtacttgcttacaagtatattcataattacatattcaaggtccttgcatgtggtattttgctatggtctttaactacaacggggtctaagactgcgtttatcatattaatcgtcttagccatttatttctttattaaaaagttatttagtagaaatgcggtaagtgttgtgagtatgttagtgattatgctgatattactttgttttaccttttataatatcaactactatttattccaattaagcgaccttgatgccgtaccgtcattagatcgaatggcgtctatttttgaagagggctttgcatcattaaatgatagtgggtctgagcgaagtgttgtatggataaatgccattttagtaattaaatatacactaggttttggtgtcggattagtggattatgtacatattggctcgcaaattaatggtattttacttgttgcccataatacatatttgcagatctttgcggaatggggcattttattcggtgcattatttatcatatttatgctttatttactgtttgaattatttagatttaacatttctgggaaaaatgtaacagcaattgttgtaatgttgacgatgctgatttactttttaacagtatcatttaataactcaagatatgtcgcttttattttaggaattatcgtctttattgttcaatatgaaaagatggaaagggatcgtaatgaagagtga

SEQ ID NO: 415694 - DNA, 1167 bp, Staphylococcus aureus
ttgaaaattatatattgtattactaaagcagacaatggtggtgcacaaacacatctcattcaactcgccaaccatttttgcgtacaccatgatgtttatgtcattgtaggcaatcatggaccaatgattgaacaactagatgcaagagttaatgtaattattctcgaacatttagtaggtccaattgactttaaacaagatattttagctgtcaaagtgttagcacagttattctcgaaaattaagcctgatgttatccatttacattcttccaaagctggaacggtcggacgaattgcgaagttcatttcgaaatcgaaagacacacgtgtagtttttactgcgcatggatgggcttttacagagggtgttaaaccagctaaaaaatttctatatctagttatcgaaaaattaatgtcatgtattacagatagcattatttgtgtttcagatttcgataaacagttagcgttaaaatatcgatttaatcgattgaaattaaccacaatacataatggtattgcagatgttcccgctgttaagcaaacgctaaaaagccaatcacataacaatattggcgaagtagttggaatgttgcctaataaacaagatttacagattaatgccccgacaaagcatcaatttgttatgattgcaagatttgcttatccaaaattgccacaaaatctaatcgcggcaatagagatattgaaattacataacagtaatcatgcgcattttacatttataggcgatggacctacattaaatgattgtcagcaacaagttgtacaagctgggttagaaaatgatgtcacatttttgggcaatgtcattaatgcgagtcatttattatcacaatacgatacgtttattttaataagtaagcatgaaggtttgccaattagcattatagaagctatggctacaggtttgcctgttatagccagtcatgttggcggtatttcagaattagtagctgataatggtatatgtatgatgaacaaccaacccgaaactattgctaaagtcctggaaaaatatttaatagacagtgattacatcaaaatgagtaatcaatctagaaaacgttatttagaatgttttactgaggaaaaaatgattaaagaagtggaagacgtttataatggaaaatcaacacaatag

SEQ ID NO: 415695 - DNA, 972 bp, Staphylococcus aureus
ttggaaagagttttgataactggtggggctggttttattgggtcgcatttagtagatgatttacaacaagattatgatgtttatgttctagataactatagaacaggtaaacgagaaaatattaaaagtttggctgacgatcatgtgtttgaattagatattcgtgaatatgatgcagttgaacaaatcatgaagacatatcaatttgattatgttattcatttagcagcattagttagtgttgctgagtcggttgagaaacctatcttatctcaagaaataaacgtcgtagcaacattaagattgttagaaatcattaaaaaatataatagtcatataaaacgttttatctttgcttcgtcagcagctgtttatggtgatcttcctgatttgcctaaaagtgatcaatcattaatcttaccattatcaccatatgcaatagataaatattacggcgaacggacgacattaaattattgctcgttatataacataccaacagcggttgttaaattttttaatgtatttgggccaagacaggatcctaagtcacaatattcaggtgttatttcaaagatgttcgattcatttgagcataacaagccatttacattttttggtgacggactgcaaactagagattttgtatatgtatatgatgttgttcaatctgtacgcttaattatggaacacaaagatgcaattggacacggttataacattggtacaggcacttttactaatttattagaggtttatcgtattattggtgaattatatggaaaatcagtcgagcatgaatttaaagaagcacgaaaaggagatattaagcattcttatgcagatatttctaacttaaaggcattaggatttgttcctaaatatacagtagaaacaggtttaaaggattactttaattttgaggtagataatattgaagaagttacagctaaagaagtggaaatgtcgtga

SEQ ID NO: 415696 - DNA, 777 bp, Staphylococcus aureus; identical to SEQ ID NO: 405494

SEQ ID NO: 415697 - DNA, 765 bp, Staphylococcus aureus
ttgaatcatattcatgaacatttaaaattggtaccagtagataagattgatcttcacgaaacattcgaacctttaagattggaaaaaacgaaaagtagtattgaagcagatgattttatacgtcatcctattttagtgacagcgatgcaacatggtagatatatggttatagatggtgtgcatcggtatacaagtttgaaagcgttaggatgtaagaaagttccagtgcaagaaatccatgaaacacaatattcaattagtacatggcaacataaagttccatttggtgtgtggtgggaaacgttacaacaagaacatcgcttgccatggactactgagacaagacaagaagcgccatttattacgatgtgtcatggtgatacagaacaatatttgtatacgaaagatttaggcgaagcacattttcaagtatgggaaaaggttgtcgcaagttatagtggttgttgttctgtagagagaattgcacaaggtacatatccttgtctttctcaacaagatgtactcatgaagtatcagccattgagttataaggaaattgaagcggttgttcataaaggggaaactgtgccagcaggtgtgacacgctttaatatttcaggacgatgtcttaatcttcaagtaccactggcattacttaaacaagatgatgatgttgaacaactgcgtaattggaagcagtttttagcagataagtttgccaatatgagatgctatactgaaaaagtatacttggtggagcaatag

SEQ ID NO: 415698 - DNA, 1203 bp, Staphylococcus aureus
atgcgtatagttcaacctgttattgaacaattaaaagcacaatctcatccagtttgtcattatatctatgatttagtcggactggaacatcatttgcaacatattacatcgtcattgccgagtaattgtcaaatgtactatgcaatgaaagcaaatagtgaacgaacaatcctagatacaattagtcagtatgttgaaggattcgaagttgcatctcaaggtgaaatagcaaaaggtcttgcttttaaaccagcaaatcatattatttttggtggccctggtaagacagacgaggaactaagatatgcagtaagtgaaggtgttcagcgtattcatgttgaaagtatgcatgaattacaacggctaaatgccatcttagaagatgaagataagacacaacacattttattgcgtgttaatttagcaggaccatttcccaatgcaacgttgcatatggcaggacgcccaacacaatttggtatttctgaagacgaagttgatgatgtcattgaagctgcgctagtaatgccaaatattcatctagatggctttcattttcattctatttctaacaatttagactcgaatttacatgtcgatgtagtgaaactttattttaaaaaagcaaaatcatggtctgaaaaacatcgatttccactcaaacatatcaatcttggtggtggcataggcgttaactatgcagatttaactagccaatttgagtgggataattttgtagaaaattttaaaacacttatcgttgagcaagaaatggaagatgtgacattgaactttgaatgtgggcgctttattgtggcacatattggttactatgtgacagaagtgctagatattaagaaagtgcatggtgcttggtatgccattttaagaggaggtacgcaacaatttagactgccggtatcttggcagcataaccatccttttgaaatttatcgttataaggacaatccatattcatttgaaaaagtttcaatttcgagacaggacacaacgttagtcggtcaattatgtacaccgaaagatgtctttgctagagaagtacagatagacgcaatcagtacaggcgacgttattgttttcaaatatgcaggtgcatacggatggtctatttcacatcacgatttcttaagccatccacatcctgaatttatttatttaacgcaaacaaaggaggatgaataa

SEQ ID NO: 415699 - DNA, 780 bp, Staphylococcus aureus
atgatgcaacaactatctctgaaacatagattaaacaatggtgattcagtttatggcatttttaattctataccggacccattgatgatcgaggttatcgcagcaagcgggtatgactttgttgtgattgatacagaacacgtggcgattaatgatgagacactagcgcatttaattcgtgcagctgaagcagcgcatattataccaattgtacgtgtcactgcagtgatagatagagatatcattaaagtgttagatatgggtgcgagaggtattattgtgccacacgttaaagatcgtgagacagttgagcatattgtgaaattaagtcgttattacccgcaaggattaagaagtttgaatggtggtcgcatggcaagatttggacgtacaccattacttgatgcaatggagatggctaatgagcatattatggtgattgccatgatagaagatgttgaaggggttatggccattgacgatatagctcaagtcgaaggtttagacatgatagtcgaaggtgccgcagatttatcgcagtcacttggcataccatggcaaacgcgtgatgatcaagtaacatcacatgttcaacatatttttgaggttgtgaatgcacatggtaaacatttttgtgcattaccacgtgaagatgaagatattgcaaaatggcaggcacaaggtgtacaaacatttattttaggtgatgatcgcggaaaaatatatcgccatttaagtgcatctctagcgacgtctaaacagaaaggggatgatggctaa

SEQ ID NO: 415700 - DNA, 1779 bp, Staphylococcus aureus
gtgaatcaaacaattcttaatcgtgtaaagactagagtaatgcatcaactggtatcatcacttatttatgagaatattgttgtgtataaagcgtcatatcaagacggtgtcggtcattttacaatagaaggacatgattcagagtatcgttttactgctgaaaagacacatagctttgatcgtatacgtatcacatcaccaattgagcgtgtcgtaggagatgaggcagatacaacaacagactatacacaattattgagagaggctgtatttacatttcctaaaaatgatgaaaagctagaacaatttattgttgagttattacagacagaattaaaagatacacaaagtatgcagtatcgagaatcaaacccaccagcaacacctgagacatttaacgactatgaattttatgcgatggaagggcatcagtatcatccaagttacaaatcacgtttaggatttacgttgagtgataatttgaaatttggtcctgattttgtaccaaacgttaaactgcagtggttagctatcgacaaagataaagtagaaacgacggtatcaagaaatgttgtagttaacgaaatgttacgtcaacaagttggcgataagacttatgaacattttgtacagcaaattgaagcgtctggcaaacatgtaaatgatgttgagatgatacctgtacacccatggcagtttgaacatgtcatccaagttgatttggctgaagaaaggcttaatggcacagtactatggttaggggaaagtgatgagctatatcaccctcaacaatcgattcgtacgatgtcgccaatagacacgacaaaatattatttaaaggtaccaataagtataacgaacacttcaacgaaacgagtgttggcgcctcatacaattgaaaatgcagcgcaaattacggattggttaaagcagatacagcaacaagatatgtatttaaaagatgaattaaagacagtttttctaggggaagtcttaggacagtcttatttaaatacacaactttcgccttataaacaaactcaagtttatggtgcgttaggtgttatatggcgtgaaaatatatatcatatgttaatcgatgaagaggatgcgataccatttaatgcactttatgcaagtgataaggatggtttaccattcattgaaaagtggattaaacaatatggttctgaagcttggacaaagcaatttttagctgtagcgattcgtccaatgattcatatgctttattatcacggtattgcctttgaatcgcatgcacaaaatatgatgctcattcatgaaaatggttggcctacacgtattgccttaaaagatttccacgatggtgttcgttttaagcgtgagcatttaagtgaagcagcttcacacctgacattaaagccaatgccagaagcacataaaaaagtgaatagtaattcatttattgaaacagatgacgaacgtttagtacgcgactttttacatgatgcatttttctttattaatatcgccgaaatcatcttatttattgaaaagcaatatggtatcgatgagcagcgacaatggcaatgggttaaagacattatcgaggcgtatcaagaagcatttccagagttgaataactatcaacatttcgatttgtttgaacctacgattcaagttgaaaagttaacgacacgtcgattattaagtgactccgagttaagaattcatcatgttacaaatccattaggtgtaggaggtatcaatgatgcaacaactatctctgaaacatag

SEQ ID NO: 415701 - DNA, 1737 bp, Staphylococcus aureus
gtgcaaaataaagaattaatacaacatgcagcgtatgcggctatcgaacgcattttaaatgaatattttagagaagaaaatttatatcaagtaccacctcaaaatcatcaatggtctatacaattatcagagctcgaaactttaacgggtgaatttcgctattggtctgcgatggggcatcatatgtatcatccagaggtatggcttatcgatggaaaaagtaaaaaaataacaacttataaagaagcaattgcgcgtattttgcaacatatggctcaaagtgcagataatcaaacggcagtgcaacaacatatggcgcaaattatgtctgacatcgataatagcattcatcgcacggcgcgttatttgcaaagtaacacaatagactacgtagaggatcgttatatcgtttcagaacaatctttatacttaggtcatccatttcatccgactcctaagagtgcaagtgggttttcagaagcagatttagagaaatatgcacccgaatgtcatacatcattccaattgcattatttagctgtgcatcaagatgttctgctcacgcgctatgtagaaggtaaagaagatcaggttgagaaagtgttgtatcaattagcagacatagatatatcagagatacccaaagattttattttattaccaacacatccttatcaaatcaatgtgttgcgacagcatccacagtatatgcaatatagtgaacaaggtttaataaaagaccttggcgtttccggtgatttagtgtacccgacgtcttcggttagaactgtattttcaaaagcattaaacatttatttaaaattaccgatacacgttaaaattactaattttatacgtacgaatgatcttgaacaaattgaacggacaattgatgccgcgcaagttatcgcatcagtcaaagatgaggttgaaacaccccattttaaattgatgtttgaagaaggatatcgtgcattgttaccgaatccattagggcaaacagttgaacctgaaatggatttattaacaaatagtgccatgattgttcgtgaagggataccgaattaccatgctgataaagatattcatgtattggcgtcattatttgaaacgatgcctgattcaccgatctctaagttagcacaagtgattgagcaaagtggtttagcaccagaagcatggcttgaatgttatttggatcgtacattattgccgatattaaagttgtttagtaacacaggcattagtctagaagcacatgtacaaaatacattaattgaattaaaagatggcatacccgacgtatgctttgtcagagatcttgaaggcatttgtctatctagaacgattgctactgaaaaacagcttgtgccaaatgttgtggcagcatcaagccctgttgtatatgcacatgatgaagcatggcatcgtcttaaatattatgttgtagtaaatcacttaggacatttagtatcaactattggtaaagcaactagaaatgaagttgtgttatggcaacttgtagcgcatcgtcttatgacttggaaaaaagaatacgcgaataacgcagtatttgttgactgtgtagaagatttatatcaaacgccgaccattgcggctaaagcgaatttgatgagtaaattgaatgattgtggtgcaaaccctatttatacacatataccaaatccaatttgttataacaaggaggtatcgtattgtgaatcaaacaattcttaa

SEQ ID NO: 415702 - DNA, 1173 bp, Staphylococcus aureus
gtgccattattgccaatttatatggcatcactacaaaatctatcagtcgtagaaatacagttgtggagtggtatagcgattgctgctccagctgtaacgacgatgatagcttcgccgatatgggggaagctaggtgataagatcagccgaaaatggatggtcttaagagcgttacttggtttggcggtatgcttatttttaatggcattgtgtacgacaccattacagtttgtacttgtgaggttattgcagggactatttggtggtgttgttgatgcatcaagtgcgtttgcgagtgcagaggcgccagctgaagatcgtggaaaggtattaggaagactgcaaagttcagtcagcgcagggtctcttgtggggccattaattggcggtgttacagcttcgatattaggttttagtgcgttactgatgagtattgccgttattacttttattgtctgtattttcggtgcattaaaattgattgaaacgacacatatgccaaaatcacaaacaccaaatattaataaaggtattcgccgttcatttcaatgtctattatgcacacaacaaacatgtcgatttattatcgttggcgttttagcaaactttgctatgtatggcatgctaactgcattatcaccacttgcttcatcagtgaatcatacagcgatagatgaccgtagtgtgattggatttttacagtccgcattttggacggcttcgatattaagcgcgcctttatggggacgctttaatgataaatcatatgttaaatcagtatatatatttgccacgattgcatgtggttgtagtgcgatactgcaaggtttagcgacgaatatagagtttttaatggctgcaagaatacttcaaggattaacatatagtgcattgattcaaagtgtcatgtttgttgtcgtgaatgcgtgtcatcaacaacttaaaggcacatttgttggaacgacgaacagtatgttagttgttggtcaaattattggcagtcttagtggcgctgccattacaagttatactacaccagctactacgtttatcgttatgggcgtagtatttgcagtaagtagtttatttttaatttgttcaaccatcactaatcaaatcaacgatcacacattaatgaaattatgggagttgaaacaaaaaagtgcaaaataa

SEQ ID NO: 415703 - DNA, 1755 bp, Staphylococcus aureus
ttgcagaatcatacagcagtcaatacagcacaagcgataatattaagagatttagttgatgcattattatttgaagatatagccggaattgtatcgaatagtgagattactaaagaaaacggacaaacgcttttgatatacgaacgtgaaacacaacaaataaagatacctgtttattttagtgctttaaatatgtttcgttacgaaagttcacaaccaattacgatagagggaagggtgtctaagcaacctttaacggcagctgaattttggcaaacaattgctaatatgaattgtgatctaagtcatgaatgggaagtggctcgcgttgaagaaggactgactactgctgccacacagcttgctaaacaattatcagaattagatttagcgtcacatccttttgtgatgtcagagcagtttgcaagtttaaaagatcgtccatttcatccattagctaaagaaaaaagaggattaagagaagcggattatcaagtgtatcaagctgaattaaatcaatcatttcctttaatggttgcagcagttaaaaagacacatatgattcatggcgatactgcaaatatcgatgaattagaaaatttgacagtacctataaaagaacaagcgacagacatgttaaatgatcaagggttatcaatagatgactatgtactatttccggtacatccttggcaatatcagcatattctgccgaacgtctttgcgacagagattagtgaaaagttggttgtactattaccgttaaaatttggagattatctgtcgtcttcaagtatgcgttcattaattgatattggcgcaccgtataaccatgtcaaagtaccatttgcaatgcagtcattaggcgcattaaggctaacgcctacgcgttacatgaaaaacggagaacaagcagaacaattattacgtcagcttatagaaaaagatgaagcactagctaagtatgtcatggtttgtgatgaaacagcttggtggtcatatatgggtcaagataatgatattttcaaagatcaattaggtcatctaactgttcagctaagaaagtatcccgaagtgctagccaaaaatgatacgcaacagctagtgtcaatggcagcactcgcggcaaatgatcgcactttatatcaaatgatttgtggaaaagataatatttctaaaaatgatgtcatgacgttatttgaagatatcgcgcaagtctttttaaaggtaacactatcatttatgcaatacggcgcattaccagagttgcatggtcaaaatatattgttgtcatttgaagatggacgtgtacaaaaatgcgtgttacgtgatcatgatactgtcagaatttataaaccatggctaacagcacatcagctttcattgccgaagtatgtcgtcagagaagatacacctaatacgctaattaatgaggatttggaaacattctttgcttattttcaaacattagctgtatcggtaaatctatatgccattattgatgcaattcaagatttatttggtgtaagtgagcatgaacttatgtcgttgttaaaacaaattttaaaaaatgaagtggcaactatttcctgggttacaactgatcagctagctgtcagacacattttatttgataaacagacgtggccattcaaacaaattttattaccattgctatatcaacgtgatagtggtggaggtagtatgccttcaggtttaactaccgtaccaaatccaatggtgacatatgattaa

SEQ ID NO: 415704 - DNA, 1011 bp, Staphylococcus aureus
atgaatagagagatgttgtatttaaatagatcagatattgaacaagcgggaggtaatcattcacaagtttatgtggacgcattaacagaagcattaacagcccatgcgcacaatgattttgtacaaccgcttaagccgtatttaagacaggatcctgaaaatggacacatcgcagatcgaattattgcaatgccaagtcatatcggtggtgaacacgcaatttcaggtattaagtggataggtagtaagcacgacaatccatcgaaacgtaatatggagcgtgcaagtggtgtcattattttgaatgatccagaaacgaattatccaattgcagttatggaagcaagtttaattagtagtatgcgtactgcagcagtttcagtgattgcagctaagcatttggctaaaaaaggatttaaagacttaacaatcattggttgcgggctaatcggagacaagcaattacaaagtatgttagagcaattcgatcatattaaacgcgtgtttgtttacgatcaattctctgaagcatgtgcacgctttgttgatagatggcaacaacagcgtccggaaattaattttattgcgacagaaaatgctaaagaagcagtatcaaatggtgaagtagtcattacatgtaccgtaacggatcaaccatacattgaatatgattggttacaaaagggtgcatttattagcaacatttctatcatggatgtgcataaagaagtctttattaaagctgacaaagtcgtagtagatgactggtcacaatgtaatcgagaaaagaaaactattaaccaattggtgttagaaggtaaattcagcaaagaagcacttcatgctgaactagggcaacttgtgacaggtgacataccaggacgtgaagacgatgatgaaatcatattacttaatccgatgggtatggctatcgaagatatttcaagtgcttattttatttatcaacaggcacaacaacaaaatattgggacaacattgaacctatattaa

SEQ ID NO: 415705 - DNA, 993 bp, Staphylococcus aureus; identical to SEQ ID NO: 405506

SEQ ID NO: 415706 - DNA, 996 bp, Staphylococcus aureus
atgctacttaaaccaaaataccaaatcgttattgctggtttatgtcttgcaatagtagctatcttaagtttaatgattggaaatacgcttgtgtcaccaggtacggtgatacaggcgttattcaactttgatagtgaaaacgatttacatgatgttgtcactggtgcacgggcgtcgagaacaatcattgcgttattgactggtgctgcccttgctgtctcaggtttgttgatgcaagcacttacacgaaacccaatagcctcaccagggcttttcggtgtcaatgcaggcgcagtattttttgtcatttttagtattacatttatccaaattcaatcttttaaaatgattgtagttattgcatttttaggtgccattgttgttactatattagttgttgcgctaggtatgtttagacaaacactattctcacctcaccgtgtcattttggcaggtgctgcgattgcgatgctatttacagcctttactcaaggcatacttattatgaacgaaacagacttacaaggcctattattttggttaagtggctccgtttcattacgtaatatttgggatatcccatggattattccgcttgtattgatacttattttaattgcatttagcatggctgcacacatcaacatcttgatgacaagtgacgacattgcaaccggcctcggtcaaaacataaaattaatcaaatggatgattattatgctcatcagtatgttagccggtatttcggtagccgtagctggatcaatcgtctttgtgggtcttatcgtaccgaatattagcaaacgattattaccaccaaactataagtatttaattccttttactgcattagctggagcaatcctaatgatcatttcagacattgttgctcgtataataattaagccactagagttgcctatcggtgtcgttaccgctgtcattggcgctattgtcttaatctatattatgaagaaaggacgtcaacgcttatga

SEQ ID NO: 415707 - DNA, 999 bp, Staphylococcus aureus; identical to SEQ ID NO: 412692

SEQ ID NO: 415708 - DNA, 972 bp, Staphylococcus aureus
atgttcaatgcggtagtagtgagaaaaagtgcatcaaatgttagttataaagtagaaaccgttgatgaatcttatttatcgaagggtgatgtcttagtaaaagtggtatactcttcaataaattataaggatatgctagctttacaatataacggcggtgtaattagagattatcctatgattcctggtatagattttgcaggtattgttgaatcaagttcgaatgataagtttaaagaaggcgataatgtattagttactggttatgatgtcggcgtgacacatacaggtggattttcagaatatgcacaagtgcctggagagtggattgttcctattccccaagaaatgtctattaaagagtctatggtatatggcacagccggttttacggcagcattatcaatttttgaactagaaaaatatggaatgaatatcaaatcacaacctgaaattttagtgtctggggctacaggtggtgtgggcagtgttgctatacaaattttacgtaaaattggatatgaaaatatcactgctatcgtaagaaaagaaaagcaaatagaaatcgcaaaaaaattaggtgcaaaacaagtaataataattgaagatgataataaaccacttaaaaaaggtatttttgattatttcctagatacagtagggaataatgtaacattatacggtttaaaacgtctaaattatcaaggtgttgctactgtatgtggaaatgtagcaggaaattcacttaacgctaatatattaccgtttattcttagaggtattaaattaattggcattgattctgtatgtgttgatcataatatccgtgaagatatatggagtaagttagcaaatgaatggaatataggaaattcacttctatacaatgaaattggatttgaagaattctataaaacgatagatcagcttttaaaaggacaacatttaggaagaactattttaaaagtataa

SEQ ID NO: 415709 - DNA, 945 bp, Staphylococcus aureus; identical to SEQ ID NO: 413120

SEQ ID NO: 415710 - DNA, 156 bp, Staphylococcus aureus; identical to SEQ ID NO: 409125

SEQ ID NO: 415711 - DNA, 207 bp, Staphylococcus aureus; identical to SEQ ID NO: 409232

SEQ ID NO: 415712 - DNA, 363 bp, Staphylococcus aureus
atgaagaaagtgtttaaaaaacctagaattacaactaaacgtttaaatactcgtgttcatttttataagtatactgaaaataatggtccagaagctggagaaaaagaagaaaaattattatatagctgttgggcgagtattgatggtgtctggttacgtgaattagaacaagctatctcaaacggaacgcaaaatgacattaaattgtatattcgtgatccgcaaggtgattatttacccagtgaagaacattatcttgaaattgaatcaagatatttcaaaaatcgtttgaatataaagcaagtatcaccagatttggataataaagactttattatgattcgtggaggatatagttcatga

SEQ ID NO: 415713 - DNA, 192 bp, Staphylococcus aureus
atgcgttggtttactaataatgttgctgtaaaaatcaagccggatggaaataaagagtatatcaaaaaagatgaagtcagacgtaaaacggatggatttatggcatttgttcatgcgttatatagagcggatgatatagtagacaaagacatgtctaaagcacttgatgcattaatgagtatagatttctaa

SEQ ID NO: 415714 - DNA, 192 bp, Staphylococcus aureus
atgcgttggtttactaataatgttgcagtaaaggttaaacccgatggtaataaagaatatattaaaaaagatgaaaatagaagaaaaaccgatgggttcatggcttttgttcacgcattatatagagcagacgatatagtagacaaagacatgtctaaagcgcttgatgcattaatgagtatagatttctaa

SEQ ID NO: 415715 - DNA, 1071 bp, Staphylococcus aureus; identical to SEQ ID NO: 406536

SEQ ID NO: 415716 - DNA, 1509 bp, Staphylococcus aureus
atgacaatatataatataaactttggtataggctgggcgagtagcggtgttgaatatgcacaagcttaccgtgctaaattattgagacgtacaaatcaagacactaaatttgtgtttttagattttatacagtcagagaacatacagacattaacgcaaaacattgggtttaaagatcaagaagttatttggttgtatcagtattttagtgatatttctatagcaccaacaacgtacacgttagatgacattgaacgtgagcttggtcatgaaattagttttagagaaagaaatggtaagatagtccgtctatattttaatgggaaatcatcatttgtaacatgttatctacaaaatgaacaaaaagatgttgtggatcgtgcagaatttgtaattaatagtatgttagtacgtaaagatttttatagttatacgcgtatattttctgagtattatgcaccagctgataataaagcgaaattatatatgcgacaattctataatgaagatggttccatcgcttataacgaatatattgatggagacagctatatatatgtgtttgaagatgcggtgttgtataacaaaacggaatttattgcatactttttacaacgattgaatttaacccgagacgatattgtcatattagaccgcgcttctgatattggtcaggctgttttgcagcataaaggtgatagtaaagttggtgttgtgattcatgctgatcattatagtaataatatgatgagcgagcagcatatactatggaacaattattatgaatatcaattttcaaaagctaaatacattgatttctttattacagcaacagatattcaaaatcatatggtttgtcgacaatttgagcaatatcaaggttatcgtccacgtgtctatactattccggtgggaagcattgatgcgttatcatatcctaaattatcaagaaagccatatgcgatgattagtgcatctcgtttagcaaatgagaaacatattgattggcttgtcaaagcggttatcgtggctaaacgacaagtgccagaattaacatttgatatttatggagaaggtagcgagaagacgcgactgcgtaaaattattgatacacaccgcgcacaagattatattcgtttactagggcatgttaaacttgatgaaatttataatgattatgagttatttctttctgcatcaactagcgaaggttttgggttaacactaatggaagcggtaggctcaggactaggtatgattggattaaatgtgaattatggtaacccaacctttattcgagatggggaaaatggctacttggtaccttttgataccgacgaagatagtgtggatgatgttatcgcaaaactagctcatgccattgtaatgtattttaacaatggtccccaggcaccacatgacatctcttatgaagtggcacagcaatttatgactcaagatattattttaaaatgggaaacattagttcaagaggtgctacatgattaa

SEQ ID NO: 415717 - DNA, 921 bp, Staphylococcus aureus
atgactgaaaataataaattacaaactattgaacaacaattagtacaagaaaagaacgtatctgacaacgtattaaacaaagtgagagttttagagtcacaaggcaatttggaattgccaaatgattattcaccaagtaatgccatgaaacaagcatggttacaaatcagccaagataacaaattaatgagttgtaacgatacaagcaaagcaaatgccttattagacatggtaacgcaaggtttaaatccagctaaaaatcaatgctactttattccttacggcaacaaaatgcagttacaacgtagctatcacggtaatgtaatgatgttaaaacgtgatgcaggtgctcaagatgttgttgctcaagtgatttataaaggcgatacattcaagcaagaaatgggagaaacaggacgtatcaaagcgattaaacacgaacaagacttctttaacatcgacaaagaaaacattatcggtgcgtactgcacaatcgtatttaatgatggacgagataactatattgaagtcatgactattgaacaaattaaacaagcatggatgcagtcatcaatgattaaagatgaaaaagcattacaaaattctaaaacacataataatttcaaagaagaaatggctaaaaaaacagttatcaatagagctgctaaacgttatatcaacacatcaacagatagcaatcttttcaaatacgcgcaagaatccgaacaacgtcaacgcaaagaagtgttggacgcagaagttgaagaaaatgcaaatcaagaacaattggactttgaacaaccagttcttgaagaagcacaatacacagaattagaaaatgataagcctattgatgtatctgactttgaagaaataaaagaacctgcaacagaaaaagaaagcgaagaagagccattttaa

SEQ ID NO: 415718 - DNA, 1155 bp, Staphylococcus aureus
ttgcgtaatcaattagctgataaacaatcagaattgaagcgcatagaagacaataacagcgcaagtaatgagaacaaaatccatactttaacaaatgagttacacgttgaaaatggaacggttgcgaaccttaaaacaagattaaatcaaaacaaacaacaaatcgcacatgaagaaaatagacgtaatcaattattagaaaatcataaaggattaaaaagtgatttagaaaaagctaaaaatcaaaaatttgaatatcttgatgacaatgtatgtagttgttgtggtcaacagttaccagctgaacaagtgaatgaggcaagagaaaaagcattgcagaaattcaatgctagcaaatcgaaagaattagaaacaatacaaacatctatcaatcacattatttcagaaggcaagaaaataaagccaatcatcgagaagttagaggatgacaacaataatctacaaattaaaatcaacgaagcagaagagcgttcagcaagaatacaaaacaaaattaataagttgaaaacgactcatgttgacgttacacaaactgacgaatacaaagcagtaatgttagagataaacgagattaatcaaaaacgctcgaacattaggaaaactattcaagataaagtttcaggaatagatgacaaaataagcgaacttactcaagaaaaatcagaaattgaagtgtcaagatcaatcgaaaaatcaaataaacatctagatgatgttatttctgaattaagaaatgaagaagatagattattggatgaaaaagaaaagtattcacatgacctttatatcttaaaagaatttacaacaacaaaagtcaaaatgcttactgaaaatatcaataatgaatttgagattgctgaatttaagttattcaataccttagttaacggcgaattagaagaaacatgttccacaacggttaacggcgtcgaatacgacagcggtttaaataacgcctcaagaattaatgttggcttagatatcatcaatacactgtcaaaacattttaaagttacagcgccaatatttattgataatgctgaatcagtaacagagcttatcaaaacagaatcacaacaaattcaattgatagtaaatgaacaagataaaaaattaagaatggagactatataa

SEQ ID NO: 415719 - DNA, 921 bp, Staphylococcus aureus; identical to SEQ ID NO: 408168

SEQ ID NO: 415720 - DNA, 261 bp, Staphylococcus aureus
atgtattacgaaataggcaatattatacgcaaaaatattcatgttaacggattcgattttaagctattaattttaaaaggtcatatgggcatatcaatacaagttaaagatatgaacaacgtaccaattaaacatgcttatgtcgtagatgagaatgacttagatatggcatcagacttattcaaccaagcaatagatgaatggattgaagagaacacagacgaacaggacagactaattaacttagtcatgagatggtag

SEQ ID NO: 415721 - DNA, 261 bp, Staphylococcus aureus
atgtattacgaaataggcgaaatcatacgcaaaaatattcatgttaacggattcgattttaagctattcattttaaaaggtcatatgggcatatcaatacaagttaaagatatgaacaatgtaccaattaaacatgcttatgtcgtagatgagaatgacttagatatggcatcagacttattcaaccaagcaatagatgaatggattgaagagaacacagacgaacaggacagactaattaacttagtcatgagatggtag

SEQ ID NO: 415722 - DNA, 192 bp, Staphylococcus aureus; identical to SEQ ID NO: 415714

SEQ ID NO: 415723 - DNA, 681 bp, Staphylococcus aureus
gtgatttttattaaacatatttcaagagtttctaacccttttattaatcctaaactagggaaaaacattccgtttatgcttggtttgttttctggtgggctaatattttctatagtagctggttttatatcaatggtgccttatatgatgaaaactatttatcatgtaaatgtagcgacaataggtaatagtgttatttttcctggaaccatgagtgttattgtttttggttattttggtggttttttagtggatagaaaaggatcattatttgtttttattttaggatcattgtctatctctataagttttttaactattgcattttttgttgagtttagtatgtggttgactacttttatgtttatatttgttatgggcggattatcttttactaaaacagttatatcaaaaatagtatcaagtagtctttctgaagaagaagttgcttctggaatgagtttgctaaatttcacaagttttttatcagagggaacaggtatagcaattgtaggaggtttattgtcactacaattgattaatcgtaaactagttctggaatttataaattattcttctggagtgtatagtaatattcttgtagccatggctatccttattattttatgttgtcttttgacgattattgtatttaaacgttctgaaaagcagtttgaatag

SEQ ID NO: 415724 - DNA, 156 bp, Staphylococcus aureus; identical to SEQ ID NO: 409125

SEQ ID NO: 415725 - DNA, 483 bp, Staphylococcus aureus
ttgctacgtaagttgtacccagaagctaaaatttatgtatttggtaagacagactataaattaagtcatttttcatttgtagatgacatctttacagtaaatcaaataccagatgatcttaaaattaatcatgcatttgaatgtgttggaggtaaaggaagtcaagttgcacttcaacaaatagttgaacatatttcaccagaaggcagtattgctttgttaggcgtaagtgaattacccgtggaagtgaatacacgattagtacttgaaaaaggattaacattgattggtagtagtcgaagcggctctaaagattttgagcaagttgttgatttatatcgtaagtacccagacatagttgaaaagttagccttattaaaaggacatgaaattaatgtatgtacgatgcaagatatcgtccaagcgtttgaaatggatttatcgacatcttggggaaaaacagtattgaaatggacgatttaa

SEQ ID NO: 415726 - DNA, 204 bp, Staphylococcus aureus
atgaatcagctgagaattttattacatgacggtagtagtttgatattacatgaagatgaattatttaacgaaatagcatttgttttggatgattttagaaatgatgatgactatttaacgatagaaaaagattatggcagagaacttgtattgaacaaaggttatatagttggaattaatgttgaggaggcagacaatggctaa

SEQ ID NO: 415727 - DNA, 195 bp, Staphylococcus aureus
atgacggaagttaaaattaaaactatttcaggtggagtttattttgtaaaaacggctgaaccttttgaaaaatatgttaaaagaatgacgggttttaatggttatatttacgcaagtaatataatcaagcagccaacgtatattaaaacagatacgattgaatcaatcacacttattgaggagcgtgggaaatga

SEQ ID NO: 415728 - DNA, 621 bp, Staphylococcus aureus
atgaaattcactgaagtggaagttatcgaacatcttgtaaaggcatataaagaagcaggaaagcctacttatcctcatgaaaatttatatcgaggacgtaatcatagtatttcaggtattggagaagacttgctgggtgcttatttgattagtagattggaaggtgtccaaatatttattgatcagcctttatctatgattgataaatctttaagtacaagatatccggatttattaatttgtgaagataatgaaattaaaaatatactagaagttaaaatggacttaggatatcaaagaaaagattttatagattattgccgaaagaaagaagaatggatttcaaatatcgtaggaaaacagtgtgtattgtctagaaagagagaagacaaaattcctatgaatatagctgatgatattaaatttcatgttgtgatttacagtgaaaacaatggaccgaagcggtttgatgaagaaatcatgcctatcgttaatgaaacatgtccacatattgaagtatatgtcctaacaagcggtcaacaccctaatttagtaaatgttaatcttgaaggtattaatattaataaagatgaatttgaaatattagtaaatgcgttataa

SEQ ID NO: 415729 - DNA, 372 bp, Staphylococcus aureus
ttgaaaacgaatattttaaatttagataatgagttagaaaacactgaatatgtcgaaggtaaaccatatgtacagtacggtattaaatatgaaagaaatcaggcattaagaaatgaagctattaaaattcatggaactacatgtaaagtatgtggatttgattttaaagctaagtatggcgatttaggtgagggttttattgaaattcatcatttaaaaccaatgttttcaataaaaagagaaataaaagtaaatccacaaaaagatttagtcccactatgttctaattgccataaaatgattcatagaaatactaaaaaacctttaacgattaaagaattaaccaaaatagttaattataatagcaaataa

SEQ ID NO: 415730 - DNA, 1005 bp, Staphylococcus aureus
atgatcattgatcctatttgtgacttatcttcatatattcgagttgccgatgaagagagtttaaccattactcatgcagctgaaacacatatacatgcaaattttgtttcaggaattagagatgttgctataaagttaaatgctagtatttatgtatcgggcgaaagtgatgacatgttaggttataaaaatatgcctaaccacactcattttgttcaacataatgatgatatttatgtaggaaatataaaattaaaagtgcttcatacacctggtcacacgccagaaagtataagttttttacttactgacgaaggtgctggagcacaagttccaatgggactattcagtggtgattttatttttgtaggagatatcggtagacctgatttactagaaaaagctgttaaagtagaaggattatctgaaataggcgcaaaacaaatgtttaaatctattgaaagtattaaagacttgccagactacattcaaatttggcctggtcatggcgctggtagtccttgtggtaaatctttaggtgctattccaacatctacgcttggctatgaaaaacaaacgaactgggctttttctgaaaataatgaagctacctttatcgataaactcatttctgaccaacctgcaccaccacatcattttgcacaaatgaaaaaaattaatcaattcggtatgaatttatatcaaccttatacggtttatccagctacaagtacaaacagattaacttttgatctccgcagtaaggaggcttatcatggtggacatattgaaggtacaatcaatattccatatgataaaaatttcatcaatcaaattggctggtatctaaactataatcaagaaattaacttgattggagactatcaccttgtttcaaaagcaacacataacatactttacaacttattggatatgataatgtgtctggatatcagttaccacaagctcaaattcaaacacaatctgttcatagtaaagacataa

SEQ ID NO: 415731 - DNA, 1491 bp, Staphylococcus aureus
ttgcatagagaaagtaaatatatagagtataagaaatcacgaaaaggattatctaatgatatttggtctacgtatagtgcttttgcaaatactgaaggtggtactatatatttaggaattgaagaaaaaaagatcgaggacaaaaaagtctttgtttcagttggtgttgaagatccagagaaaatgattgaagatttttggaatgcactatatggaagaagtaaagttagtcaaaatattttatcaaataaagatgttaaaattgttaatattgaaaataaagcgtgcattgaaattcatgtaccagaagcgccttattcgaagaaaccgatatatgtagataataaaaaagatttagtatataaaagagttgatgatgctgatagaattgcgactgaagaagagtataaattcatgattgtaaattctcaagacgatatagatacagaattattagataactatgacatgtctgatttaaatcacgaatctatcgaaaattataggaaacttctattaaaaaatactaatgatgagagatatgcgaatatgagccaactggatttaatgatagatttaggagcatatagaaaagatagaagttcgaaagacaaacagtataaaatgactacagcatgtttattattctttggtaagtataatgcgattagtgatagattcccaggatttcaattagattattttaagaaaacaaattacctagatactgattggaaagatagaatatcaagtggagatttaggtaatgaagatttaaacgtgtatagtttttttgaaaaagtattgataaaattaactgataacattgaggaatcatttagcctaaatgatggtttgactagacaaaattatgcaagagatttaaaagtagcaattcgcgaagcactggttaatacattaatgcatgcgtattatgatactaagcaaagtattaaaatagttaattgtgaagattttatagagttttataatccgggtaatatgagaataaataaagaagattttattcatggagggcattcaaaggacagaaatagtatattatcgacgcttttcagaagagtaggatattcagaaaaagctggatctggaggaccaaggatattcgatgtagttaatagacataagcttaaaacgcctgaaatagaattaacggacatggacactaatgtagtactttggaaacaagatttaatgaaggagtttgaaaaatatcctgagttagacaaaaaagtaataaagtatattattgactatggatcaataagtaagggtgaagccttaaaaatggaaaatatgacagaatatcagtttagaaatattttaaaaaaactaaaagatgataacttgataaaaaaagaaggtgaaggtccggctactaaatatgtgttaatagaatcaaaagaagctgatatattgcgaactaaaaaagtaattaaaagtttagagtctttctttaggaataaataa

SEQ ID NO: 415732 - DNA, 1050 bp, Staphylococcus aureus
ttgatacctacgctagaagaaattattgataagtatggaaacttagttgattatttgaaatttgatgtaacagttgaggtttatgaagatttgttgttattaagaagtttaagcgatttaaatgaacatcaaaagatggatagagtttcatttataaaaaaacatttaaactcaaatttcgattatttattagatgatactgagtttagaagtatcaataagatttacagtaatttaaatatcatgacgcatatcaatagtcaaaataataattttaaacgtaatccatttataaatgaagaacaattgaaatcactactcgcgataaagaaagtagatgcacatatgagttatgattcaaatattacttcaaaagcattggcagaaataaacaaaacgcaaaaaagattagttacaaagatagacacactctataatcagtcaaaaaaagaaaatgaatatgtacggttaggagaaaaaatatcgtatacaaaattggagaatcattggaaatatttatataatgagattcagttttataatcttaataatcaattgattagttatgttgcattagaacaggaatatgcttgggcttttttaaatgaactattttatttgatagaattgtatttgaaggcatttaaaggacaaaagaaaacagattatgagtttgggaaaaaattaaacgaatttattcaatcatatgtcattattttacttatagatatacgattacctgttgttagattatatattattagagacattgtagatacatgtgaaggagaaaaagataattacaaaagaattacactgatagaagaatctattaaaaagtatagatacgtaaaagatcagattaaaagatttaaaaatggattagaagaatcgttattaaatgcaactttatctattgaacaaaatatgttgaaagttaaaattgattattataaagcctactgctttcctagagaaaaaacaaagcataacaatattgagtacaatgtatcgttgttttttaaagcattagatgccttaaagaaatag

SEQ ID NO: 415733 - DNA, 291 bp, Staphylococcus aureus
atgaataagaaatctaagcagcaagaaaagctttataattttataattgctaaatcttttcaacaaccagttggaagtacgttcacttatggtgaattaagaaagaaatataatgtggtttgtagcacgaatgatcaacgtgaagtaggacgtcgttttgcttactggattaagtacacgccaggattaccatttaaaattgtaggaacaaaaaatggcagtttattatatcagaaaatagggataaacccatgcaataatagcacgccttcgaaaggaggtgattgctaa

SEQ ID NO: 415734 - DNA, 1788 bp, Staphylococcus aureus
atgagttacacattgtttgaaattggcccatttgctttagattccttcggttggaaagaaacgataccacctaaaaaagatggtgacagtgaaaaagtggttagaatggctagccctattattgttaatgcaagattttctgatccaattactggtgttgaaaagttgattattactaacaacaatggtaaaaaagacatttttgagtctgatatcttaacaacacgaaacttaccttctttaattaaatatggctacagtattaacgagaagtatattagatcattgagttatgccttgcaattgatgcgagatagattaccactttctgaattatatgagggtgtaggtatactagagacaccttttggctacttgatatcgctagataaagttctcaaatctattcaatttaatcagtcctcaccttcataccctattgtagatagtgcttatgacttaactcctaaaggtacatttgataattggtttaacatgtatattgacgaggttaaaggtcatcttcttttagaattggcagtcatatttgggatttctgccttagtgacaagttttctgaagcataaacatgaaatcgaatttgcaggaattctctttagttttacaggtcaatcctcaaccggtaagtcaaccgcagctgctttagctgtatcagtcgctggtaaccctaccaaaggtaatgaaactctttttagaagttggaatgccacacgaaacgcacttgaaggttatttgagtaacaattatggcattcctatagtatttgatgagctttcatctacgacacttagagataccacgggtttgttatattccatcgctgaaggtcaaggtcgtcaacgttcaaacgttcatggagaagttaaaacgcctaagaattggggtacttctgtcatttcaacgtcagaatacagtatttttaatgattcagctcaaaacgatggattacgtgtaagaaccatcgagattaatgaacaattcactacaaatgcgaccaatgctgacaatattaaaaaagctgtagcactaaactatggtcatgttttaccgttagtagctaaatatcttataaatcgtgaagatgaagttattcaatggttttacaaggaagtagattggtttgaagctaaattgaaagatgaaacaaacaatacaggtattcgtatgtttaagcgttatgcagtcattacaacatctgcgaaaatattaggtcgtgttttatctacagatattgatatcgctaatataagagactactttattgattatcatactcatacagtctctgaacgctcattagctgataaagctattgatgtcatcattcaatttgtggcacaaaacagaggtaagttttcagatgaaggtgctttgaaaaatatgtttgagaactatggattaatctcattaaaagatgaccatatcgaagtaaaaataattgcgaacgtttttaaacagatgctaaacaatcatcaatttcaagatgttaataatgttgtcaacgccttaagagataaaggtttcatattagctgaccgtggacgccaaacaactaaaagaagtgtcaaagataatagcggtaaaaaacaatcacttgtattttaccatctaaaattagatgtagagtttgcatctatcctcggattaactaaagataagtcgttacttcaaaattggacaccgtcaaatgataacaaagctgcgaaagaactttttaaatccgctaatgaggggataggcccttcaggagttcacgaagatttctga

SEQ ID NO: 415735 - DNA, 1512 bp, Staphylococcus aureus
atgatgttaaaagtgattctatatgcctacacacaatctgtattctcaggtcgtaaaatagaaaaaatgcttaatgatagcatccgaatgatgtggctatcacaaaatcaaaaaccttcttataaaacaattaatcaatttagagtaaatccaaaagtagatgctttattagaatctttatttattcaattttacagtcagtgtgtaaaacaaaatcttatagatgataaagctatttttattgatggtacaaaaattgaagcaaatgccaatcgatatacatttgtatggaaaaagagtattcaaaaccatgaatcaaagatgaatgaggattctaaagccctctaccatgaattggtaaccaataaaatcataccggaaattaaagaagatcatgataatgaattaacaaaagaagaaatagatttgattggtagtcacttagataaagaaatcgaagatttaaaccaacatatcaacaatgaaaaatgtactaaaacaagaaaacaaatacgtctcaaaagaactaaaatcaaaaaatacaaaaagcaaatcaatgattattttgagcgaaagtatcgatacgaatttcaaaaatctattttaaaggatagaaatagttattctaagacagattatgatgcgacatttatgagaatgaaagaagatcacatgaaaaatggacaacttaagccagggtataatttacaaatagcaacaaattcccaatttgttttatcttataatgtgtatcaaaatccaacggatactagaacgatgattccatttttaaattcaattcaagagacctacggtcatttacctgaatatattgtagctgatgcaggttatggtagtgaatcaaattataaggcaattatagatgactttaatcgaacgccactcataacatatggaatgtttataaaagataaaactaaaaaatataaaagtgacatctttaatactcaaaattggaactatgacgaaattaatgacgaattcatttgtccgaataataaacggctaggttttaaaagatatgcctatcgtcatgataagtatggttataagcgagacttcaaattatatgaatgtgatgattgttcagaatgtcctctgaaaaatcaatgtatgaacttcaattcaaaaacaaacaaaaaaataatgaagaattataactgggaatattttaaatcccaaattaacaaaaagctttcagaaccagaaacaaaaaatatctacagtcaaagaaaaattgatgtggaacctgtttttggatttatgaaggctattttgggtttcactcggatgtctgtccgaggactcaataaagtcaaaagagaacttggttttgtattaatggcacttaatataagaaaagtagtagctcaacgagctgaaaataatcaaaaaatttataaaaaagacaatttctatattatttcaatagaaattgtcttttttcacttatccaagaactttatgtcccggactcattcctacgattag

SEQ ID NO: 415736 - DNA, 180 bp, Staphylococcus aureus
atggttgatgatttgacagagttaatagaaaaagtaatagtagaaagagaagattatcatattgacgaagaagagttagaagtacttaaaaacgatggagagttagaactcatagatgtggaacatgcatttggtatcagtatcgatgaaggtaacgatatgattgaaagtgaaaggtga

SEQ ID NO: 415737 - DNA, 354 bp, Staphylococcus aureus; identical to SEQ ID NO: 414837

SEQ ID NO: 415738 - DNA, 495 bp, Staphylococcus aureus
atgcgtcagaccaagaagggcaatcagtggtatttcgggatgaaggcgcacatcggcgtggatgaattttccgggttggtgcaccacgtccattgcacagccgccaacgtcgccgacgtcacggtgacgcacacgttgctgcatggcaaagaagacagcgtgtttggcgacagcggctacaccggtgcggataagcgcgaagaactgcaggactgcgaggctgcatttttcattgctgccaagcgttcggtgcttcaagccatcggcaacaagcgggagcgtgctcgggaacagcgttgggaacacttcaaggccagcgtgcgcgcgaaggtggagcatccgttccgggtgatcaagcgccagttcggttacaccaaggtccgctatcgcggcctggcgaagaacaccgcgcaggtgctgacgctgtttgcgctgtcaaacctgtggatgaagcgaaagcagttgatgcctgctatggggagcgtgcgcctgtaa

SEQ ID NO: 415739 - DNA, 372 bp, Staphylococcus aureus
atgcagcgaaaagccgcgcatcagcgcgtcttcttcgtccagcccgtccagtgccacgaattcggcatcgaacaaggccgcgcgtgcggtgtcctcactgtcgtaggccaacgtcttgccatcgctgtccatcacttcggcagtgccggcttccttgatgcgcaggcgcgcccagatcagggtgcggccgatggtggccagccaccactgatcgtggctgccagagctgtgcgctgcgtcgatgtcgatgatgttcatgccagtaccttggaaagcagcccgagcagggccgccatgcccaggccgaaaaaaatggtcagcagcgagagccaggcgggtgtggccagaccggacagcgcactgtcgcggtag

SEQ ID NO: 415740 - DNA, 369 bp, Staphylococcus aureus
gtgcagaacggcgcggcaagttggctagccgatgcagggagcgcgactgcgcgcaatcagggcttgaccgaggacgctccatcgcgcgcaagcgcgctcctacgacggccgacggctgcgggagtgccgcggcatcagaccacgcaccaagattcgtcggctcggcctatgcgccgtagacctcgatgcaatctggggttcatccgggcatcaagccacgtaggagcgcgctcgcgcgcgatgcggcgttaccggatatctgtcggtccatacgcacgaaagatgatccctctgttacagagcaccttcaaagaaaacatcaaagcctcagcggtcccacaacgcctgttgatagtcacatcaacgtag

SEQ ID NO: 415741 - DNA, 822 bp, Staphylococcus aureus
atgaatatacctaaatcagtctggtggctagtaattggcatggcgttaaatattactggttccagttttttgtggcctttaaatacaatttatatgaaacaagaacttggaaaaagtttaactgttgctggtttagtgctaatgataaattcatttggcatggttattggaaacttattaggtggttcactatttgataaattaggtggatacaagacgattttaattggaactttcacttgtctttgtagtacaacgctacttaatttctttcacgggtggccttggtatgctgtatggcttgtaatgttaggctttggtggcggaatgattattcctgcgatatacgcaatggctggagcagtgtggccgaatggcggtagacaaacgtttaatgcgatatacttagcgcaaaatattggtgttgctgtcggcgctgcaatgggcggctttgtcgcagaatttagctttaactatatctttttagccaatcttattatgtatgttgtgtttgcacttgtcgcggtaacgcaatttaatattgaaattaatgcgaaagttaaatatccaactcatttagatattactggtaaaaagaataaagcaagatttatttcattagtactaatttgtgcaatgtttgcaatttgttgggttgcgtatattcaatgggagtctacaatcgcatcatttacacaatcgattaatatttcaatggcacaatatagtgttttatggacaattaacggaataatgattttagtagcacaaccattaattaaaccgattctctatctgttaaaaggaaacttaaagaagtaa

SEQ ID NO: 415742 - DNA, 360 bp, Staphylococcus aureus
atgtttgtcggcatcatcatttttatgttgtcgttctttgtcacgagttttgccgaaaactttacaatatttgttgtcggtatgattattttaacttttggagaaatgtttgtatggcctgcagttccaactatagccaatcagttagcgccagatggtaagcaaggacagtaccaaggttttgtgaattcagctgctacagtaggaaaagcattcggtccatttcttggtggtgtattagttgatgcatttaatatgcgcatgatgtttatcggtatgatggtactacttgtatttgcattaatattattaatggttttcaaggagaataatacgcaacctaaaaaaatagatgcataa

SEQ ID NO: 415743 - DNA, 213 bp, Staphylococcus aureus
atgacgtttcttacagtcatgcaatttatagttaacattatcgttgtaggattcatgcttacggttattgttatcgggcttatttggttaattaaagataaaagacaatcacaacatagtgtattaaggaattatcctttattagcacgtattagatatatttcagaaaaaaatgggaccggaattacgtcagtatttattttctggggataa

SEQ ID NO: 415744 - DNA, 798 bp, Staphylococcus aureus
atgtcatatgaaatgtttgatgaagcgaatgatatatacaaaactttattcgattctggtaaagaccgttttaaaggattaccatattggcatcgatcaaagtctaattggttattcaaagaatataacggaaaaattagcaatacatataatagctacaaacggggaacaataatttatgtcgattttggaattaatgtgggaagtgaaatttctggtggacattttgctattgttttaaataaaaacgataacaaaaagagtagtatgcttaacgttatccctttatcttctaaggataaaaaatattatctctcaatagataaaactgtatttgaaaatgctagtaatagacttaaacaatcattagacgattgccaaaaaaacattagcaaaatcacctcaaaaatagaaaaattgcaatccgaatacaaagaactgtacaaaagtactaaagaaggtataaacgcaataagagataaaaatagtgatacagagattaccataagtgatttagagaaaaatatagaagaattaaaagtaaatataaaatccgaagaaaaattatcaaaagaaattgaaaataataagaatatgattgaaaaagtttacctcaaatattcaaaatacgacaaacaaacttttgcatgctataaatcacttcattctataagtaaacttaaggttcgcagaataaataaatatgatccttctggaaaaatgaaggttgataatagcactctagagaaattagataaaaaaatccttgaagaatttactaacattaagattgactaa

SEQ ID NO: 415745 - DNA, 585 bp, Staphylococcus aureus; identical to SEQ ID NO: 409425

SEQ ID NO: 415746 - DNA, 285 bp, Staphylococcus aureus
atgagtaatacacaaaagaaaaatgtgccagagttgagattcccagggtttgaaggcgaatgggaagagaagaaggttggcgagttattagaatttaaaaatggtttaaataaaggaaaggaatattttggctcaggatcgtcgattgttaacttcaaagatgtatttaataaccggagcataaatacaaataatctgactggaaaagttaatgtgaatagcaaagaactgaagaattattccgttgaaaagggtgatgtttttttacaaggactagtgaggtga

SEQ ID NO: 415747 - DNA, 186 bp, Staphylococcus aureus
atgaataaattagaaaaatggtctttggtatttattatttttacatttctctcttcattagcacttttatatttcaaatataattttagttcggttatgccagtcctaagtctttctattttaactatactaatattgttgacgagtattattactgtagtttcagttaatgatgaagatacttaa

SEQ ID NO: 415748 - DNA, 618 bp, Staphylococcus aureus
atgattcaaacggttgttgctgttgctgttctttatattgctacagcagttgatttattagtaattttattaatattttttgctagagcaaagactagaaaagaatatagaaatatttatgttggtcaatatttagggtctattattttaatattagttagtttgtttttagcttttgtattaaattatgttccagaaaagtggatattaggtttattgggtttaataccaatttatcttggaattaaagtggctatttatgatgattgtgaaggagaaaagagagctaaaaaagaattgaatgaaaaaggattgtctaaattagttggtacggttgcaattgttacgatagcaagttgtggcgccgataatattggtttatttgttccgtattttgtgacattaagtgttactaatttattacttactctgtttgtctttttaattttaattttcttcttggtgtttactgcacaaaaattagctaatatcccaggaattggagaaattgttgagaaatttagtcgttggattatggctatcatttatatagctttaggtttatttattattattgaaaatgacactattcaaacaattttaggatttatattttaa

SEQ ID NO: 415749 - DNA, 348 bp, Staphylococcus aureus; identical to SEQ ID NO: 409379

SEQ ID NO: 415750 - DNA, 318 bp, Staphylococcus aureus
atggaaaaaacaaaaaaattacaattagaagattttacagaaaatgggttttatggaacacaagaacagcaatatctaaaagctcaagtaagagaagagctaaaagagcaaggctttatcatagatagcagttttgagggcgattttaaaacatggataggtgtatacgcaagaccaaaagataaaccgacctacttagaccctcaaaacgataaagaagcagaagaacaagagcaatattctattaacggctttaaacaagattttagcgaatggtttgagtgggaaataaaagatttgaaaattaaagaaatgtaa

SEQ ID NO: 415751 - DNA, 864 bp, Staphylococcus aureus
atggcgaatattactgacttcaccgaaaagcaatttgaagatcgtttagaaaagaatgttgaacgactaactaaaaatagactagcggttgaatcgccaaccgcttttttacttggtgggcaaccagggtcagggaaaaccagtttgcgatcagcaatttttgaagaaacacaagggaatgttattgtcattgataatgatacctttaaacaacagcacccaaattttgacgaattagtgaaactctatgaaaaagacgtagtaaaacacgttaccccttattcgaatcgcatgacagaagcacttattagccgtttaagcgatcaaggctataatttagtgattgaaggaacaggacgaacaacagacgttcccattcaaacagccacaatgcttcaatctaaaggttatgaaacaaaaatatacgtcatggcagtaccgaaaattgaatcatacttaggaacgattgaacgatatgaaaccatgtatgcagatgatccaatgacagctagggcaacaccaaaacaagcgcatgatattgttgtcaaaaacttaccgaccaatttagaaacccttcataaaacgggcttatttagcgatataaggctttacaatagagaaggagtgaaactctattcaagcttagaaacgccttccattagtccgaaagagaccttagaaagagaattaaatcgtaaagtatcagggaaagaaattcaaccgactttggagagaatagagcaaaaaatggttcaaaatcaacaccaagaaacccctgaatttaaagcaattcaacaaaaaatggaaagcttgcagctacctacaccaccaatacccaaaacaccgaaacttccaggactttaa

SEQ ID NO: 415752 - DNA, 273 bp, Staphylococcus aureus
atggcagttacgtatgaaaaaacatttgaaattgaaatcattaatgagttatcggcaagtgtttataatcgggtattaaattatgttttgaatcatgaactagatactaaaaatactcgtttactagaagtgaatcttttaaatcaattagaagtggcacaagaagttgatttatttcaacaaccatttgaagaattacaagctattcatgagtattggcggtcaatgaatcaatattcaaaacaaattttgaataaagagaaagtggcttaa

SEQ ID NO: 415753 - DNA, 210 bp, Staphylococcus aureus
gtgggaaatttaggcgcacagaaagcaaaacgaaatgatacgccaatcagcgcaaaaaaagatataatgggggataagacggttcgtgttcgtgccgacttgcaccatatcataaaaatcgaaacagcaaagaatggcggaaacgtaaaagaagttatggatcaagccttagaagaatatatacggaaatatttacctgacaaactttaa

SEQ ID NO: 415754 - DNA, 897 bp, Staphylococcus aureus
atgatacaatattactatacaaaaaaagaatggggcgtagttatggagaaggaaaaactaaaaatacttgaagaattaagacgtattttaaacaataaaaatgaagcaattattatcttgaataattactttaaaggtggtgttggaaagtccaaattatcgactatgtttgcttacttgacagacaaattgaatttaaaagttttaatgatcgataaggacttacaggcaacattgacaaaagacttagcaaaaacttttgaggtagaattgccacgtgtcaatttttatgaaggcttgaaaaatggaaacttggcttcttctattattcatttgactgataatttagacttgatccctggcacgtttgatttgatgttactgccaaaattaactcgctcatggacgtttgaaaatgaaagtagattgcttgctactcttttagcacctttaaaaagtgactatgatcttattattattgatactgtaccaacgccaagcgtttatacaaataatgcaatcgtggcgagtgattacgttatgatccctttacaagcagaagaagaaagtacaaacaacattcaaaactatatttcctatttgattgatttgcaagaacagtttaaccctggactagatatgattggttttgttccttatttagttgatacggacagcgcaacgataaaatcaaacctggaagaactgtacaaagaacataaagaggataatttggttttccgaaatattatcaagcgaagtaataaagtaagtacttggtctaaaaatggcattacagaacacaaaggctatgacaaaaaagttttgtctatgtatgagaacgtattttttgaaatgattgagcgaatcattcaattagaaaatgaaaaagaatag

SEQ ID NO: 415755 - DNA, 573 bp, Staphylococcus aureus
ttgaacaggattaacagagtaacctctattcttattcagctgcaatcaaaaaaaataattcctgccaaagaaattgcacagcgatttaatataagcttaaggacagtttacagagatatccggacacttgaagaagccggaataccaattggatctgaggccggaaaaggatattttcttgtagagggcttcctacttccgccggtaatgtttacagcggcggaagtgggtgcattgattacagcagggaaatttttaaattgccatggagatgaatcatttataaaggattttgattcagctatgtataaaatcaaatctattttgaagcatggtgaaaaaaactatgcacaggagttggagaacagtattaacgtgtacagcacatctggacagaaaaatacattggcggataacgttattgcagcaattcagactgcaatctgcaataaaagggtaatatcaattcaatatcctgcatcaggagggcaagaaccggaaagcagaatgatagagcctatatcactggggttttatgaacagaactggtacttaatcggttttgcaggctaa

SEQ ID NO: 415756 - DNA, 909 bp, Staphylococcus aureus
atgagatcagaaaaagaaatgatggatttagtactttctttagcagaacaggatgaacgtattcgaattgtgacccttgaggggtcacgcgcaaatattaatatacctaaagatgaatttcaggattatgatattacatattttgtaagtgatatagaaccgtttatatctaatgatgactggcttaatcaatttgggaatataataatgatgcaaaagccggaggatatggaattattcccacctgaagaaaagggattttcctatcttatgctatttgatgattacaataaaattgatcttaccttattgcccttggaagagttagataattacctaaagggcgataaattaataaaggttctaattgataaagattgtagaattaaaagggacatagttccgactaatatagattatcatgtaagaaagccaagcgcaagggagtatgatgattgctgcaatgaattttggaatgtaacaccttatgttattaaaggattgtgccgtaaggaaattttatttgctattgatcattttaatcagattgttcgccatgagctgctgagaatgatatcatggaaggtcggcatcgaaacaggctttaaattaagtgtaggcaagaactataagtttattgaaaggtatatatccgaggatttgtgggagaaacttttgtccacctaccggatggattcctatgaaaacatatgggaagcattatttctatgccatcaattgttcagggcggtatccggtgaggtggcggaaaggcttcattatgcctatccggagtatgataggaatataacaaaatataccagggacatgtataaaaaatacactggtaaaaccggctgcctggatagcacatatgccgctgatatagaagagaggcgggaacagtga

SEQ ID NO: 415757 - DNA, 735 bp, Staphylococcus aureus
atgaaagaaaacaaatatgatgataatatattttttcaaaaatacagtcaaatgagtcgctcgcagaaaggactggctggtgcgggagaatgggagactttgaaaaagatgctacctgattttaagggtaagcgtgtgcttgatttaggatgcggctatggatggcactgtatatatgcgatggaaaacggtgcttcctctgtagtaggtgttgatatttctcataaaatgctcgaagtagcaaaaggaaaaacccattttccacagattgaatatgaatgctgtgccatagaagatgtggatttcccagaggagagctttgatgtaatactaagttcgcttgcgtttcattatgtagcagactatgagaatttaataaaaaagatatataggatgctgaaggctggtggcaatttagtttttacagttgaacatcctgtttttactgctcatggaacacaagactggtattataacgaaaaaggagaaatactgcatttcccggtggacaattattattatgagggcaaacggacagctatgtttttggaagaaaaggttacaaaatatcatagaacactgaccacatatctaaatacactgctttcaaatagttttataataaatcagattgtggagccacagccgccagagaacatgatggatattccggggatggcggatgaaatgcgacgcccaatgatgctgattgtatcggcaaaaaagaagatgtaa

SEQ ID NO: 415758 - DNA, 870 bp, Staphylococcus aureus
atggtagataatattattaaatcagtagcagagaaattatcctctctgtcttatatagaaggtattgttttaggtggttcacgtgcaaggggcacccatacagaggattcggatatagatatcggcatctattacaattcagaatcatttgacataaatactattaatcaattcgctacaaagctggatgatgagcatagaaataaccttgttgtacctcccggagtatggggtgattggattaatggcggcggatggttagtcataaacgggtatcatgtggatttaattttacgtgatattaaacgtgtggaacaaataatgaaagatacagagcacggaattgttactgccaattatcagactgggcatccccatggttatattagtgcaatgtatcgaggagaattagcgattagcaaaatactatatgctaagaatgaaagcttatgcgaattaaaaaaacaggcagaaacttatcccaatgctttgcagaaaagtttagttaacttttttatgtttgaagcagggttctctttaatgtttgtaaaagcaaattcgggaacagacgataaatattatattgcgggtcatgtttttcgtatagtttcatgtttaaatcaagtgttatttgcatgtaataatgcttattgtatcaacgaaaagaaagctataaaactgcttgaaacttttgaacataaacctgaaaaatataccgagaaggtaaatcatatttttgaagtactcggtatctcactttttgaatgctacgacatgaccgagaagctttataatgaagtgaatgaaattgtatcggagataaataactttttaaacgaggagagttcagatgaaagaaaacaaatatga

SEQ ID NO: 415759 - DNA, 651 bp, Staphylococcus aureus
atgaaccaagatattaagtcattagttgaaaccattgtgcctcaacttgaatatttaagcgataaacaaagacgtgtcatagaaagtgctattgcattattcagtgaacaaggatttgataaaacgagtactaaagaaattgcgcagcgtgcaaatgtcgcagaaggaacggtatttaagcagtttaaaagtaaaagaatgttattatacgcaggattaattccaattttaagagatcatatcgcacctgtagctgttaaacaatttacagatgaattaaacgaagtaacccattttgatgcatttataaatttatttgtagaaaatagatctaaatttatttatgacaatagacgtattcttaaagtcatcttaaatgaagctattactaatgaagattttcaaaatatattagttaatattttcacccataaattaacgagtaaattaaaagataaaattgaatggtttatcgataatggtgacatgcgcaatgttaaacctgagttttttatacgtacggtcgtcgcacaaattttaaatttaaatatcccaataatagttaataatgactatactaagggtgaaaactatcagcagtttgcgttattcgtaaaagagggcttatataggatgtttaagcgagaatag

SEQ ID NO: 415760 - DNA, 1131 bp, Staphylococcus aureus
atgaattcgttgcacatagcaggacgtattttcaaacagacgattcgagatgtaagaacattggcactgttacttattgcacctatattactattgtcgctactatattacatttttacagttgccgataatacgaatggcgtaacagttggggttcacgatgtaccagattcattaatgactgaattacatgataaagatattcacgttaaacattataaaaatgacaatgatataagtgataaaattaaagacgacaaattaacaggatttttgcacagtgatggtcaaaaagtatcagtgacttatgctaacgataatcctacacaagcaggagaactaacaggtgcaaatcaaaaatggttaatgagtcataacatgaatgccatgaaagataatactaataaattgcatcaagcgttaactaaaatacaacaaaaaatgcccggggatgggggagacacgcctcatcaagatatggctaaaccatataaactaacaacgcactatttatatggttcatcagattctacgtattttgatatgataaatcctattttaattggattttttgtctttttctttacgtttttaatttctggcattggcttattaaaagagcgtacttctggcacattagaacgtttacttgcctctccaataaaaagaagtgaaattatttttggttatgttttcggttatggtagttttagcgttatccaaacaatagttgtcgtattatatgcaatttatattctgcatatagacttagtaggttcgatatggttcgtactattaacggcaatattaacagcgcttgtcgctgtgacattcggtatattattatctacctttgcttcctcagaattccaaatgattcaatttataccattagtcatagtgccacaagtactatttgcaggcattataccaattgaatcaatgaataaaggattacaatacttttcacatatcatgccgttattctataccggccaaacgatgcaaaatattatgatcaagggttatggattcaacgatatttacatttatttaattgtgttattcgcatttttcattttcttattgattttaaatattataggcatgaaaagatatagaaaagtttag

SEQ ID NO: 415761 - DNA, 705 bp, Staphylococcus aureus
atgatagaggtaaaaaatgtaagtaaatcctttggtaaacaacaagtggtagatgatatatctatatcatttaatgctggtgaggttgtgggtctaatcggtccttcaggtactggaaaaacgacattaatacagtgcattttaggcatggagaaaattgatggtgggcaagtcactattcaagaacatacaatgccgaatagaaagatattatcaaatattggttatatggctcaaaatgatgctttatataatgatttaactggacgtgaaaatttaacgtttttcgcaagaatttatatgcgtgataaagaagatattaaaaaacgtgtgaacctatgcagttccatggttcaattagacaatgatttagataagaaagttgaaatgtattctggtggaatgaaacgacgcttatctttagctattagctttttacaaaatcctaatatccttatattagacgaacctacagttggcattgatcctaaattgcgtcagacgatttggaaggatttaactaaagcaaaggctgaagataaatgcattatagtgacaacgcatgtattagatgaagctacacgctgtgataagctcgtattaatgaatcaaggaaagatattggcaacgggtacaccagatgaagtgaaaaaacaatatcacacagatacgattgaaggcgtatttctgaatatggagggataa

SEQ ID NO: 415762 - DNA, 894 bp, Staphylococcus aureus
ttgcaacagaaccagaaattttttctaatagataaattagcatttacgccccatttcaataaggtttatgtaactgaaaatgataatacaggtgtttataattataaattagatggtaagcgacatacttcaagtgataaaaatagtacaagtgaaattgggcaattttttgtaggtcgatattctattaatgcaaataaagaaattaagcaatctttagtaaatggtcagagtaaaggtaaattagaatttgatactgataatacagatgctaaaaatagaattatcgctaatcaaagttttgatcaagctaagtttaaagtgaatttagagaatacaaaactactagataataattcaatatctttagtgataaatggccataaatctaaatatagtccaaataaaatatatggttattattccaacaatgatagtattcaagttgcagctaagggtaaagttgaaaataaatcgtttgaaaccgatactaaaaatatagatagtaatggtaatacagttaatttatcctttaaacaacatgatattagtaagtataaagaagaagctaaaaaagaaaaatcaaaagcaaaagggtttattaaagattatactgatgaattaaatggtgcttacaaacattctgattaccagtatattgaaagatttatcaaatctgatagttcagttgaaaagcatatgaaaaaagttgtgactggtaaagctaaaaatcattacacagacttaaaaatattaagtgttgaacaaaatgataataaatttacggtaacagcttcaaagaaactagataaaacaactattaaatcaaaatatgttttaaaatatgataaagatttagacgaatttaaaataattgattatacagatatataa

SEQ ID NO: 415763 - DNA, 207 bp, Staphylococcus aureus
atggtttatgcgaatgtcataggttctgatttaggacctaaaattacgccaattggttctttagcaacattattgtggctacatgtcttaacacaaaaaggtgtgaagatttcgtggggaacatactttaaaactggaattatcatcactattccagtcctatttgtaacactcttaggtttataccttacactaatcatattttaa

SEQ ID NO: 415764 - DNA, 249 bp, Staphylococcus aureus
atgaattgggaaattaaaaatttaatgtgtgatttaaagatattgaaagaaaagtttgaggatttaaaggataatcatggctcgcattttgaagatttatatctacatgagccaaatcataccttaaataaagacgatgctattaaagaaggattttcatatcatgagagacgtattcacaatgatcaaatgtttgatgcattagaaaaagcgtcatctttcgccgaccaaagccaagataacgcataa

SEQ ID NO: 415765 - DNA, 555 bp, Staphylococcus aureus
atgaataaaaaactattaacaaaaacattgatagcaagtgctttagttttaacaacagtaggttcaggttttcattcttcttcaaattataatggtattaataacgttgcaaaagctgagcaaacgacagataacgaattgtggaaaaatgtaagagacgctttaaaagaagcgaatattatcgataaaacagataatgaaaatgtcaaagtgacttataaattagcaaatggcggtgaaaacagtattgaaggtaccgccaatttaaatgaacttagcaattctaataacaaaccgatcaatagcgatagtgtaaaaagcattgatttgtcaaggaaaaatcccaatggagatagatttgacgcaaatgatgcatggaaaaaattaactgataaattaaaagaaaagcagattgtgaaagacggtgatacagtaactattcatagtaaagacgaaaaagaccctaaaatctcagctaaagtcggtgaagtctataatgataacaaacgattgatgttgtttaaaaaggatatagataaaatcactataaactag

SEQ ID NO: 415766 - DNA, 939 bp, Staphylococcus aureus
atggtcaaaaaaagactattagctgcaacattgtcgttaggaataatcactcctattgctacttcgtttcatgaatctaaagctgataacaatattgagaatattggtgatggcgctgaggtagtcaaaagaacagaagatacaagtagcgataagtggggggtcacacaaaatattcagtttgattttgttaaagataaaaagtataacaaagacgctttgattttaaaaatgcaaggttttatcaattcaaagactacttattacaattacaaaaacacagatcatataaaagcaatgaggtggcctttccaatacaatattggtctcaaaacaaatgaccccaatgtagatttaataaattatctacctaaaaataaaatagattcagtaaatgttagtcaaacattaggttataacataggtggtaattttaatagtggtccatcaacaggaggtaatggttcatttaattattcaaaaacaattagttataatcaacaaaactatatcagtgaagtagaacgtcaaaattcaaaaagtgttcaatggggaataaaagctaattcatttatcacatcattaggtaaaatgtctggacatgatccaaatttatttgttggatataaaccatatagtcaaaatccgagagactattttgttccagacaatgaattacccccattagtacacagtggtttcaatccttcatttattgcaactgtttctcatgaaaaaggctcaggagatacaagtgaatttgaaataacgtatggcagaaatatggatgttactcatgctactagaagaacaacacactatggcaatagttatttagaaggatctagaatacacaacgcatttgtaaacagaaattacacagttaaatatgaagtgaactggaaaactcatgaaattaaagtgaaaggacataattga

SEQ ID NO: 415767 - DNA, 438 bp, Staphylococcus aureus
gtggaacgtacatttttaatgattaaaccagatgcagtacaaagaaatctaattggtgaagtaatttcaagaattgaaagaaaaggactaaaacttgtcggtggtaaattaatgcaagtaccaatggaacttgctgaaacacattatggtgaacaccaaggtaaaccattttataatgatttaatttcatttattacatcagcaccagtgttcgcaatggtagttgaaggtgaagatgcagttaatgtatctagacatattattggcagcaccaatccttcagaagcttcaccaggatcaattagaggtgatttaggtttaactgttggtagaaatatcattcacggttcagattcattagagtctgctgaacgtgaaattaatctatggtttaatgaaaatgaaattactagctatgcttcaccacgtgatgcatag

SEQ ID NO: 415768 - DNA, 825 bp, Staphylococcus aureus
atgaatcagtcagtcaaattacttaaacatttaacagatgtaaacggcattgctggttatgaaatgcaagttaaagaagcaatgcgtaactatatagagcctgtcagtgatcaaattattgaagataacttgggtggcatttttggaaagaaaaatgctgagaatggtcaatactcaattatgatttctggtcatatggatgaagttggttttatggtaacaaagattgataaacatggttttatttcatttacgccagttggtggatggtggaatcaagtcatgctatctcaaaaagtaacgattacaacagattcgggcaaagaaattagaggtatcatcggttctaaaccgccacatgtcttaacgcctgaagaacgtaaaaagccaatggaaatcaaaaatatgtttatagatattggtgttagtagcaaggaagaagctgaagaagctggcgttgaagtaggcaatatggttacgccatatagtgaatttgaagtgcttgcaaatgataaatatttaactgcgaaagcatttgataatcgctatggctgtgcattagctattgaggtattaaaacgtttaaaagatgaaaatattggcattaacttatacagtggtgccacagtgcaagaagaagttggtttgcgtggtgcgaaagtggcagcgaatacgattaaaccagacttggcgatagctgtcgatgtaggtattgcttatgataccccaggtatgtcaggtcaaacgagcgatagtaaactaggcggtggtccagttgtcattatgatggatgctacaagtattgctcaccaaggtttgcgatag

SEQ ID NO: 415769 - DNA, 177 bp, Staphylococcus aureus
atgaacgaagaaaaattaaagatgattctcttacttcttgaagatataccaagagacgaatggaatcgattagtaaatgaagtaaataatcaatacagttaccaagctgacaaggtaggacttgccagtgataactgtcaacaaatagcaaataactataagcactatggattttaa

SEQ ID NO: 415770 - DNA, 231 bp, Staphylococcus aureus
atgcataagagattgctcactcaatatttagataaagaaatcgttacttctttagatttacatttaattaatggtgaagttattaaagtacaagaacatatgaaagatgctgaaagcaaaactctacacatcatttatccaaaagatagagttgtcagtttagatcatgttttgtatttcgacattaacgttaaaggtgaaaagaataacgatagtccttatccatcttaa

SEQ ID NO: 415771 - DNA, 870 bp, Staphylococcus aureus; identical to SEQ ID NO: 405540

SEQ ID NO: 415772 - DNA, 546 bp, Staphylococcus aureus
atgattaaaaaattattttttatgatattaggatcattactaatattatcagcttgctccaataatgatgaaaaagataaagacactaatgaccaaaaaagtgagagccatatgaagcataatgatgaaagtaaagttccagaagatatgaaatcgactaatgagggtgaatttaaagtgggagataaagtaacgattacagcagggcatatgccaggtatgaaaggtgcagaagctactgtaaaaggtgcgtataaaacatatgcctatgttgtaagttataaacccacaaatggaaatgaaaaagtaaacaatcataaatgggtcgtaaacgaagagattaaagatgcacctaaagatggatttagtaagggcgatactgttaaattagaagcaagtcatatgtctggtatgaaaggtgctacagccaatatagataacgtgaaaaagactactgtttacgtagttgattacaaatccaaagataatggtaaaatcattaaaaatcataaatggatgacaggaaatgagctgaaagcacgataa

SEQ ID NO: 415773 - DNA, 2064 bp, Staphylococcus aureus
ttgaataataatggtgaagagcataatcatcaaaatcacatgaatcattccaatcaaatgcatcatgataaccatgcctcacatgatcatcatagtggccatgcacatcatcatggaaattttaaagttaagttttttgtttcattaatttttgcaatacctatcattcttttatcgccactgatgggtgttaacttaccttttcaattcacatttccaggttctgaatgggtagtgttaatattaagtacaattttattcttttatggtggtaaaccgttcttgtctggtggtaaagatgaaattgctacaaaaaaaccaggcatgatgaccttagttgccctaggtatttcagtagcttatatttatagcttgtatgctttttatatgaataactttagtagtgcaactggtcatacaatggactttttttgggaattagcaaccttaattttaattatgctattaggacattggatagaaatgaatgctgtcggaaatgctggagatgctttaaagaaaatggcagaactgttacctaatagtgctattaaagttatggataatggccaacgcgaagaagttaaaatatcagacatcatgactgatgatatcgtcgaagtaaaagccggagaaagcattccaacagatggtattatcgttcaaggacaaacatctatagatgaatccctagtcactggagaatctaaaaaagtacaaaaaaatcaaaatgacaacgtcatcgggggttctattaatgggtctggaacaatacaagtcaaggttacagctgtgggagaagatggatatctttctcaagttatgggacttgttaatcaagcacaaaatgataaatctagtgctgaattgttatctgataaagtagcgggttatttattctactttgctgtaagtgttggcgtgatttcttttattgtctggatgctcattcaaaatgatgttgattttgcattagaacgtcttgtaactgtgttagtcattgcttgtccacatgctttaggcttggcaatacctttagtcactgcacgttctacttcaattggtgcacataatggtttaattattaaaaatagagagtctgtagaaatagctcaacatatcgattatgtaatgatggacaaaactggtactttaactgagggtaacttttctgtgaatcattatgagagctttaaaaatgatttgagtaatgatacaatattaagccttttcgcctcattagaaagtcaatctaatcacccattagctataagtattgttgattttgcgaaaagtaaaaatgtttcatttactaacccacaagacgttaataatattccaggtgtcggattagaaggtctaattgataataaaacatataaaataacaaatgtctcttatcttgataaacataaacttaattatgacgatgacttgtttactaaattagctcaacaaggtaattcaatcagttatttaattgaggatcaacaagtcattggcatgattgctcaaggagatcaaattaaagaaagctcaaaacaaatggtagctgatttactatcaagaaatattacaccagtcatgcttacaggtgacaataatgaagtggcacacgctgtcgcaaaagaattaggtattagtgatgtccacgcacaactcatgccagaagataaggaaagcattataaaagattatcaaagtgacggtaataaagtcatgatggtcggagacggtatcaacgatgcgccgagtcttataagagcggatattggtatagcaattggtgcaggtacagatgttgcagtggattcaggtgatatcatacttgttaaaagtaatccatcagatatcattcatttcttgaccctttcaaataatactatgagaaaaatggtgcaaaacttatggtggggtgcaggttataatattgttgctgtacctttagcagctggtattttagcatttattggcttgattttatcacctgcaataggtgctattttaatgtctttaagtacaattatcgttgcaattaatgcctttacattaaaattaaaataa

SEQ ID NO: 415774 - DNA, 636 bp, Staphylococcus aureus
atgcttaaaatagagagattaaccaaatatatagacacgcaactgatatttaaagagatatcatgtacaattaacgaccagcacttactcataagtggggagagtggttgtggtaaatccacattagccaagattatcgctggcttagatacggattatcagggcgaattatatcttaatgggcgcttacgtgaatcttatacgtctaaagagtggatgaagcacatccaatatgtacctcaatatcaacgtgatactttaaatcagcgtaaaacggtattagctacattattagaaccacttaagaattataaggtaaataaacagcgttatacatcaagcattgaagcagtgcttgatcagtgtaatttaccacacgatatacttaatcataaagtttcgacattaagtggtggccaatttcaacgcgtctggatagctaaagctttaatattagaaccagagattctcatattggatgaagctacaaccaacttagatgtcattaatgaagaagctatacttcaaatgttgatttccttaaagatgacacaattaatcattatttcacatgatacatacgtcttaagccaatttgaaggaattcagttacagctaaataaattgaataattaa

SEQ ID NO: 415775 - DNA, 768 bp, Staphylococcus aureus
atgtcaaattatcaacaaaaaaataacgcagtaaatacggtagtcaacgtcaatcaattatcgattttagatcaagagaaagtattgttaaaggatgttgatttgacagtaactaaaggtgcatttcattgcattataggtgaaagtggcagtgggaaatcactgttaacaagaacaatacttggaatgaaacaatcacaattatgttatcaaggagatattgacatcgatttaactcaaacagatgcagtgtttcaagatgttcaaagtaatatgtttcaaaatataacattagctaagcatttccaatacatttatgaagccaatcgcacacatctcactaaacagcgtattaaggaagatgtcttacagatgatgcaattacttggtttaagacaaggggaacaattgcttgagcgttatcccttcgaacttagtggaggtatggcacaacgtgtcgcctttataatgtcattaattagacgtccgaactacttatttttagatgaaccaacgagtgcacttgatcaagaaaatattaaaaagtttatgcattaccttcttagggcacaggagcgctaccaaatgaccattgtttttatcacacatgatattaacttagtgaaagattgtgccacacatattagtattatgcagcaaggtaaattgatagaaaatggtgaggccgcgtcgatcttaactaagccgacacataattacacgaaaaaattaattacgattgcacatcggagacaaccttatgcttaa

SEQ ID NO: 415776 - DNA, 957 bp, Staphylococcus aureus
atgctcaaacgtacaattaaattcatactttatttaatcgtaagttcgtttattatcttcattttagttgagaagacatctggtaatccagcgattctgtatctacaacgtcatggttatacgtcgattacgcaagacaatattgaagcggcacaacatcaacttggcttaggacaacatgtgttactaagatatatcgattgggttggacatgcactcacgggcaacttaggatacggctttagtacgaacgaagcagttaccgctatgataatggaagccatcgtgccgacgcttgtgctaatcattgtctctagttgtatcatgttgccatttggctatattgttggttacttcgttgggacgcgtccgcatacacgttacgctaatggaattcgtggattcgcccaagtgatgacctcaatgccagaatactggttagctattttattcatttattatttaggcgtacgttggcaattgttaccatttgtaggtagtgattcatggcaacactttgtgctgccaatcttcacaattgttgttatagaagggtgtcatatcttattgatgacagcacatctgattacacaaacgttagatcaagatgcgtatcaactggcgcagttaagacatttttcgttaaaagcgcgtatcatcgtacaaattaaagagatatttgcaccactaatgacgatttcaattaacagtatcattcatttaattggaaaagccgtaatactagaagtcatcttcagcatgtctggtataggtaaattgttgattaatgctattaaccaacgagattatccactgattcagggcattgtcatctttatcattgtctttattatgctaatgaattatttaggcgatgtgattattttgaagaatgaacctagacttcgacgacgtcatacccagcagtcaggcaatgagaaaagaggtacgatgtga

SEQ ID NO: 415777 - DNA, 1554 bp, Staphylococcus aureus
atgaggaaatgtgtattaatgacggtagcagcaagtgctacgctcttattggcaggttgtggcaatggtcaaaaagaagataaagatgttacggtatcgctacctactgaagcaaaggcggataaacttgacgcgcaaggctatgatgcagcgatgcccgtttatagtgcagtgtatgatgcattagttaaatatgataaagataagggtattaaagcaggtttagcagataaatggagcgttgatgaatcagggaaagtttatgaattccatttgaaaaagaatgttaaattctcagatggttcagcattagatgctaaggacgtgaaattctcgattgatcgtgcgaaagcgatgaacaaagattcgactgtagaaacgttaaaaaaattagataaggtcgttgttaaaaatgagcacgtggtccaaattagattgaaatctccttcaaatcaagtgttaaatgaattaacacaagtgagaccgttgcgtattatgagtccacattcagtagaagatggtaaagtaaacggtaaatttgaaaaagcgattggaacaggtgcatttgttgttgataaaactggtaaagaaaaaacgacaatgaagccaaataaatattttgacaacggtcacccagtcaattatcatcttgcattccaaacgattgaagatggggactcaagaaattctgcagtacaaagtggttctgtagatatttctggtggtgctttaggtatgctctcagacgaacaaatcaaacaagataagaaaaataagaacttaacgattgaagatagacctagcacagtaagtcactttatggcatttaaccctaaaaatgatgtattaaatcaacgcacaattcgtgaagcgataagtaagagcatcgatgcgaaagacattgcgggcaaatctgtaaatggtctgttccagaagaacgtacaatttgtgactaaaaataatcaacagccacacgattatgatatgaaagcggctgaaaggttacttaaatcagaaggatatcataaaaacgatgacggcatctttgaaaagaatggcaaacctttatcatttaacttagtcattcaaactgcagagttcccaaattggaaagataaagctgaaaaagtgcaacgtcagcttaaacaagccggtattaagttaaatgtgaaaacgttagattcacaatcatactatgatacattatggacgaaaaaagactatgatttgattttctatagaacgtattcagatgcattaatgccttacaactttataagttcagtgtttaaaaataatgatggtcaaccaggggtgttagctgatgatgaaacattaacgaaacagctagacgatttcccatcaaccgtatcaaaagaagaccaacagtgttcatttgatgacatatttaaacactttaatcaacaatactatggtgtgccaattgcttatccaaatgagacgtttgtagtgagtgataaagtaaaacaattcaaattctctggacttacggatgcaccaattgattataaagcgttgaaagttaatgaatag

SEQ ID NO: 415778 - DNA, 816 bp, Staphylococcus aureus
atgcattatataaaatttattgagtcaaaagataatacaaaactttatatgaaagtgaatgatattcaagatgcaaaagcgaatatcattatagctcatggtgtggcagaacatttagatcgttatgatgagataacagcatatttaaatgaagcgggttttagtgttattagatatgatcaaagagggcatggtcgttctgaaggcaagcgtgccttttatagcaatagtaatgaaattgtcgaagatttagatgcgataataaattatgtgaagtcaaactttgaaggtaaagtttacttaatcggtcatagtatgggtggttatacagtcactttatatggaacgaaacatccaaatacagtgaatggtattataacttctggagcattaacacgttataataataaactatttggcaatcctgatagaaacatatcacctgatacttatatagaaaacaatttaagtgagggggtatgttctgatttagaggtaatggaaaaatataaacttgatgatttgaatgcgaaacaaatctctatggggctcgtcttttcaataatggatggtgttaggtatttgaaagacaatgctcaacaatttacagataatattttgatattgcatggcaaggaagatgggctagtaagctatgtagattctttacagctttatcaagaaataggatcagcacataaatcattacacatctatgatcgtttggagcatgaaatatttaatgaaagttcttataatagaactatttttaacgaagttattgaatggcttgaaacggaattaacttataactaa

SEQ ID NO: 415779 - DNA, 360 bp, Staphylococcus aureus
gtggaaaatacaaatagtaatatgcataaaaatgacaatagttacgttttatcagcattgagttatttaagtatctttttcgcacctgtcattttacctttatttgtatggatacttgctgatgaaccaacatcagaacatggcaaaaaagcattcattaatcatattatgacttgggttagtttttttataggtagattggcatttattttttctaaagaagtctttgataaacctttggatcatcaattattaatatttagcattcttttaattattactattatattctttttaattgctttaatattatatatcttgaacattaacagaggaattaaaattctattaaaaaaataa

SEQ ID NO: 415780 - DNA, 330 bp, Staphylococcus aureus
atggctagaacgtataatgtgattaaatatgtcattaagaaaaataaggatgatcttaaaatacatggattaagattatatgaatttaatataaaagatgaaaaagctataaatattagccaacccatttttgtgaacagagcaacattgattgagaaaatacaaaatggtgaagcatttacgcacgcctttagagtaaatcacaatacttattatgcaggccaattaatttctttatcattgaataaaaatggttatattaataacaactttgaggcctcacgagatattattagaaacattgaagtaagtattttagactatgaataa

SEQ ID NO: 415781 - DNA, 966 bp, Staphylococcus aureus
atgagtataagcgaatataaaaatagatacttagagtcactatataacacctttaaaactgagttagaaaacgaacgcactcgctattttatattagataccaactatacaaatagtgatgatactgaaaaggagtttacttgggatgtaaaacagaataataagatcagagaaggcgatttgttcatttttagacggccaactaatttatctcaaattgctcaacaattttatttctttggagctgggaaaatagaaaaaattgagcgaaaaaataatgtagcaaccgcttacatttcaaaacccttactttttgtggatcgtgttttaaaagataatattgaaaatttaaaatgggagttcaaagaaagaattaaagaagagtgggagcagtttttctttaaaaataaaatcagtaatattacaaaaaatgattttttaaaactactaagtttgagtagaaatgtagtggaaatagaaagtaattatattaataatgatatttcgctaacttttaaacaaatggctgatatggcaactcgaataaagaaaaatatttactacgtagggaatcatgaagcatttgttcaagctaagggaagtgctcattttgagttttcaaaaaggattaaacaaaattatagttatagatgtgcaattaccgggattaaaactaaagactttttagtcgttacacatattattccttggcatgaaaatgagtttattagactagatccttcaaatggtatttgtttgtctttatttttagcaaaagcatttaagaaaggctttatcactttttctaacagttatagagttgttttatctaaagaagcagagaaagatgctgctttatatgaagaattaaagatttatgaaaatcaaaaaatcgaactaccagattgtcagaaacctaatttgaaatatttagattggcatagagaacatatttttaaaaattaa

SEQ ID NO: 415782 - DNA, 177 bp, Staphylococcus aureus
atgccaagtcgttgggtaaaagttaaaacctttaagtcattatctacttccaaattagagaaaaagttacaaaatttcaaatcatataatagctttgatattatagaaattaaaagacattcatatttatttttaaatattgtctatttttacagcattgaatttccagccgtataa

SEQ ID NO: 415783 - DNA, 225 bp, Staphylococcus aureus
atgaaccatgacaacactatacaatccaattggcgaacggttgctagttgtttagcatcacaaaattacatttcaatagtaaaaggtctggtgcatcatttcacagccatcgatgacgaggaaatacttgataaaatctatgaagagtttataaatgatgactctattacaacggtacttaacaatgatttacaaacaattattaatcattatctatcaaaatga

SEQ ID NO: 415784 - DNA, 1128 bp, Staphylococcus aureus
gtgaaaactagagcagcagttttacatgaaatgggggctaaaaagccctataaagaatctaaacctttaaaaattgaatacttagaacttgataatcctagcgaacacgaagtattaattaaaattcatgcagctggattatgtcactctgatttgtcagtaattaatggtaacagacctagacctttacctatggcacttggtcatgaagcttccggtgaagtaattaaagttggaaaagctgttacaagagttagcgaaggagatcatgtggtatgcacatttattcccagttgtggaaaatgtatcccatgtaaagaaggacgtcctgcattatgtgaaaacggagcaatatctaatgaaaaaggcgaaatgttagagggagggatgcgtttatctaatgatgaaggaaaagtatatcatcacttggggatatcaggttttgctgaatattctgttgtctctgaaaactctatagttaaaattgataaaaaaataccttttgaacgtgcagctgcatttggttgtgctattatcacaggtatcggtgctgtggtgaatacagcccaaattcgttctggtagtaatgtagcggttgttggtttaggaggtattggattgaatgctattattggagctaaactagcgggagccaatgaaattattgctttagatattaacgaagataaatttgaattagcaaagcaatttggggctacagcaacatttaattcaagcgataaagatatcgatgagcaaattaaagaatatattcctggcggagtagaatatgcttttgaaacagcgggtgtagtgccagctatgaaagttgcttatcagattactaaacgaggggggacaactgtaacaacaggactgcctaatcctaaagataatttttctttccctcaagttactttagcggctgaagaacgtaccattaaaggatcatatgtaggaagttgtgtacctgacagagatataccaaggttcgttaatctatacaaccaaggacgtttaaatattgattcactcatcagtgaggttatcactttagatgaaattaatgagggatttgatcgtttgtctaatggtgaagtaggtagaattataatgaagatgcattga

SEQ ID NO: 415785 - DNA, 282 bp, Staphylococcus aureus
gtggattactggaatgattgctttagtgatttacatatcttgcaaccagattggaaaactatccaacgcactgcggatagagcaatagtttttatgttattgagtgatgaagaagaatggggaaagcttcacagaaattctagaacaaaatataagaatttgataaaagaaatttcgccagtcgatttaacggacttaatgaaatcgactttaaaagcgaacgaaaaacaattgcaaaaacaaatcgatttttggcaacatgaatttaaattttggaaatag

SEQ ID NO: 415786 - DNA, 738 bp, Staphylococcus aureus
atgttatttacgacaaattataattggacttttttaatactcttcacaatcttttttgtgatttttattaaacatatttcaagagtttctaacccttttattaatcctaaactagggaaaaacattccgtttatgcttggtttgttttctggtgggctaatattttctatagtagctggttttatatcaatggtgccttatatgatgaaaactatttatcatgtaaatgtagcgacaataggtaatagtgttatttttcctggaaccatgagtgttattgtttttggttattttggtggttttttagtggatagaaaaggatcattatttgtttttattttaggatcattgtctatctctataagttttttaactattgcattttttgttgagtttagtatgtggttgactacttttatgtttatatttgttatgggcggattatcttttactaaaacagttatatcaaaaatagtatcaagtagtctttctgaagaagaagttgcttctggaatgagtttgctaaatttcacaagttttttatcagagggaacaggtatagcaattgtaggaggtttattgtcactacaattgattaatcgtaaactagttctggaatttataaattattcttctggagtgtatagtaatattcttgtagccatggctatccttattattttatgttgtcttttgacgattattgtatttaaacgttctgaaaagcagtttgaatag

SEQ ID NO: 415787 - DNA, 654 bp, Staphylococcus aureus
atgtataaaaacaatcatgcaaatcattcaaatcatttggaaaatcacgatttagacaatttttctaaaaccggctactctaatagccggttggacgcacatactgtgtgcatatctgatccaaaattaagttttgatgcaatgacgatcgttggaaatctcaaccgagacaacgctcaagccctttctaaatttatgagtgtagagccccaaataagactttgggatattcttcaaacaaagtttaaagctaaagcacttcaagaaaaagtttatattgaatatgacaaagtgaaagcagatagttgggatagacgtaatatgcgtattgaatttaatccaaacaaacttacacgagatgaaatgatttggttaaaacaaaatataataagctacatggaagatgacggttttacaagattagatttagcctttgattttgaagatgatttgagtgactactatgcaatgtctgataaagcagttaagaaaactattttttatggtcgtaatggtaagccagaaacaaaatattttggcgtgagagatagtaatagatttattagaatttataataaaaagcaagaacgtaaagataatgcagatgctgaagttatgtctgaacatttatggctgtctcttatacacatctga

SEQ ID NO: 415788 - DNA, 345 bp, Staphylococcus aureus; identical to SEQ ID NO: 407362

SEQ ID NO: 415789 - DNA, 345 bp, Staphylococcus aureus; identical to SEQ ID NO: 415498

SEQ ID NO: 415790 - DNA, 183 bp, Staphylococcus aureus; identical to SEQ ID NO: 407358

SEQ ID NO: 415791 - DNA, 189 bp, Staphylococcus aureus; identical to SEQ ID NO: 407433

SEQ ID NO: 415792 - DNA, 231 bp, Staphylococcus aureus
atgaaaattttagatagaattaatgaacttgcaaataaagaaaaagtccaaccacttactgtagctgaaaaacaagaacaacatgcattgcgtcaagactacttaagtatgatccgaggacaagtattaacaacattttccacaataaaagtggttgatccaatcggtcaggatgtcacaccagataaagtttatgatcttcgccaacaatacggttatattcaaaattaa

SEQ ID NO: 415793 - DNA, 141 bp, Staphylococcus aureus; identical to SEQ ID NO: 407391

SEQ ID NO: 415794 - DNA, 543 bp, Staphylococcus aureus
atgactgataaaaagtacactgcagccgatatggttattgatactttgaaaaataatggggtagaatatgtttttggtattccgggtgcaaagatagactatctatttaatgctttaattgatgatggtcctgaacttattgtcactcgtcatgaacaaaatgctgcaatgatggcacaaggtattggaagattaacaggtaaaccgggtgtagtacttgttacaagtggccctggtgtaagtaatttaacgactggactattaacagctacatctgaaggggatcctgtattagcgttaggtggccaagtgaaacgtaatgatttattacgattaacgcatcaaagtattgataatgctgcgctattaaaatattcatcaaaatacagtgaagaagtacaagatcctgaatcattatcagaagttatgacaaatgcaattcgaattgctacttcaggaaaaaatggcgcaagttttattagtattccgcaagacgttatttcttcaccagttgaatctaaagctatatcactttgccaataa

SEQ ID NO: 415795 - DNA, 630 bp, Staphylococcus aureus; identical to SEQ ID NO: 409282

SEQ ID NO: 415796 - DNA, 261 bp, Staphylococcus aureus; identical to SEQ ID NO: 409283

SEQ ID NO: 415797 - DNA, 1065 bp, Staphylococcus aureus; identical to SEQ ID NO: 409284

SEQ ID NO: 415798 - DNA, 939 bp, Staphylococcus aureus; identical to SEQ ID NO: 409285

SEQ ID NO: 415799 - DNA, 306 bp, Staphylococcus aureus; identical to SEQ ID NO: 409286

SEQ ID NO: 415800 - DNA, 1110 bp, Staphylococcus aureus; identical to SEQ ID NO: 409287

SEQ ID NO: 415801 - DNA, 372 bp, Staphylococcus aureus
atggataataaaacgtatgaaatatcatctgcagaatgggaagttatgaatatcatttggatgaaaaaatgtgcaagtgcgaataatataatagaagaaatacaaatgcaaaaggactggagtccaaaaaccattcgtacacttataacgagattgtataaaaagggatttatagatcgtaaaaaagacaataaaatttttcaatattactctcttgtagaagaaagtgatataaaatataaaacatctaaaaactttatcaataaagtatacaaaggcggtttcaattcacttgtcttaaactttgtagaaaaagaagatctatcacaagatgaaatagaagaattgagaaatatattgaataaaaaataa

SEQ ID NO: 415802 - DNA, 1758 bp, Staphylococcus aureus; identical to SEQ ID NO: 409223

SEQ ID NO: 415803 - DNA, 2007 bp, Staphylococcus aureus; identical to SEQ ID NO: 409224

SEQ ID NO: 415804 - DNA, 429 bp, Staphylococcus aureus; identical to SEQ ID NO: 409225

SEQ ID NO: 415805 - DNA, 744 bp, Staphylococcus aureus; identical to SEQ ID NO: 409226

SEQ ID NO: 415806 - DNA, 675 bp, Staphylococcus aureus; identical to SEQ ID NO: 409227

SEQ ID NO: 415807 - DNA, 240 bp, Staphylococcus aureus; identical to SEQ ID NO: 409234

SEQ ID NO: 415808 - DNA, 1257 bp, Staphylococcus aureus; identical to SEQ ID NO: 409235

SEQ ID NO: 415809 - DNA, 480 bp, Staphylococcus aureus
atgaaaatcaccattttagctgtagggaaactaaaagagaaatattggaagcaagccatagcagaatatgaaaaacgtttaggcccatacaccaagatagacatcatagaagttccagacgaaaaagcaccagaaaatatgagcgacaaagaaattgagcaagtaaaagaaaaagaaggccaacgaatactagccaaaattaaaccacaatccacagtcattacattagaaatacaaggaaagatgctatcttccgaaggattggcccaagaattgaaccaacgcatgacccaagggcaaagcgactttgtattcgtcattggcggatcaaacggcctgcacaaggacgtcttacaacgcagtaactacgcactatcattcagcaaaatgacattcccacatcaaatgatgcgggttgtgttaattgagcaagtgtatagagcatttaagattatgcgtggagaagcatatcataaatga

SEQ ID NO: 415810 - DNA, 2319 bp, Staphylococcus aureus
atgaaagctttattacttaaaacaagtgtatggctcgttttgctttttagtgtgatgggattatggcaagtctcgaacgcggctgagcagtatacaccaatcaaagcacatgtagtaacaacgatagacaaagcaacaacagataagcaacaagtaacgccaacaaaggaagcggctcatcaatttggtgaagaagcggcaaccaacgtatcagcatcagcacagggaacagctgatgaaataaacaataaagtaacatccaacgcattttctaacaaaccatctacagcagtttcaacaaaagtaaacgaaacgcacgatgtagatacacaacaagcctcaacacaaaaaccaactcaatcagcaacattcacattatcaaatgctaaaacagcatcactttcaccacgaatgtttgctgccaatgtaccacaaacaacaacacataaaatattacatacaaatgatatccatggccgactagccgaagaaaaagggcgtgtcatcggtatggctaaattaaaaacaataaaagaacaagaaaagcctgatttaatgttagacgcaggagacgccttccaaggtttaccactttcaaaccagtctaaaggtgaagaaatggctaaagcaatgaatgcagtaggttatgatgctatggcagtgggtaaccatgaatttgactttggatacgatcagttgaaaaagttagagggtatgttagacttcccgatgctaagtactaacgtttacaaagatgggaaacgcgcgtttaagccttcaacaattgtaacgaaaaatggtattcgttatggaattattggcgtaacgacaccagaaacaaagacgaaaacaagacctgagggcattaaaggtgttgaatttagagatccattacaaagtgtgacagcagaaatgatgcgtatttataaagacgtagatacatttgttgttatatcacatttagggattgatccttcaacacaagaaacatggcgtggtgattacttagtgaaacaattaagtcaaaatccacaattgaagaaacgtattacagtcattgatggtcattcacataccgtacttcaaaatggtcaaatttataacaatgatgcattagcacaaacaggtacagcacttgcgaatatcggtaaggttacatttaattaccgcaatggagaggtatcaaatattaaaccgtcattgattaatgttaaagacgttgaaaatgtaacaccgaacaaagcattagctgaacaaattaatcaagctgatcaaacatttagagcacaaacagcagaggttattattccaaataataccattgatttcaaaggagaaagagatgacgttagaacgcgtgaaacaaatttaggaaacgcgattgcagatgctatggaagcgtatggcgttaagaatttctctaaaaagactgactttgccgtgacaaatggtggaggtattcgtgcctctatcgcaaaaggtaaggtgacacgctatgatttaatctcagtattaccatttggaaatacgattgcgcaaattgatgtaaaaggttcagacgtctggacagctttcgaacatagtttaggtgcaccaacaacacaaaaagacggtaagacagtattaacagcgaatggcggtttactacatatctctgattcaattcgtgtttactatgatatgaataaaccgtctggcaaacgaattaacgctattcaaattttaaataaagagacaggtaagtttgaaaatattgatttaaaacgtgtatatcatgtaacgatgaatgacttcacagcatcaggtggcgacggatatagtatgttcggtagccctagagaagaaggtatttcattagatcaagtactagcaagttatttaaaaacagctaacatagctaagtatgatacgacagaaccacaacgtatgttattaggtaaaccagcagtaagtgaacaaccagctaaaggacaacaaggtagcaaaggtagtgagtctggtaaagatgtacaaccaattggtgacgacaaagcgatgaatccagcgaaacaaccagcgacaggtaaagttgtattgttaccaacgcatagaggaactgttagtagcggtacagaaggttctggtcgcacattagaaggagctactgtatcaagcaagagtgggaaccaattggttagaatgtcagtgcctaaaggtagcgcgcatgagaaacagttaccaaaaactggaactaatcaaagctcaagcccagcagcgatgtttgtattagtagcaggtataggtttaatcgcgactgtacgacgtagaaaagctagttaa

SEQ ID NO: 415811 - DNA, 801 bp, Staphylococcus aureus
atgagccgcttgatacgcatgagtgtattagcaagtggtagtacaggtaacgccacttttgtagaaaatgaaaaaggtagtctattagttgatgttggtttgactggcaagaaaatggaagaattgtttagtcaaattgaccgtaatattcaagatttaaatggtattttagtaacccatgaacatattgatcatattaaaggattaggtgttttggcgcgtaaatatcaattgccaatttatgcgaatgaaaagacttggcaggcaattgaaaagaaagatagtcgcatccctatggatcagaaattcatttttaatccttatgaaacaaaatctattgcaggtttcgatgttgaatcgtttaacgtgtcacatgatgcaatagatccgcaattttatattttccataataactataagaagtttacgattttaacggatacgggttacgtgtctgatcgtatgaaaggtatgatacgtggcagcgatgcgtttatttttgagagtaatcatgacgtcgatatgttgagaatgtgtcgttatccatggaagacgaaacaacgtattttaggcgatatgggtcatgtatctaatgaggatgcgggtcatgcgatgacagatgtgattacaggtaacacgaaacgtatttacctatcgcatttatcacaagacaataacatgaaagatttggcgcgtatgagtgttggccaagtattgaacgaacacgatattgatacggaaaaagaagtattgctatgtgatacggataaagctattccaacgccaatatatacaatataa

SEQ ID NO: 415812 - DNA, 1335 bp, Staphylococcus aureus; identical to SEQ ID NO: 408113

SEQ ID NO: 415813 - DNA, 1827 bp, Staphylococcus aureus
atgaagtggctaaaacaactacaatcccttcatactaaacttgtaattgtttatgtattactgattatcattggtatgcaaattatcgggctgtattttacaaataatcttgaaaaagagctgcttgataattttaagaagaatattacgcagtacgctaaacaattagaaattagtattgaaaaagtatatgacgaaaagggctccgtaaatgcacaaaaagatattcaaaatttattaagtgagtatgccaaccgtcaagaaattggagaaattcgttttatagataaagaccaaattattattgcgacgacgaagcagtctaaccgtagtctaatcaatcaaaaagcgaatgatagttctgtccaaaaagcactatcactaggacaatcaaacgatcatttaattttaaaagattatggcggtggtaaggaccgtgtctgggtatataatatcccagttaaagtcgataaaaaggtaattggtaatatttatatcgaatcaaaaattaatgacgtttataaccaattaaataatataaatcaaatattcattgttggtacagctatttcattattaatcacagtcatcctaggattctttatagcgcgaacgattaccaaaccaatcaccgatatgcgtaaccagacggtcgaaatgtccagaggtaactatacgcaacgtgtgaagatttatggtaatgatgaaattggcgaattagctttagcatttaataacttgtctaaacgtgtacaagaagcgcaggctaatactgaaagtgagaaacgtagactggactcagttatcacccatatgagtgatggtattattgcaacagaccgccgtggacgtattcgtatcgtcaatgatatggcactcaagatgcttggtatggcgaaagaagacatcatcggatattacatgttaagtgtattaagtcttgaagatgaatttaaacttgaagaaattcaagagaataatgatagttttttattagatttaaatgaagaagaaggtctaatcgcacgtgttaactttagtacgattgtgcaggaaacaggatttgtaactggttatatcgctgtgttacatgacgttactgaacaacaacaagttgaacgtgagcgtcgtgaatttgttgccaatgtatcacatgagttacgtacacctttaacttctatgaatagttacattgaagcacttgaagaaggtgcatggaaagatgaggaacttgcgccacaatttttatctgttacccgtgaagaaacagaacgaatgattcgactggtcaatgacttgctacagttatctaaaatggataatgagtctgatcaaatcaacaaagaaattatcgactttaacatgttcattaataaaattattaatcgacatgaaatgtctgcgaaagacacaacatttattcgagatattccgaaaaagacgattttcacagaatttgatcctgataaaatgacgcaagtattcgataatgtcattacaaatgcgatgaaatattctagaggcgataaacgtgtcgagttccacgtgaaacaaaatccactttataatcgaatgacgattcgtattaaagataatggcatcggtattcctatcaataaagtcgataagatattcgaccgattctatcgtgtagataaggcacgtacgcgtaaaatgggtggtactggattaggactagccatttcgaaagagattgtggaagcgcacaatggtcgtatttgggcaaacagtgtagaaggtcaaggtacatctatctttatcacacttccatgtgaagtcattgaagacggtgattgggatgaataa

SEQ ID NO: 415814 - DNA, 702 bp, Staphylococcus aureus; identical to SEQ ID NO: 405547

SEQ ID NO: 415815 - DNA, 1284 bp, Staphylococcus aureus
atgtcatcaatcgtagtagttgggacacaatggggagacgaaggaaaaggaaaaataacggatttcttggcagaacagtcagatgttatcgcgcgtttttcaggtggtaataatgcaggccataccattcaatttggcggagaaacatataaattacatttagtaccatctggtatcttttacaaagacaaattagcggtaatcggtaacggtgtcgttgttgatccagttgcactattgaaagaattagacggattaaatgaacgtggcattcctacaagtaatttacgtatatctaatcgtgcgcaagtgattttaccatatcacttagcacaagatgaatatgaagaacgtttacgcggtgacaataagattggtacaactaaaaaaggtatcggtccagcatatgtagacaaagttcaacgtatcggtattcgtatggcagatttacttgaaaaagaaacattcgaaagattattaaaatcaaacattgaatataaacaagcatatttcaaaggtatgtttaacgaaacatgtccatcatttgatgatatctttgaagaatactatgctgcaggtcaacgtttaaaagaatttgtaacagacacatcaaaaatcttagacgatgcatttgtagcagatgaaaaggtacttttcgaaggtgcgcaaggtgtaatgttagatatcgaccatggtacatatccattcgttacatcaagtaatccaattgcaggtaacgttactgttggtacaggtgtaggtcctacattcgtttcgaaggtaattggtgtatgtaaagcttatacatcacgtgttggtgatggtccattccctactgaattattcgatgaagatggacatcatattagagaagttggtcgtgaatacggtacaacaacaggacgtccacgtcgtgtaggttggtttgactcagttgtattacgtcactctcgtcgtgtaagtggtattacagatttatctattaactcaatcgatgttttaacaggcctagacacagtgaaaatctgtacagcttatgaattagacggtaaagaaattactgagtacccagcaaacttagatcaattaaaacgttgtaaaccaatctttgaagagttaccaggttggacagaagacgtaacaagtgtgcgtactttagaagaattacctgaaaatgcacgtaaatatttagagcgtatttcagaattatgtaatgtacaaatttctatcttctcagttggtccagatagagaacaaacaaacctattaaaagaattgtggtag

SEQ ID NO: 415816 - DNA, 1401 bp, Staphylococcus aureus
atggatagaatgtatgagcaaaatcaaatgccacataacaatgaagctgaacagtctgtcttaggttcaattattatagatccagaattgattaatactactcaggaagttttgcttcctgagtcgttttataggggtgcccatcaacatattttccgtgcaatgatgcacttaaatgaagataataaagaaattgatgttgtaacattgatggatcaattatcgacggaaggtacgttgaatgaagcgggtggcccgcaatatcttgcagagttatctacaaatgtaccaacgacgcgaaatgttcagtattatactgatatcgtttctaagcatgcattaaaacgtagattgattcaaactgcagatagtattgccaatgatggatataatgatgaacttgaactagatgcgattttaagtgatgcagaacgtcgaattttagagctatcatcttctcgtgaaagcgatggctttaaagacattcgagacgtcttaggacaagtgtatgaaacagctgaagagcttgatcaaaatagtggtcaaacaccaggtatacctacaggatatcgagatttagaccaaatgacagcagggttcaaccgaaatgatttaattatccttgcagcgcgtccatctgtaggtaagactgcgttcgcacttaatattgcacaaaaagttgcaacgcatgaagatatgtatacagttggtattttctcactagagatgggtgctgatcagttagccacacgtatgatttgtagttctggtaatgttgactcaaaccgcttaagaacgggtactatgactgaggaagattggagtcgttttactatagcggtaggtaaattatcacgtacgaagatttttattgatgatacaccgggtattcgaattaatgatttacgttctaaatgtcgtcgattaaagcaagaacatggcttagacatgattgtgattgactacttacagttgattcaaggtagtggttcacgtgcgtccgataacagacaacaggaagtttctgaaatctctcgtacattaaaagcattagcccgtgaattagaatgtccagttatcgcattaagtcagttatctcgtggtgttgaacaacgacaagataaacgtccaatgatgagtgatattcgtgaatctggttcgattgagcaagatgccgatatcgttgcattcttataccgtgatgattactataaccgtggcggcgatgaagatgatgacgatgatggtggtttcgagccacaaacgaatgatgaaaacggtgaaattgaaattatcattgctaagcaacgtaacggtccaacaggcacagttaagttacactttatgaaacaatataataaatttaccgatatcgattatgcacatgcagatatgatgtaa

SEQ ID NO: 415817 - DNA, 447 bp, Staphylococcus aureus
atgaaagtaatttttacacaagatgttaaaggtaaaggtaaaaaaggtgaagttaaagaagtaccagtaggttatgcaaataacttcttattgaaaaagaattatgctgtagaagcaacaccaggtaaccttaaacaattagagttacagaaaaaacgtgcaaaacaagaacgccaacaagaaattgaagatgctaaagcattaaaagaaacgttatcaaacattgaagttgaagtatcagcaaaaactggtgaaggtggtaaattgtttggatcagtaagtacaaaacaaattgccgaagcactaaaagcacaacatgatattaaaattgataaacgtaaaatggatttaccaaatggaattcattccctaggatatacgaatgtacctgttaaattagataaagaagttgaaggtacaattcgcgtacacacagttgaacaataa

SEQ ID NO: 415818 - DNA, 1968 bp, Staphylococcus aureus
atgaatcggcagtccactaagaaagctttactaataccatttgtcatcatgatcatcacagcaattgttttaatgggtgtatggtttatctttaatagtcttatagcattaattgcatctatcgttcttgtcgtgatgattattgttagcatcattttattcagacaagctttaatgaaaatggatagttatgtagatggtttgagtgctcaaatttcaacaacaaataataaagcaatcaaacatttaccaattggtatcattgttttagatgaaaatgatcacatcgaatgggttaaccaatttatgacaaatcatatggaagcaaatgtcatttctgaatctgtaaatgaagtatttccaaacattttaaagcaattagatagagtgaaatccgttgaaatagaatataatcagtatcatttccaagtacgttattctgagaatgatcattgcctctatttctttgatataactgaacaagtacaaacaaatgaactatatgaaaattctaaaccaatcattgcgacattatttttagataactacgatgagattactcaaaatatgaatgatacgcagcgttcggaaatcaattcaatggtaacgcgtgttattagtcgatgggcaactgagtataatatattctttaaaaggtatagttccgatcaattcgtagcctatttaaatcaaaaaatattagctgacttagaagaatctaaatttgatatcttgagtcaattacgtgaaaaaagtgttggttatcgtgcccaattaacattaagtattggtgttggtgaaggtactgaaaatttaatcgatttaggtgaattatcacaatcaggcctagacttagcattagggcgcggtggcgaccaagttgcaattaaaagtattaatggtaatgtgcgtttctatggcggtaagactgacccgatggagaaacgtactcgtgtaagagcacgagtgatctcacatgcgttaaaagatatccttgcagagggtgacaaagtcattatcatgggacataaacgtcctgacttagatgcaattggtgcagcaatcggtgtgtctagatttgcaatgatgaataatttagaagcatacatcgtattaaatgagactgacattgatccaacattacgacgcgtgatgaacgaaattgataaaaagtcagagttaagagagcgatttataacatcagatgatgcttgggatatgatgacatctaagacaaccgtagtgattgttgatacgcataaaccggaactggttttagatgaaaatgtcttaaataaagcaaaccgtaaagttgttatcgatcatcatagacgtggtgaaagcttcatctctaatccattgttgatatatatggaaccatacgcaagttcaacagctgaattggtaacagagttactggaatatcaaccaacagaacaacgtttaacacgtcttgaatcaacagtgatgtatgcaggtattattgtagatacaagaaactttacattacgaacaggatcaagaacattcgatgcagcgagttatttacgtgcacatggtgcagatacgattttaacgcaacatttcttaaaagatgatgtggatacttacattaatcgatctgaattaattcgaactgtaaaagttgaagataatggcatagccattgcgcatggttcagacgataaaatttatcatccagtaacagttgcacaagcagcagatgaactgttaagtttagaaggtattgaagcatcatatgttgttgcgagacgtgaagataatctgattggtatatctgcgcgttcactcggttcagtaaatgttcagttaacaatggaagcacttggtggcggtggacatttaaccaatgctgcaacacaacttaaaggtgtgacagtcgaagaggcgatagcacaattacaacaagcaattacagaacaattaagtaggagtgaagatgcatga

SEQ ID NO: 415819 - DNA, 924 bp, Staphylococcus aureus
gtgttttcaaaaatacaacctaaagcaacaataattgcaacgattacgttggtatttgtcgctttagctttatatctagtgcctggtttgggactaatatttgcattatttgcaaccataccaggtatcgttttatggaataaatcaatacaatctttcggggttagtgcacttattacagtaattataacaactgttttaggtaatactttcgttttaagtgccatcatattagtcttaattgcaagtttaattattggtcaattgctcaaagaaagaacgtctaaagaaagaatgttatacgtaacaacagtagcgatgagcttaatttcattaatcgcttttatgttactacaaacattcggaaggattccaccatcagcgagcatagtaaaacctttcaagcaaacattacatgaagcgattacgatgagcggtgccgatgcgaatatgacccaaatattagaagaagggtttagacaagcgaccgttcaattaccaggtttcatcattatcattacatttttaatcgtcttaattaacttaatcgttacatttccggttttacgaaaatttaaaatcgctacacctgtatttaagccacttttcgcgtggcaaatgagcggtattttattatggatatacattattgttatcatatgtttattatttacaggtcaaccgagtgtgttccagagcattcttttaaacttccaacttgtgttatcattagtaatgtatattcaaggtttaagtgttattcatttctttggtaaagcgaaaggtttgccgaatgcagtaacgattttactattgattatcggtacaatactgacacctacgacacatattgtaggactacttggtgttatcgatttaagtttgaatttgaagcgaatcatgaaaaataattctaaaaagtga

SEQ ID NO: 415820 - DNA, 969 bp, Staphylococcus aureus
atgacaaattacacagtagatactttaaatctagggaaatttattacagaatctggggaagtcatagataacttgcgtttgagatatgagcatgttggttatcatggacaaccattagttgtagtttgtcatgcattaactggcaatcatttaacatatggaacagatgattatccgggttggtggcgagaaattattgatgggggatatatacccattcacgattatcaatttttaacatttgatgttattggtagtcctttcggttcaagttcacctttaaacgaccctcattttcctaaaaaattaacattaagagatatagtcagagcgaatgaacgaggtatacaagcccttggttatgataagattaatattttaatagggggaagtcttggaggtatgcaagcaatggaactactttacaatcaacagtttgaagtagataaagccattatccttgctgcaacaagtcgaacatcatcttatagtagagctttcaatgaaattgcaaggcaagccattcatcttggtggtaaggaaggtctaagtattgcacgccaattaggttttttgacatatcgatcatcaaaaagttatgatgaacgtttcacgccggatgaagtagtcgcataccaacaacatcaaggtaataaatttaaagaacattttgatttgaattgttatctgacactgctagatgtattggatagtcacaacattgaccgaggtcgcacagacgtaacgcatatttttaaaaatttagaaacgaaagtcttaacgatggggttcatagatgatttgctatatccggacgatcaagttcgtgcattaggtgaacgttttaaatatcatcgtcatttcttcgtgcctgataatgttggacatgatggattcctactaaactttagtacctgggcacctaacttatatcatttcttaaatttaaagcattttaagcgtaagtaa

SEQ ID NO: 415821 - DNA, 330 bp, Staphylococcus aureus
atgataactcatatgaacatgttaatacttattttattgtgtggtatcgtaacgctattaattcgaattataccttttatcatgatttcaaaagtgcaattgcctgatgttgtggttcgatggctatcatttatcccaatcacactatttacggcacttgtcattgacagcattattcaacaggcgcctcatggtgaggggtatacattaaacatcccttacattatcgcgctcattccgacggttattttatctataatcacgcgtagtttaactattacaattattagtgggattgttatcatggcaacattacgatttttcttttaa

SEQ ID NO: 415822 - DNA, 696 bp, Staphylococcus aureus
atggcaacacatttaagttttagacaaggcgtacaagagtgtatcccaacattattgggttatgccggtgttggtatttcatttggtattgtggcttcgtctcaaaactttagtattttagaaattatcttgttatgtcttgttatatatgccggtgctgcgcaatttattatgtgcgcgttgtttatagcaggtacaccgatatcagcgattgtactaactgtatttatcgtaaattcaagaatgttccttttaagtatgtcgcttgcaccaaacttcaagacatatgggttttggaaccgtgttggattaggttcattagtaactgacgaaacgtttggcgtcgccattacaccttatttaaaaggagaagctatcaatgatcgttggatgcatggtcttaatatcacagcatatttattttgggcaatttcatgtgtagctggggctttatttggcgaatatatctcaaatccgcaaacgctagggttagattttgctatcacggctatgtttatctttttggccattgcgcaatttgaatcaattactaaatcgcgattaagaatttacatagtactcattattgccgtcatagtaatgatgttatcgctaagtatgtttatgccttcatatctagcaatattaattgcagccacaatttcagcagcgttaggagtgatgatggaacaatga

SEQ ID NO: 415823 - DNA, 1287 bp, Staphylococcus aureus; identical to SEQ ID NO: 410325

SEQ ID NO: 415824 - DNA, 1515 bp, Staphylococcus aureus
atgactttatatttagatggtgaaacactaacaattgaggatattaaatcatttttacaacaacaatcaaagattgaaattattgatgatgcgttagaacgtgtcaaaaaaagtagagcggtagttgaacgtattattgaaaatgaggaaacggtttacggtatcactacaggttttgggttatttagtgatgtacgtatagacccgacgcaatataatgaattacaagtgaatctgatacgctcacatgcctgtggactaggtgagccattttcaaaagaagtagcattagtcatgatgattttacgattgaatacattattaaaaggtcattcaggtgccactttagaattagtgagacaattacaattttttataaatgaacgtattataccgataatcccacaacaaggctctctcggtgcatcaggagatttagcgccattatcacatttagcattagcattaattggtgaagggaaagtattgtacagaggggaagaaaaggatagtgacgatgtattaagagaattaaatagacaacctttgaaccttcaggctaaagagggtttagcattgattaatggtacgcaagctatgacagctcaaggtgtcattagttatatagaagcagaagatttaggttaccaatctgaatggattgctgcattaacgcatcagtctcttaatggcattatagatgcatatcgacatgatgtgcactctgttcgtaattttcaagaacagattaatgtggcagcgcgtatgcgtgattggttagaaggatcaacattaacgacgcgacaagcagaaatacgtgtacaagatgcatatacgttgcgttgtataccacaaatccatggcgcgagttttcaagtattcaattatgttaaacagcaattagaatttgaaatgaatgcggctaatgataatccacttatatttgaggaagcaaatgaaacgtttgttatttcaggtggtaacttccatggacaacctattgcttttgcattagatcatcttaaattaggtgtaagtgaattagcaaacgtatcggaacgtcgtctagagcgactagtaaatcctcaattaaatggtgatttaccagcatttcttagtccagagccaggattgcaaagtggcgcgatgattatgcaatatgctgctgcaagtctcgtttctgaaaataaaactttagcgcatccagcgagtgttgattctatcacttcatctgcgaaccaagaagatcacgtatctatgggaactacagctgctagacatggttatcaaattattgaaaatgcaagacgtgtgttggcaatcgaatgtgttattgcattacaagcagcagagttgaaaggtgtcgaaggattatcaccaaaaacacgtcgtaaatatgaggagtttcgaagtatcgtgccatccattacacatgaccgtcaatttcataaagatattgaagcggttgcacagtatttaaagcaatcaatttatcaaacgactgcatgtcactaa

SEQ ID NO: 415825 - DNA, 813 bp, Staphylococcus aureus
atggaaacgttaaattctattaacattcctaagcgtaaagaagattcacataaaggtgattatggcaaaattttattaattggtggatctgctaacttaggtggtgccattatgttagcggctcgtgcatgtgtatttagcggtagtggtttaatcactgtagctacacatccaacaaatcattcagcattacattctcgttgcccagaagcgatggttattgatattaatgatacgaaaatgttgacgaaaatgattgaaatgactgacagtatactaattggtccaggtcttggcgttgatttcaaaggaaataatgccattacattcctactacaaaatatacaaccgcatcaaaatttaatcgtagacggcgatgcgattacaatctttagtaaactgaaaccgcaattacctacatgtcgtgtgatctttactccacacctcaaagaatgggaacgattaagtggtattcctattgaggaacagacatatgagcgtaatcgtgaagcagttgatcgtttaggtgcaactgttgtacttaaaaaacatggtactgaaattttctttaaagatgaagactttaaattaacaatcggtagcccagcaatggcgactggtggtatgggcgatacacttgctggtatgattacaagttttgtcggtcaatttgataacttaaaagaagcggttatgagtgccacatatacacatagttttattggcgaaaaccttgcaaaagatatgtatgtggtaccaccatcaagacttatcaatgaaataccttacgcaatgaaacaattagaaagttaa

SEQ ID NO: 415826 - DNA, 2670 bp, Staphylococcus aureus
atggctgaattacctcaatcaagaataaatgaacgaaatattaccagtgaaatgcgtgaatcatttttagattatgcgatgagtgttatcgttgctcgtgcattgccagatgttcgtgacggtttaaaaccagtacatcgtcgtatactatatggattaaatgaacaaggtatgacaccggataaatcatataaaaaatcagcacgtatcgttggtgacgtaatgggtaaatatcaccctcatggtgacttatctatttatgaagcaatggtacgtatggctcaagatttcagttatcgttatccgcttgttgatggccaaggtaactttggttcaatggatggagatggcgcagcagcaatgcgttatactgaagcgcgtatgactaaaatcacacttgaactgttacgtgatattaataaagatacaatagattttatcgataactatgatggtaatgaaagagagccgtcagtcttacctgctcgattccctaacttgttagccaatggagcatcaggtatagcggtaggtatggcaacgaatattccaccacataacttaacagaattaatcaatggtgtacttagcttaagtaagaaccctgatatttcaattgctgagttaatggaggatattgaaggtcctgatttcccaactgctggacttattttaggtaagagtggtattagacgtgcatatgaaacaggtcgtggttcaattcaaatgcgttctcgtgcagttattgaagaacgtggaggcggacgtcaacgtattgttgtcactgaaattcctttccaagtgaataaggctcgtatgattgaaaaaattgcagagctcgttcgtgacaagaaaattgacggtatcactgatttacgtgatgaaacaagtttacgtactggtgtgcgtgtcgttattgatgtgcgtaaggatgcaaatgctagtgtcattttaaataacttatacaaacaaacacctcttcaaacatcatttggtgtgaatatgattgcacttgtaaatggtagaccgaagcttattaatttaaaagaagcgttggtacattatttagagcatcaaaagacagttgttagaagacgtacgcaatacaacttacgtaaagctaaagatcgtgcccacattttagaaggattacgtatcgcacttgaccatatcgatgaaattatttcaacgattcgtgagtcagatacagataaagttgcaatggaaagcttgcaacaacgcttcaaactttctgaaaaacaagctcaagctattttagacatgcgtttaagacgtctaacaggtttagagagagacaaaattgaagctgaatataatgagttattaaattatattagtgaattagaaacaatcttagctgatgaagaagtattactacaattagttagagatgaattaacagaaattcgagatcgtttcggtgatgatcgtcgtactgaaatccaattaggtggatttgaagatttagaagatgaagatctcattccagaagaacaaattgtaattacactaagccataataactacattaaacgtttgccggtatctacatatcgtgctcaaaaccgtggtggtcgtggtgttcaaggtatgaatacattggaagaagattttgtcagtcaattggtaactttaagtacacatgaccatgtattgttctttactaacaaaggtcgtgtatacaaacttaaaggttatgaagtgcctgagttatcaagacagtctaaaggtattcctgtagtgaatgctattgaacttgaaaatgatgaagtcattagtacaatgattgctgttaaagaccttgaaagtgaagacaacttcttagtgtttgcaactaaacgtggtgtcgttaaacgttcagcattaagtaacttctcaagaataaatagaaatggtaagattgcgatttcgttcagagaagatgatgagttaattgcagttcgcttaacaagtggtcaagaagatatcttgattggtacatcacatgcatcattaattcgattccctgaatcaacattacgtcctttaggccgtacagcaacgggtgtgaaaggtattacacttcgtgaaggtgacgaagttgtagggcttgatgtagctcatgcaaacagtgttgatgaagtattagtagttactgaaaatggttatggtaaacgtacgccagttaatgactatcgtttatcaaatcgtggtggtaaaggtattaaaacagctacgattactgagcgtaatggtaatgttgtatgtatcactacagtaactggtgaagaagatttaatgattgttactaatgcaggtgtcattattcgactagatgttgcagatatttctcaaaatggtcgtgcagcacaaggtgttcgcttaattcgcttaggtgatgatcaatttgtttcaacggttgctaaagtaaaagaagatgcagaagatgaaacgaatgaagatgagcaatctacttcaactgtatctgaagatggtactgaacaacaacgtgaagcggttgtaaatgatgaaacaccaggaaatgcaattcatactgaagtgattgattcagaagaaaatgatgaagatggacgtattgaagtaagacaagatttcatggatcgtgttgaagaagatatacaacaatcatcagatgaagatgaagaataa

SEQ ID NO: 415827 - DNA, 1935 bp, Staphylococcus aureus
atggtgactgcattgtcagatgtaaacaacacggataattatggtgctgggcaaatacaagtattagaaggtttagaagcagtacgtaaaagaccaggtatgtatataggatcgacttcagagagaggtttgcaccatttagtgtgggaaattgtcgataatagtatcgatgaagcattagctggttatgcaaataaaattgaagttgttattgaaaaagataactggattaaagtaacggataacggacgtggtatcccagttgatattcaagaaaaaatgggacgtccagctgtcgaagttattttaactgttttacatgctggtggtaaattcggcggtggcggatacaaagtatctggtggtttacatggtgttggttcatcagttgtaaacgcattgtcacaagacttagaagtatatgtacacagaaatgagactatatatcatcaagcatataaaaaaggtgtacctcaatttgacttaaaagaagttggcacaactgataagacaggtactgtcattcgttttaaagcagatggagaaatcttcacagagacaactgtatacaactatgaaacattacagcagcgtattagagagcttgctttcttaaacaaaggaattcaaatcacattaagagatgaacgtgatgaagaaaacgttagagaagactcctatcactatgagggcggtattaaatcgtacgttgagttattgaacgaaaataaagaacctattcatgatgagccaatttatattcatcaatctaaagatgatattgaagtagaaattgcgattcaatataactcaggatatgccacaaatcttttaacttacgcaaataacattcatacgtatgaaggtggtacgcatgaagacggattcaaacgtgcattaacgcgtgtcttaaatagttatggtttaagtagcaagattatgaaagaagaaaaagatagactttctggtgaagatacacgtgaaggtatgacagcaattatatctatcaaacatggtgatcctcaattcgaaggtcaaacgaagacaaaattaggtaattctgaagtgcgtcaagttgtagataaattattctcagagcactttgaacgatttttatatgaaaatccacaagtcgcacgtacagtggttgaaaaaggtattatggcggcacgtgcacgtgttgctgcgaaaaaagcgcgtgaagtaacacgtcgtaaatcagcgttagatgtagcaagtcttccaggtaaattagccgattgctctagtaaaagtcctgaagaatgtgagattttcttagtcgaaggggactctgccggggggtctacaaaatctggtcgtgactctagaacgcaggcgattttaccattacgaggtaagatattaaatgttgaaaaagcacgattagatagaattttgaataacaatgaaattcgtcaaatgatcacagcatttggtacaggaatcggtggcgactttgatctagcgaaagcaagatatcacaaaatcgtcattatgactgatgccgatgtggatggagcgcatattagaacattgttattaacattcttctatcgatttatgagaccgttaattgaagcaggctatgtgtatattgcacagccaccgttgtataaactgacacaaggtaaacaaaagtattatgtatacaatgatagggaacttgataaacttaaatctgaattgaatccaacaccaaaatggtctattgcacgatacaaaggtcttggagaaatgaatgcagatcaattatgggaaacaacaatgaaccctgagcaccgcgctcttttacaagtaaaacttgaagatgcgattgaagcggaccaaacatttgaaatgttaatgggtgacgttgtagaaaaccgtagacaatttatagaagataatgcagtttatgcaaacttagacttctaa

SEQ ID NO: 415828 - DNA, 1113 bp, Staphylococcus aureus
atgaagttaaatacactccaattagaaaattatcgtaactatgatgaggttacgttgaaatgtcatcctgacgtgaatatcctcattggagaaaatgcacaaggaaagacaaatttacttgaatcaatttataccttagctttagcaaaaagtcatagaacgagtaatgataaggaactcatacgttttaatgctgattatgctaaaatagaaggtgagcttagttatagacacggcacgatgccattaacaatgtttataactaaaaaaggtaaacaagtcaaagtgaatcacttagagcaaagtcgtctaactcaatatattggacacctcaatgtggttctatttgcgccagaagatttgaatattgtaaaaggctctcctcaaataagacgacgctttatagatatggagttgggccaaatttctgctgtttacttaaatgatttagctcaataccaacgtattttaaagcaaaagaataattacttaaagcagttacaattaggccaaaaaaaggacttaacaatgttggaagtattaaatcagcagtttgctgaatatgcaatgaaagtaactgataaacgtgcacattttattcaagagctagagtcgttagctaaaccgattcatgctggtatcacaaatgataaagaagtgttgtcgctaaattatttacctagtcttaaatttgattatgctcaaaatgaagcggcacgacttgaagaaattatgtctattcttagcgataatatgcaaagagaaaaagaacgaggcattagcttattcggaccacatcgagatgatataagttttgatgtgaatggcatggatgctcaaacatatggttctcaaggacagcaacgtacaacggctttgtccattaaattagctgaaattgagttaatgaatatcgaagttggggaatatcccatcttattattagacgatgtactcagtgaattagatgattcgcgtcaaacgcatttattaagtacgattcagcataaagtacaaacatttgtcactacgacatctgtagatggtattgatcatgaaatcatgaataacgctaaattgtatcgtattaatcaaggtgaaattataaagtaa

SEQ ID NO: 415829 - DNA, 237 bp, Staphylococcus aureus; identical to SEQ ID NO: 405562

SEQ ID NO: 415830 - DNA, 1134 bp, Staphylococcus aureus
atgatggaattcactattaaaagagattattttattacacaattaaatgacacattaaaagctatttcaccaagaacaacattacctatattaactggtatcaaaatcgatgcgaaagaacatgaagttatactaactggttcagactctgaaatttcaatagaaatcactattcctaaaactgtagatggcgaagatattgtcaatatttcagaaacaggctcagtagtacttcctggacgattctttgttgatattataaaaaaattacctggtaaagatgttaaattatctacaaatgaacaattccagacattaattacatcaggtcattctgaatttaatttaagtggcttagatccagatcaatatcctttattacctcaagtttctagagatgacgcaattcaattgtcggtaaaagtgcttaaaaacgtgattgcacaaacgaattttgcagtgtccacctcagaaacacgcccagtactaactggtgtgaactggcttatacaagaaaatgaattaatatgcacagcgactgactcacaccgcttggctgtaagaaagttgcagttagaagatgtttctgaaaacaaaaatgtcatcattccaggtaaggctttagctgaattaaataaaattatgtctgacaatgaagaagacattgatatcttctttgcttcaaaccaagttttatttaaagttggaaatgtgaactttatttctcgattattagaaggacattatcctgatacaacacgtttattccctgaaaactatgaaattaaattaagtatagacaatggggagttttatcatgcgattgatcgtgcctctttattagcacgtgaaggtggtaataacgttattaaattaagtacaggtgatgacgttgttgaattatcttctacatcaccagaaattggtactgtaaaagaagaagttgatgcaaacgatgttgaaggtggtagcctgaaaatttcattcaactctaaatatatgatggatgctttaaaagcaatcgataatgatgaggttgaagttgaattcttcggtacaatgaaaccatttattctaaaaccaaaaggtgacgactcggtaacgcaattaattttaccaatcagaacttactaa

SEQ ID NO: 415831 - DNA, 1362 bp, Staphylococcus aureus
atgtcggaaaaagaaatttgggaaaaagtgcttgaaattgctcaagaaaaattatcagctgtaagttactcaactttcctaaaagatactgagctttacacgattaaagatggtgaagctatcgtattatcgagtattccttttaatgcaaattggttaaatcaacaatatgctgaaattatccaagcaatcttatttgatgttgtaggctatgaagttaaacctcactttattactactgaagaattagcaaattatagtaataatgaaactgctactccaaaagaaacaacaaaaccttctactgaaacaactgaggataatcatgtgcttggtagagagcaattcaatgcccataacacatttgacacttttgtaatcggacctggtaaccgctttccacatgcagcaagtttagctgtagccgaagcaccagccaaagcgtacaatccattatttatctatggaggggttggtttaggaaaaacccatttaatgcatgccattggtcatcatgttttagataataatccagatgccaaagtgatttacacatcaagtgaaaaattcacaaatgaatttattaaatcaattcgtgataacgaaggtgaagctttcagagaaagatatcgtaatatcgacgtcttattaatcgatgatattcagttcatacaaaataaagtacaaacacaagaagaatttttctatacttttaatgaattgcatcagaataacaagcaaatagttatttcgagtgatcgaccaccaaaggaaattgcacaattagaagaccgattacgttcacgctttgaatgggggctaattgttgatattacgccaccagattatgaaactcgaatggcaattttgcagaagaaaattgaagaagaaaaattagatattccaccagaagctttaaattatatagcaaatcaaattcaatctaatattcgtgaattagaaggtgcattaacacgtttacttgcatattcacaattattaggaaaaccaattacaactgaattaactgctgaagctttaaaagatatcattcaagcaccaaaatctaaaaagattaccatccaagatattcaaaaaattgtaggccagtactataatgttaggattgaagatttcagtgcaaaaaaacgtacaaagtcaattgcatatccgcgtcaaatagctatgtacttgtctagagagcttacagatttctcattacctaaaattggtgaagaatttggtgggcgtgatcatacgaccgtcattcatgctcatgaaaaaatatctaaagatttaaaagaagatcctatttttaaacaagaagtagagaatcttgaaaaagaaataagaaatgtataa

SEQ ID NO: 415832 - DNA, 138 bp, Staphylococcus aureus; identical to SEQ ID NO: 405565

SEQ ID NO: 415833 - DNA, 348 bp, Staphylococcus aureus; identical to SEQ ID NO: 405566

SEQ ID NO: 415834 - DNA, 1380 bp, Staphylococcus aureus
atggatttagatacaattacgagtatttcaacaccaatgggtgaaggggcaattggaattgttcgattgtctggaccgcaagccgttgaaattgctgacaaattatataaaggaaaacatcttttaaatgatgttccatcacatacgattaattacggtcatattattgatccagagtctaaagaagtggttgaagaagttatggtgtctgtgttaagagcgccaaaaacatttacacgcgaagatattatagaaattaattgtcatggtggtattttaacgattaatagagtgctggaacttactatgacatatggcgctagaatggctgagccaggtgaatttacaaaacgtgcctttttaaatggtcgtattgatttatctcaagctgaagcagttatggactttattcgctcgaagacagatagagcttctaaagttgcgatgaatcaaattgaaggtcgtctaagtgacttaatcaaaaaacaacgtcaatctatattagagatactcgctcaagtggaagtgaatattgattatcctgaatacgatgatgttgaagatgcgactactgaatttcttttagagcagtctaaagaaatcaaacaggaaattaatcgtttattagataccggtgcgcagggcaaaattatgcgtgaaggtttatctacagttattgttggtaaaccaaacgtaggtaaatcatcgatgttaaataatttaatacaagataataaagcgattgtaactgaggtagcaggtactacaagagatgtcttagaagagtacgtcaatgttcgtggcgtgccattaagattagttgacactgctggtatacgcgagacagaagatatagtagagaagattggtgttgaacgctctagaaaggctcttagccaagcagacttaattttatttgtattaaacaataacgaagcattgactcaagaagattacacattatatgaagtggttaaaaatgaagatgtaatcgtaattgttaataaaatggatttagagcaaaacatagatattaatgaagttaaagatatgataggtgatacgccattaattcaaacttcaatgttaaaacaagaaggtattgatgaattagaaatacaaattcgagatttgttctttggtggagaagtacaaaatcaagatatgacttatgtttctaattcaagacatatttcattattaaaacaagcaagacaaacgatacaagatgcgattgatgcagcagaatctggtgtgcctatggatatggtacaaattgatttaactagaacttgggaaatattaggagaaattattggtgagactgcaagtgatgaactcatcgatcagttattcagtcaattctgcttaggtaaatag

SEQ ID NO: 415835 - DNA, 1878 bp, Staphylococcus aureus
gtggttcaagaatatgatgtaatcgttataggtgcgggacatgcaggtgtagaagcaggtttagcatctgcaagacgtggtgctaaaacattaatgctaacaataaatttagataatattgcatttatgccatgtaacccatctgtaggtggaccagctaaaggcatcgttgttcgtgaaattgatgctttaggtggacaaatggcaaaaacaatcgataaaacacacattcaaatgagaatgttaaatacaggtaaaggacctgctgtaagagcactaagagcgcaagcagataaagtactttatcaacaagaaatgaaacgcgtgattgaagatgaagaaaatttgcatataatgcaaggtatggtagacgaacttattatagaagataatgaagttaaaggtgtacgtacaaatattggtacagagtatttatctaaagcagtaattattacaacgggaacatttttacgtggtgaaatcattttaggtaatatgaagtattcaagtggaccaaatcaccaattaccatcaatcacattatcagacaatttaagagaacttggttttgatattgttcgttttaaaacaggtacaccaccgcgtgtaaattcaaaaacaattgactattcgaagactgaaatacaaccaggtgacgatgtaggtcgtgcattcagctttgaaacaacagaatatatattagatcaattgccatgttggctaacgtatactaatgctgaaacacacaaagttatcgatgataatttacatctatctgcaatgtattcagggatgattaaaggaaccgggccacgttattgcccttcaattgaagataaatttgttcgatttaatgataagccgcgacatcaacttttcttagagcctgaaggtcgtaatacaaatgaagtatatgtgcaaggattgtctacaagtcttcctgaacatgtgcaacgtcaaatgttagagacgataccaggtcttgaaaaagcagatatgatgcgtgccggctacgcaattgaatatgatgcgattgtgccaacgcagttatggcctacacttgaaacgaaaatgattaaaaacttatatactgcaggtcaaattaatggtacatctggttatgaagaagcagcaggacaaggattgatggcaggtattaacgctgcaggtaaagtgttaaacacaggcgaaaagatattaagtcgttcagatgcatatattggtgtcttaatcgatgatcttgtaactaaaggtactaatgaaccttatcgtttactaacatcacgtgcagaatatcgtttgttactacgtcatgataatgctgatttgagattgacggatatgggatatgaacttggtatgatttctgaagaacgatatgcacgttttaatgaaaaacgtcagcaaattgatgcggaaattaagcgtttatcagatattcgtattaaaccaaacgaacatacgcaagcgattatcgaacaacatggtggttctcgcttaaaagatggtattttagctatcgatttattacgcagacctgaaatgacttacgatataattttagaaattttagaagaagaacatcaattgaatgcagatgttgaagaacaagtagaaatacaaacaaaatatgaaggttatatcaataaatcactacaacaagttgagaaagttaagcgtatggaagagaagaaaattccagaagacttagattatagtaagattgatagtttggcgactgaagcgcgagaaaaattatcagaagtaaaacctttaaatattgcacaagcttctagaatatcaggggtaaatccagcagacatatctatattattgatttacttagaacaaggtaaactccaaagggtgagtgactaa

SEQ ID NO: 415836 - DNA, 720 bp, Staphylococcus aureus
atgactgtagaatggttagcagaacaattaaaagaacataatattgaattaactgagactcaaaaacaacagtttcaaacatattatcgtttacttgttgaatggaatgaaaagatgaatttgacaagtattacagatgaacacgatgtatatttgaaacatttttatgattccattgcacctagtttttattttgattttaatcagcctataagtatatgtgatgtaggcgctggagctggttttccaagtattccgttaaaaataatgtttccgcagttaaaagtgacgattgttgattcattaaataagcgtattcaatttttaaaccatttagcgtcagaattacaattacaggatgtcagctttatacacgatagagcagaaacatttggtaagggtgtctacagggagtcttatgatgttgttactgcaagagcagtagctagattatccgtgttgagtgaattgtgtttaccgctaattaaaaaaggtggacagtttgttgcattaaaatcttcaaaaggtgaagaagaattagaagaagcaaaatttgcaattagtgtgttaggtggtaacgttacagaaacacatacctttaaattgccagaagatgctggagagcgccagatgttcattattgataaaaaaagacagacgccgaaaaagtacccaagaaaaccagggacgcctaataagactcctttacttgaaaaataa

SEQ ID NO: 415837 - DNA, 840 bp, Staphylococcus aureus
atgaaaaaacctttttcaaaattatttggtttgaaaaacaaagatgacatcattggacatattgaagaagatcgcaatagtaatgttgaatccattcaaattgaacgtatcgttcccaaccgttatcaaccaagacaggtgtttgaaccaaataaaattaaagaacttgctgaatcaatacatgaacatggtttactacaacctattgttgtaagaccgattgaagaagatatgtttgaaattattgctggagagcgccgatttagagcaatacaatcactaaatttacctcaagcagacgttattattcgtgatatggatgatgaagagacggctgttgttgcattaattgagaatattcaaagagaaaatttgtctgttgttgaagaagcggaagcctataagaaattattggaaattggtgatacaacgcaaagtgaattggcaaaaagtttaggtaaaagtcaaagctttattgcaaataagttgcgtttattgaagttggcgccgaaagtactacttcgcttaagagaaggtaaaattactgaacgccatgcgagagcggtattatcattgtctgatagtgaacaagaagcgttgattgagcaagtcattgcacaaaaactaaatgtgaaacagactgaagatagagtacgccaaaaaacggggcccgaaaaagtcaaagcacaaaaccttcgctttgcacaagatgtcactcaagcacgagatgaggtaggcaaaagtatccaagcgattcaacaaacaggactacatgttgagcataaagacaaagatcatgaagattattatgaaataaaaattcgaatatataaacgttag

SEQ ID NO: 415838 - DNA, 354 bp, Staphylococcus aureus
atgttttcaattggaagtgcaattcttcattttgtcattggtggtatcgctgttgcattagcttcaattattgctgataaggtaggtggtaagttaggaggtattatagctactatgccggcagtctttcttgcggctattatcgcattagctttagatcatcgtggtacgcaattagtggagatgtcgatgaatcttagtactggagcaattgtcggtattctgtcttgtatattaactgtatttttgacatctctctatattaagcataaaggttatcggaaaggcgcaatattcacagttgtttgttggtttgttatttccctcgcaatattcagtattagacatttatag

SEQ ID NO: 415839 - DNA, 396 bp, Staphylococcus aureus
atgaaattaacattaatgaaattttttgtggggggatttgcagtattattaagttatattgtatctgtaacactaccttggaaagaatttggcggtatatttgcaacgtttccggcagtatttttagtgtctatgtttattacaggtatgcaatatggtgataaagtcgctgtgcatgtaagtcgtggcgcagtgtttggtatgacaggggtattagtttgtattttagttacatggatgatgttacatatgacgcacatgtggttgattagcattattgttggtttcctaagctggttcatcagtgcagtatgtatttttgaagcggtagaatttatagcacaaaaaagattagaaaagcatagttggaaagctggaaaatcgaatagtaaatag

SEQ ID NO: 415840 - DNA, 201 bp, Staphylococcus aureus; identical to SEQ ID NO: 405574

SEQ ID NO: 415841 - DNA, 192 bp, Staphylococcus aureus
atgaaatttagagaattagtaaaacaatcatacgaggatttgaaaaatttgactgtaacttggtataacgtgattgctttagcaatgattgttattgtcttaagcgtagttacaacaccaattataggtattccagctggtttattaggtggcgcttattatttaaaacgtcgtgaagaaaaaggtaaataa

SEQ ID NO: 415842 - DNA, 1881 bp, Staphylococcus aureus; identical to SEQ ID NO: 408115

SEQ ID NO: 415843 - DNA, 759 bp, Staphylococcus aureus; identical to SEQ ID NO: 412700

SEQ ID NO: 415844 - DNA, 513 bp, Staphylococcus aureus
atggaaaaaggaaatcaaggtattaaatggtctagtttaataatgggtgtattattattaatgttggcagtcgttatttttacatttccaattgaaaatttttatgctattacctggttgattggactgtttgtattaattaacggtgtgattcaaatcatttaccgtagaaaagcaaaagctttagtaggtggtaaccaaaattggattctgtttatggggattgtagatattctctttggtcttattgtcatttttaatgttggcgctagctcggcattttttatctacatgtttgcattctggttcatttttagttctattgcaggattatttacgtttacgggtagtggtagcttaaaactaatttcagtgatttttaatttattaggtattgttttcggtgtcattttattatttaatccattaatgggtatcgtctttatttcgacgatgattgctattgcatttgtattcgtaggtgtcatttatgttgtagatgcacttgcttaa

SEQ ID NO: 415845 - DNA, 795 bp, Staphylococcus aureus
atgaatattgcgaagttagagaattatttacaaattgattcatctcgttataatcgaccgagtattgaagcattaaattattatgcaacacgttttatgttaactgtaccttttgaaaatattgatgttcaaaatagtaagccgatatctataaatatcgatgcactttttaataaaattgttcatgataaacgtggtggtttttgttatgagttaaatacatttttcaaagcatatttacaacaaaaaggatttaatcctgaattaatgtcagctactattcacacacccggtggcggtcgtagtctgaacggttcacatgcttcacttgttgtttctataaatgatgtattctatgtaactgatgttggctttggagacttacctctacatgccattcctattacttcatctgagcatacacaaccaattactgatatcagtggtacattccgcgctatttttaacaacgaagacaaggatattttctatgttcaaaaattcgaaaatgatcattggcatacaaaatatgaagctgaattcaaacctaaacaaatagaagattttaatagcaacatcgaatataatcaaacgcatccagattcaatatttgtacagcatttattaattacaatgccacaatcatttggccgtgctacaatgtctgaaaatcatttaactttaacaaggaatggtagctcagaaaaatttgatgtcactaaagataactataaacattttttagaaaaatattttggactaaatgtaactattaatcgtattgaaaaacaataa

SEQ ID NO: 415846 - DNA, 1017 bp, Staphylococcus aureus
ttgactgtttttaaaaatgagcgcttaagctggttaccatacatagctattgtcattttgttacacgttattgggtttagttttttatggattgctggaaaagaccatcatatcttatttggtatggggattcttgcatacacattaggtttgcgtcatgcatttgatgcagatcatatcgccgcgatagacaataccgttcgtaaattattacaacaacgcaaagatccatctggtgtgggtttctatttttcaattggacattcatctgttgtatttttaatggctgtttttttagggatatctgtaaaatgggctaaagatgaattaccacatttccaagatattggtggaacgattggtacactagtttcaggtttctttttagtgcttatcggtgtgttgaatctaattattttaatctctttaattaacttgttcgctaaattacgtcgtgaacacattgaagaagctgaagtcgatgtattacttgaatctagaggatttgtttctcgatttgtaggaccttatttcaagttaatcacgcgtagttggcacgtattgccacttggctttttatttggacttggttttgatacagctagtgaaattgcgttactcgctctttcttcaggcgcatcacaacaagccatttcatttatcggaatcttatctttaccaattttattcgcatcaggtatgagtttattggatacattagatggtgttgtaatgaagtatgcctataattgggcattcttcaatcctattcgcaaaatctattacaatataacgattactgcgatatcagtcatggcagcattagtgattgggatgattgaattgctacaaattcttgctgataagctagatttacatggtgcgttttgggcattcattggttcgatcgaatttgattatttaggctatattttagttgcattatttttaattacttggcttatttcaagtttaatttggaagtttggtcgcatagaacacaaatggtctaaataa

SEQ ID NO: 415847 - DNA, 576 bp, Staphylococcus aureus
atgactttacctaaaattggaaagcctgcaacacgcgcgctaaattcacaaggtatatacacattagaagcagtatcacaatatacgaagtcatctctaatggagatgcatggcgttggtcctaaagctatatcaatattggaacaagctttatttcagcaccaactacattttaaaacggaagttcagtcatcattaccttttaagttaacaggagatgtgtcatgcaatcatgcgcctaaacgtcaacaaatgatagattttatagttgctacagcagcattagatattgaattattacgttcactggttacaacagaatttatttggtctgtgcctggacactttgacatttatggacctcaaattttaattcaagaactatctaactattacaatcaggttgctagtctcaatatccactccaacatcacacatgggtgcttaggttccatgcatggtattgaaatattaaaaactggtaaagagattcattttgctcatttttttgaatttgaaaatcataaaaaggatgccaagttaagcaaagtgacatcttacattgttgttgcttaa

SEQ ID NO: 415848 - DNA, 909 bp, Staphylococcus aureus
gtgaatatagaatataaaaaaggtatatttttagcactcagtgcatacattctgtggggaatactacctatatattggcagttcgttgatgcaataggcgcatttgaaattttagcctttcgtattatattttcagcaatattcatgatattcatactcgcggttggacaaaaacaacgcaatgcatttcaacgagatatgaatcaattgttaggcaagcccattcagctattagcgattgtcgtagcaggctatgtcattacattaaattggggtacatttatttgggctgtaacgaacggtcacgtcctacaaacaagtttaggttattatataaatccacttgttagcattttgctcgcacttatctttttaaaagaaagattcaataaatttgaatggctagccattttattcgcattcatcggtgtattatatatgacgctcaagattggagaattcccaatcgtttctattatattagcgttatcctttggtacatatggattattgaaaaaagtagtacatattgatgccatcagcagtattacgattgaatgtattgttacagcacctgctggactaatatacgttatttatttatggcagcaacatcagatgtcatttggattgaacatgtcatcattttggttgttattttctggtgctattacggcaataccactaatcctattctcagccggggcaaaacgtattccactttcgctaataggatttattcaatacgttggaccaacaataatgtttgtactcggcatatttgttttcaaagagccttttagtatagatcaattaattacgtttatatttatttggacaggtattgtgttatatagtctttctcaatacattaaattgaagaaacatccggtcgcaaaaaccctataa

SEQ ID NO: 415849 - DNA, 1419 bp, Staphylococcus aureus
atggaaaacacggttaaatatcgtaagtttatactccctatcgttgtaggtctccttatttgggcacttacaccttttaaaccggatgctgtggatccaacagcatggtatatgttcgcaatattcgtcgcgacaatcattgcttgtattacacaaccgatgccaattggggccgtctctataattggatttacaatcatggtactcgttggcattgttgacatgaaaacggctgtcgctggttttggtaataatagcatttggttaattgctatggcatttttcatttcgagaggatttgtgaaaacaggtcttggtagacggatcgcacttcatttcgtcaaattatttggtaaaaaaacattaggcttagcatattctatcgtcggtgtagatttaattctagcgcctgctacaccgagtaataccgcgcgtgctggtggaatcatgttcccaattatcaaatcactttctgaatcatttggttcgaaaccgaaagacggatcagcacgcaaaatgggtgcatttcttgttttcacagaattccaaggtaatttaattactgcggctatgtttttaactgcaatggccggtaacccccttgcacaaaatttagcatctagcacatctaatgttcacattacatggatgaattggttcctagctgctttagttcctggacttgtttccttaattgttgtaccttttattatttataaaatttatccaccaactgttaaagaaacaccaaatgctaagagttgggctgaaaatgaattagcgactatgggtaaaatcgctttagctgaaaaatttatgattggtatttttgtcattgctctaacattatggattgtcggaagtttcattcatattgatgcaactttaacggcctttattgcgctagcattgttattattgacaggtgtcttaacatggcaagacattttaaacgaaacaggtgcttggaacacattagtatggttctcagtattagtgttaatggccgaccaattaaacaagcttggatttattccttggttaagtaaatccattgctacaagtcttggtggcttaagctggcctatagtactggtcattttaatattgttctacttctattcacattacttatttgcaagttctacagcacatatcagtgcgatgtatgcagcattactaggcgttgccatcgcagccggtgcaccaccattattcagtgcattaatgttaggtttcttcggtaacctattagcttcaacaacacactatagtagtggtccagcgccgattctattctcttcaggttacgtgactcaaaaacgttggtggacaatgaacttgatcttaggtttcgtctactttattatctggattggtttaggatcactttggatgaaagtaattggtatattttaa

SEQ ID NO: 415850 - DNA, 465 bp, Staphylococcus aureus
atgactacaaaaacagtatttgatgtcattgatatggggttaggatatttagtaaatgtgtatgatgcttggaaagttgaaaaggtacttgatgattatcatgagcctttttctaataccattcattggcaatttgggcatgtattaacaatttttgaatcggccttagctgttgctggtaaagagaatattgatttaaatatctatagacctttattcggaaatggttcgtctccagatgaatggaaggatgaagtaccgagtattgaaaagattttagaaggtctccaaacattacctgaacgtgcacgaaatctaactgaagatgatttagcaattgaattgaaacaaccaattgttggttgtaataacttagaagagttattagtattaaataccattcacatcccacttcatgctggtaaaattgaagagatgtctcgtatattaaaaaatttaaaataa

SEQ ID NO: 415851 - DNA, 339 bp, Staphylococcus aureus
atgtcagtgtcagatcagattatgaaaggtctcttagatggggcgatattaggtctcattgcccaaggcgaaacgtatggatatgaaattatgacgaaacttaagaatcaagagtttccagagataagtgagggtagtatttatccagttttaatgcgtttaaacaaaaaaggatacgttgatacgacaataaaaaaatctagtaatggcggcccgaggcggaaatactatacgattaccgattcaggtttaaaggaactaaaagtatttaaatcaaaatggcaagctttgaataaagggatgattaacttgtttggaggggaaaacgatgttaactaa

SEQ ID NO: 415852 - DNA, 768 bp, Staphylococcus aureus
atgttaactaaacaatctcaagattttttagaaaaattacgtgttgaattgttatttagaggtaagactgaagcagaagtagaagagttattggaagagctcgaagatcatttaactatggctgaaaaaaataacgaagatacaagttcaattattaatacaccgattaagtcaatggctgatcaattatcacctgagataagtcttactaccggtttgtataaatatattactttgtacttctcttttatattagcagtcattataattcctaggtttttagatttgggtacatttgatgtgacaattgcatttttactttatatagctagtatcgttattttaggtgttgtcattggtatgctgattctacgcaatacattagtccgatttggtgaccaaaaaataacgtatgttataaatgtgacttatggaattgtcgtatttttatggatgatttttggtggtttgattattaaaaaatatcctatctatagtttctttgagttaagtgacaaacagagtttcatcgttgggttagtacttttaattgcgcttattgtaatttgtattttaattaaacagaaaatttatgcgctcatcgtgttggtaatttcattgccaagtttgatagcaaggatagcagctatctttagtaaagaaccagacacttttaatttagtttcagtaagtatactcatcattctaaatatagcatttattatttatacatttgtaaattttaggaagttaaaaaaagaagactaa

SEQ ID NO: 415853 - DNA, 639 bp, Staphylococcus aureus
atgcacattttagtaacagggtttgcgccttttgacaatcaaaatatcaatccctcatgggaagctgtgactcaactagaagatattattggcacacatacaatcgataaattaaaactaccaacctcttttaagaaagtagataatattataaataaaacgttggcatctaatcattatgatgttgtactagctataggacaagctggtggtagaaatgccattaccccagaacgtgtcgccattaatattgatgatgcacgtattccagataatgatgattttcaacctattgatcaagccattcacttagacggtgcgccagcttatttttcaaatttaccagttaaagcaatgactcaaagtattattaatcaaggacttcctggagcactttcaaatagcgcaggtacgtatgtatgtaatcacgtgctttatcacttaggttatttacaagataagcattaccctcacctacgattcggatttattcatgtgccatacataccagagcaggtcattggtaaacccgatacaccatctatgccattagaaaagatagttgcaggtttgactgcagccattgaagctatttctaatgatgaggatttacgtatagctctaggcacaacggaatag

SEQ ID NO: 415854 - DNA, 957 bp, Staphylococcus aureus
atgaactatcaagttcttttatattataaatatacgacgattgatgaccctgaacagtttgctcaggatcacttagcgttttgcaaagcacaccatttaaaaggtagaattcttgtttctacagaaggtattaacggcacattatctggtacaaaagaagaaaccgaacaatatatggcacatatgcatgccgatgaacgattcaaagatatggtgtttaaaattgatgaagctgaaggacatgcttttaagaaaatgcatgtacgtcctcgaaaagaaatcgttgctttagatttagaagatgacgtcgatccaagacacacaactggccaatatttatcacctgtagaatttagaaaagctcttgaagatgatgacacagtcattattgatgcacgtaatgattatgaatttgatttaggtcatttccgaggtgcaattcgcccagacatcacacgctttagagatttacctgactggattaaagagaataaagcgttatttacagataaaaaagtggttacgtactgtacaggtggcattcgatgtgaaaaattttctggatggcttttaaaagaaggtttcgaagatgtagcgcagcttcacggcggtatagctacatatggtaaagaccctgaaacaaaaggtcaatattgggacggtaaaatgtatgtatttgatgatcgtatcagtgttgatatcaaccaagttgaaaaaacaattattggtaaggattggtttgatggcaaaccatgtgaacgttatattaattgcgctaacccagaatgtaataaacaaatattagtttctgaagaaaacgaaactaaatatttaggtgcatgctcttatgaatgtgctaaacatgagcgtaatcgttatgttcaagcaaataatattagtgataatgagtggcaacaacgtttaacaaactttgatgatttacatcaacatgcttag

SEQ ID NO: 415855 - DNA, 975 bp, Staphylococcus aureus
atgatgtcacaacaagatttacctacattattttatagcgggaagtccaatagtgctgttccaattatatctgaaagtgaattacaaacaattacagctgaaccatggcttgaaatttccaaaaaaggattgcaactagaaggattgaactttgatcggcagggacaactctttttattggatgtattcgaaggcaatattttcaaaatcaatcctgaaacgaaggaaatcaaacgaccttttgtaagtcacaaagcgaatcctgcagcaatcaaaatacataaagatggccgattattcgtttgttatttaggagattttaaatctacaggaggcatttttgcagctacagaaaatggtgacaacttacaagatattattgaagatctttcaacagcatattgtattgatgacatggtatttgattctaaaggtggattttattttacagattttagaggatactctaccaatccactaggaggcgtttattatgtttcgccggactttagaacagtgacgcctatcattcaaaatattagcgtagcaaatggtattgctttaagtacagatgaaaaagtactatgggtaacagaaactacagccaatcgattacatcgcattgcacttgaagatgatggtgtgacgatacaaccatttggagctactataccgtactattttacaggtcatgaaggaccagactcatgttgtattgatagtgacgataatttatacgtagcaatgtatggtcaaggtcgagtgttagtttttaataaaaggggttatccaataggacaaatattgataccaggccgagatgaagggcatatgttacgttctactcatccgcaatttatacctggaacaaatcaactcatcatttgttccaatgatatagaaatgggcggaggatctatgctttatacagttaatggctttgcaaaaggtcatcaaagttttcagtttcaataa

SEQ ID NO: 415856 - DNA, 516 bp, Staphylococcus aureus
atgactaactttacttttgatggtgcacacagtagtttagaattccaaattaaacatttaatggtttctaaagtgaaaggttcatttgatcaatttgatgtagctgttgaaggagatattaatgacttcagtactttgaaagctactgcaacaattattccaagctcaattaacactaaaaacgaagcacgtgataaccacttaaaatctggtgatttctttggtactgatgaatttgataaaatcacgtttgaaacaaaatcagttactgaaaacaaagttgttggtgatttaacaattaaaggtatcactaacgaagaaacattcgacgttgaattcaacggagtaagtaagaatcctatggatggttctcaagtaacaggtgttattgttactggtacaatcaatagagaaaactacggcattaactttaaccaagcacttgaaactggtggcgtaatgctaggcaaagatgttaaattcgaagcatcagctgaattctcaatctcagaataa

SEQ ID NO: 415857 - DNA, 849 bp, Staphylococcus aureus
atgggaaattatttggttttgcaatcagattttggacttagtgatggcgctgtaagtgcaatgtatggagttgcatatactgtaagtgatgatatacgtgtcgaaaacttaacgcatgatataccaccgtatgacatttgggtagcgtcatatcgtttatatcaaactgtaaaatactggcctaaaggcacagtttttgtatcagtggtagacccgggtgtaggtagtgataggcggagcattgcttgcttaacatattcaggtcattacattattacacctgataatggttctttaagtcatattaaacattacgaaggtattaaaaaagttatcgaaattgatgaagtgaaaagccgattgcctcattcggaagaaagtcatacttttcatggtagagatgtttatgcatacaatggtgcgagattagctgcaaataagatagcgtttgaacgtctcggtcaggcaattaatgttgatagtattgaggcattagaaataagagaagcgacaaaaaatgaggattctgttacaggaagcattgatattttagatatcagatttgggtcattatggacaaatattccattggcattcttaaaatccttggaaattgttcatggtaataatttggtggtaacaatttatcatcaagataagaaagtctatcaaaatattattaaatttgcgcgatcgtttgcagatgttaatgtgggtgaacctcttgtgtatgttaactcgctagtaaatattggtgtagcagtcaatcaagactcattttcagatttatatcatattggtactggaaatgattggacgattcatttatctaaagcaccatcaatttaa

SEQ ID NO: 415858 - DNA, 555 bp, Staphylococcus aureus
atgaaaaaacaagatatttcagttaaaactgttgttgcgattggtataggagcagcggtatttgtgattttagggcgttttgttgtaataccaacaggttttcctaatacgaatatagaaacatcttatgcatttttagcattaatatctgcaatatttgggccttttgctggtttaatgactggattagttggacacgctattaaagatttcacgacatacggtagtgcttggtggagttgggttatttgttcaggaattataggctgtttatatggatggattggcctaaaattaaatctttcttcaggcctattttctaggaaatcgatgatttattttaatatcggtcaaattattgcgaatattatttgctgggcacttattgcaccaacattagatattttgatttataacgaaccggctaacaaggtttatacacaaggtgttatctctgcagtattaaatattatttcagttggtattattgggacaatattattaaaagcatatgcttcatctcaaataaaaaaaggtagtttacgtaaagaataa

SEQ ID NO: 415859 - DNA, 1713 bp, Staphylococcus aureus
atgactgaaccaattatctcgttcaaagactttagttttcaatatcatagtcaagcaacacctacattacagaatataaatgttgatatttatccaggagaaaaagtgctagtagttggtgcttcaggtagtggtaaatcgacttttgcaaattgcataaacggattaattccatttaaaactaaaggtaacataaccggggaactatatataaataatcaagatgcaaccgttagttgtttacatgatagatctaatgttgttggtacagttttacaagatacagatggacagttcataggcttaacagcagctgaagatatggcctttttattagaaaataattgtgttgaacaagatgatatgaagaaaaatgtaagttattgggctgaaaaagttggcatgatagaacatttaaatcaccgaccgcaagatttatctggaggtcaaaaacaacgcgtttcattaggtggtatattaatccatcgtacgcctattttaatattggatgagccgctggccaatttagatcctgcgacaggacatgaaacgctgagattgttaaacaatattcatgaagaaacaaagtcaacgatgattattgtcgaacatcgattagaagaatcattagatgatacgtttgatagagttcttctttttaaagatggaaaaatcatcgctaatacaacgcctagtgatttgctaaaatcatctaagcttaaagaagcaggcatacgtgaaccattatactgtacagcgcttaaatatgcagaagtagatgtcgaatccattgataacttagcgaatttacgtgacgtttgtatgagtgaacatgttaaatttaaagtgaaaaaatggatagatgaaacatctgcaaataatgataataagtacaaatctgaaccgctattagaattaaatgaggtatgtgttcaatatagtgactatagtaatagtgtacttaataatgttcaattaaatgtttatagaagagaaatgcttagtatagttggtcacaatggtgccggcaaatcaacacttgctaaagcaatttgtggatttttagatataacaggtaatatccaattttgtaataggggatttaatcaattgtcaattagcgaacgatctgaattcgtaggttatgtgatgcaaaatccaaatcatatgatttctgaaaaaatgatttacgatgaagtagcattagggttaagagcacgaggtatgaaagaatcagatataaagatacgagtagagaatgtgctcaaaatatgcggactttatgcatttcggaattggccaattgcagctttaagctatggtcaaaaaaagagggtcactatagcatctgttttagtcttaaatccggaaataatcatattggatgaaccgactgctggtcaagatttctatcattataatgagataatgtcatttttaattgagctaaacagacagggaaagacgattattatgattacgcatgatatgcatttattgtctgagtatagttcaagaacagttgtattatcaaaaggacaagtcgttgctgataccacgccagtattgatattaaatgataaaaaaatctgtgagattgcatcattgagacaaacatcgctatttgaaatggccgaatatatagggattagcgagccacagaaattagtacaattatttattaaccatgataggaaggtgagacgccaatga

SEQ ID NO: 415860 - DNA, 834 bp, Staphylococcus aureus; identical to SEQ ID NO: 410333

SEQ ID NO: 415861 - DNA, 498 bp, Staphylococcus aureus
atgataaatactgaaagattaaatttaatgattccaagttcctcgcatttaattgaactttataatatttgtagtcatccacaagcaaatatatacactcccaaaggtttacataattccaaattagacacacaacggtggattgaaaaatggcaaaaccattggcaacaatatcaatttggttactttgtattggtgaaaaaaatagattgtagtgttattggtatttgtggatatgaatatcgacaattaaagcaagaaacagtactaaatttattttataaattacatccaagttttgaaggacaagggtacgcatgtgaggctattacagcaatcacaaattttgtgaattatatcgatcaagaaacagtaaaagttatcaggacaaataagtgtaaccaacgttcaataaatttagcagaaaggcttaaattcaagcgagacaaagctatggacgacattatcaatcaaggaaatattgtgttttataaataa

SEQ ID NO: 415862 - DNA, 1125 bp, Staphylococcus aureus
atgcataaaaaatatttattgctattttttctgttattatcagttgcattgctatatagctgttccaagcaaaatgagaaagctcaaaataaatctgttaatccaaatgagtatgcaaagcataaatcgaaaatggatgaacattgggaaacatatcacggccaagtttatcatgtgttttatcacccattaattacagacccaaaagttgcgtttacaggagatacacaccaagctaagggcaacaatgattggatgattactgtaagtgaatttaaaaaatcattgaacgaattatataaaaataattacatcatcgttaatccacatgatgtatacgacttatcatctcatcatgtaaaagccaaaaaaataaaattgccgaaaggtaaaaagccactaatcatctcaattgatgatatgaattactatagttacatgagacaccatggttatgctgaccgtttagtactcgataaaaataaacatgttgtttctgaaactacagacaaaaaaggtcatgctacttattctgatgacaatgatatcgtgccaattttaaataaatttgtaaaagagcatccagatttttctttaaatggtgaaaaaggtgttgttgctttaaccggttatgagggcgtattaggttatcgcacgaatgaattaacgagtaaagattatacaaagaataaaaaggcagctgaggaagttgttcgcgcaatgaaacgggatggatggtcatttgcgagtcattcatatggtcacattaattttgaaaaaacatctttagaaggtattaaacgtgatactaaaagatggaaagatgaagttgaaccaattgtaggtaaaacagatatgtttgtatttccacatggcgcacaggatagacatacacaagcgtatgattatttggtagatgaagcagagtttaagtttattgcaggtgtcggtccaaacaattttacagatatatcagcaacgaacgtttaccaagatagggttgcgattgatggtctaaacttatttgaatttaaatataaactcaaaccgttttttaatcctgaaaatgtatatagtaaacaagatagacaattctttaaaggtaatcgggattatgaagaatag

SEQ ID NO: 415863 - DNA, 858 bp, Staphylococcus aureus
gtgattttaaatacagtattgaaagtaaagggtggtcgagtgaataattcagaacaattaattgcgttaaaagaatcggaaacagcatttttaaaatattttaataaagcggattatgagttagttgattttagtgtggttgaaaagttggactggaaacaattgaaccatgaggatttgcagcagatgggtgagcgaaatttttggcaacatgagcatcaaatttatgcacttcgaaatgattttacagatcaattattgcgttattactcaatgtatccaactgcagcaacaaaagtggcatacacaggtttaatcattcggaataatgaagcggctgtacaagtgggtttggaaaactatgcaccatcattagcgaatgtacaacagagcttaaagctatttattcagtttattcaacagcagttgagagacaacgtgcattttgttgtattgggacattatcaattgcttgatgccttactcgataaatcgttacaaacaccagacatactatcaatgattgaggaacgtaatttatcgggactggttacatatttgtcgactgaacatccaatcgtgcaaatcttgaaagagaatacgcaacaacaattaaatgtattggaacactatattccaaatgaccatccagcactcgttgaattaaaaatatgggaacgttggttacatacacaaggttacaaagacatccatttagatattactgcgcagccacctagatcctattacacaggcttatttattcaatgtcattttgctgaaaatgaatctcgagttttaacaggtggttattacaaaggaagcatcgaagggtttggattaggattaacactttaa

SEQ ID NO: 415864 - DNA, 615 bp, Staphylococcus aureus; identical to SEQ ID NO: 410332

SEQ ID NO: 415865 - DNA, 1014 bp, Staphylococcus aureus
atgatttatattgataaaaatgaaagtccagttacgccgttggatgaaaaaacaatgacgtctattattagtgcaacgccatataatttatatcctgatgcagcatatgaacaattcaaggaagcttatgctaagttttacggattatcgcctgaacaaattattgcaggaaatggatctgatgaattgattcaaaagttaatgctgatcatgccagaaggtccggcattaacgctaaatcctgatttttttatgtatcaagcatatgcggcacaagtaaatcgtgaaattgcatttgtagatgcaggatcagatttaacgtttgatttggaaaccattttaacgaaaatcgatgaagtacaaccatcattttttattatgagtaatccacataacccttcaggcaagcaatttgatacggcatttttaacagctattgcagataagatgaaagcattaaacggatactttgtcattgatgaagcatatttagattatggtacggcatatgacgtggaactggcaccacacatcttaagaatgcgtacattatcaaaggcgtttggaattgccggcttaagattaggtgtcttaattagtactgctggaacgataaagcatattcaaaaaatagaacatccatatccattaaatgtatttacgctaaatattgcgacttatatttttagacatagagaagagacaagagtatttttaacgatgcaacgacagttagctgagcagttaaaacaaatatttgatacacatgttgcagataaaatgtcagtattcccatcaaatgccaattttgtacttactaaaggttcagcagcgcaccaattaggacaatacgtatatgaacaaggatttaaacctcgcttttatgatgagccggtgatgaagggctatgtaagatactcaattgcaacagcatcgcagttaaagcaattagaagaaattgttaaagaatggagcgcaaaatatgatttatcaaaaacaacgaaacacagctga

SEQ ID NO: 415866 - DNA, 579 bp, Staphylococcus aureus
atgatttatcaaaaacaacgaaacacagctgaaacacaactaaatatttcaatatcagatgaccagtcaccatcgcatattaatacaggtgtgggctttttaaatcatatgttaacattgtttacatttcatagcggtctgtcattaaacattgaggcacaaggtgatattgacgtagatgatcaccatgtaactgaagatatcggcattgtcattggccaattgttacttgaaatgattaaagataaaaagcatttcgttcgttatggaacgatgtacattccaatggatgaaacattagcacgtgtcgttgtggatataagtgggcgcccatacctatcattcaatgcatcattaagtaaagaaaaagttggtacgtttgatacggagttagtagaagaattttttagagcggtcgtaatcaatgcaagattaacaacgcatattgatttaattcgtggaggtaatacacaccatgaaattgaagctatattcaaagcgttttcccgtgcattaggcatagcgctaactgcaactgatgatcagcgtgtgccgtcatcgaaaggtgtgattgaatga

SEQ ID NO: 415867 - DNA, 579 bp, Staphylococcus aureus
atgattgtcatcgttgattatggattagggaatattagtaatgtaaaacgcgctattgaacatttagggtatgaggtggttgtctcaaatacctcaaaaataatcgatcaagcagaaacaatcatattgcccggtgtcggccattttaaagatgcgatgtcagagataaaacgattaaatctcaatgcaatattggctaagaatactgataagaagatgattggtatttgtttaggcatgcaattaatgtatgagcatagtgatgaaggcgatgcatctggattagggtttatcccaggaaatatttcgcgtatccaaacagaatacccagtgccgcacttaggttggaataatttagtgagtaagcatcctatgttaaatcaagatgtttacttcgtacattcttaccaagcgccgatgtcagaaaatgtcattgcatatgcgcagtatggggctgatattccggcaattgttcaatttaacaattatattggtattcaattccatcctgaaaaaagcggtacatatgggttacaaattttgcgtcaggcaatacaagggggatttataaatgattga

SEQ ID NO: 415868 - DNA, 705 bp, Staphylococcus aureus; identical to SEQ ID NO: 410320

SEQ ID NO: 415869 - DNA, 759 bp, Staphylococcus aureus
atgattaaaaaacgtatcattccatgtttagatgtcaaagatggtcgtgtcgttaaagggattcaatttaaaggattaagggatatagggaatcctgttgatttagcaatatattacaatgaagcgggtgctgatgaattagtatttttagacatctctaagacggaagagggtcatagcttaatgctagaagtgattgaacagacagcgtcacgcttgtttatccctcttactgtagggggtgggattcaaagtctcgatgatattacccaattgttaaatcatggtgcagataaagtatcattaaattcaagtgctttaaaaaatccacagctcattaaacaagcgagtgataaattcggtagacaatgcatctgtatagcaattgatagctattatgatcctgaaagaaaagcacattattgttgtacgcatggtggtaaaaaaatgacaaatattaaagtatatgactgggtacagcaagtagaacagttaggtgcaggtgagctcctcgttacaagtatgggacatgatggtatgaaacaaggatttgatattgagcatcttgcaaaaataaaatcccttgtaaatattccaatcattgcttctggtggtggtggcaatgcacaacactttgtagaactatttaatcagacggatgtttctgcaggtttagctgcaagtatattacatgaccgagaaacgacggttcaatcaattaaagaagtgatacggcaagggggtatagcagtaagatga

SEQ ID NO: 415870 - DNA, 633 bp, Staphylococcus aureus
atgaccaaatataaaattgattttagcaaaggtttagtgccagcaattttacaagataatcaaacaaaacaagtattgatgttgggttatatgaatcaagaagcttttgataaaacgatagaagatggtgtggtatgtttctattcgcggtcgaaacaacgtctatggacaaaaggtgaaacatctggtcatacgcaacttgttaaagatattcatgtagattgcgacaatgatactattttaattgatgtcataccaaatggaccaacatgtcatacaggcagtcaaagttgtttcaacacagaagttccattttcagtgcaaacattagcgcagacagttcaagatagtgcccaatccaataatgaaaagtcatatacaaaatatttattaacagaaggtatagaaaagattacaaaaaaatacggtgaagaagcttttgaagtcgtaattgaagcaattaaaggtgacaaaaaagcatttgtaagtgaagtagcagatgaactttatcatttatttgtcttgatgcatgcgctaggcgtcgatttttcagaaattgaggcggaattagcgcgtagacatcataagcgcaataactttaaaggtgaacgacaaaatatcgaacagtggtaa

SEQ ID NO: 415871 - DNA, 2046 bp, Staphylococcus aureus
atgatgaaaagtcaaaataagtatagtattcgtaaatttagtgtaggtgcatcttccattttaatagctacattactatttttaagtggtggacaagcacaagcagctgagaagcaagtgaatatgggaaattcacaggaggatacagttacagcacaatctattggggatcaacaaactagggaaaatgctaattatcaacgtgaaaacggtgttgacgaacagcaacatactgaaaatttaactaagaacttgcataatgataaaacaatatcagaagaaaatcatcgtaaaacagatgatttgaataaagatcaactaaaggatgataaaaattcatcgcttaataataaaaatattcaacgtgatacaacaaaaaataacaatgctaatcctagcgatgtaaatcaagggttagaacaggctattaatgatggcaaacaaagtaaagtggcgtcacagcaacagtcaaaagaggtagataatagtcaagattcaaacgctaataacaatctaccttcacaaagtttaacaaaagaagcaccatcattaaataagtcagatcaaacaagtcaacgagaaattgttaatgagacagaaatagagaaagtacaaccacaacaaaataatcaagcgaatgataaaattactaaccacaattttaacaatgaacaagaagtgaaacctcaaaaagacgaaaaaacactatcagtttcagatttaaaaaacaatcaaaaatcaccagtagaaccaacaaaagacaatgacaagaaaaatggattaaatttattaaaaagtagtgcagtagccacgttaccgaataaggggacaaaggaacttactgcaaaagcgaaagatgatcaaacgaataaagttgccaaacaagggcagtataaaaatcaagatcctatcgttttagtgcatggtttcaatgggtttacagatgatattaatccttcagtgttagctcattattggggcggtaataaaatgaacattcgccaagatttagaagaaaatggttacaaagcttatgaagcaagtataagtgcttttggaagtaactatgaccgcgcagttgaactttattattatatcaaaggcggtcgtgtagattatggtgcagcacatgcagcaaaatatggacatgaacgttatggaaaaacatacgaaggaatttacaaagactggaaaccaggacagaaggtacacctagttggacatagtatgggcggtcaaacgatacgtcaactagaagaattactgcgtaatggtaatcgtgaagaaatagagtatcaaaagaaacatggtggcgaaatttctccactattcaaaggtaataatgacaacatgatttcatcaattactactttaggaacaccacataatggtacacacgcatcagatttagctggtaatgaagctttagtgagacaaatcgtatttgatatcggtaaaatgtttggtaataaaaattcaagagtagacttcgggttggctcaatggggtctaaaacagaagccaaatgaatcatatattgattatgtcaaacgcgttaaacaatctaatttatggaaatcaaaagataatggattttacgatctgacgcgtgagggtgcaacagatttaaatcgtaaaacgtcgttgaaccctaacattgtgtataaaacatacactggtgaagcaacgcacaaagcattaaatagcgatagacaaaaagcagacttaaatatgtttttcccatttgtgattactggtaacttaatcggtaaagcaactgaaaaagaatggcgagaaaacgatggtttagtatccgttatttcttctcaacatccatttaatcaagcttatacaaatgcgacggataaaattcaaaaaggcatttggcaagtgacgcctacaaaacatgattgggatcatgttgactttgtaggacaagacagttctgatacagtgcgcacaagagaagaattacaagatttttggcatcatttagcagacgatttagtgaaaactgaaaaggtgactgatactaagcaagcataa

SEQ ID NO: 415872 - DNA, 1053 bp, Staphylococcus aureus
atgaaaaagattagacttgaactcgtatatttacgtgctattatatgtgcaattattattatcacacatttacttacacaaattactttaaaacatgaaaatatggagggaggatccttagtattacaattttacattcgtaatattgtgatttttggtacaccttgctttattatcttgtcacagttactgacaaccttgaattaccaaaaagtcacctatagatacttaactacacgcgtaaaatatatacttattccttacatattaatgggattgttttacagttatagtgaatcattattaacagattcaagtttcaataaacaattcattgaaaatgtcctattaggtcaatggtatggctattttatcgttgttatcatgcaattctttattttgagttatatcatttttaaaattaactataacctattcaacagtaaaatattattattgttatcttttattttacagcaatcatttttatattactttacgaacaacacagcgtttcacgataccgtgctacactattatccattaagtgaaaacactataatattcggatggattttttatttctttttaggtgcatatatgggttataactacgaacgtgtattaaatttcttagaacgttatttagttattatgattgtattagctgtagctacttattttgtgtttattgcgttagcaaatggagactattggaacgttaccagcttttcatattcattaacaccatataatagtattatgtttattgttatcttgggtatttgcacgcattttaaaacaatgttatttaatacgattcaaatgattagtgctttctcattctttatttatttattacatccaatcattctagactcattgtttgcatatacaaatatatttgaggataatacaatggtctttctagcgatatcactactattcattttagggttatgtataggtgtcggtatgatattgcgtgaattctatatctttaggtttattattggaaaacaaccatataaattgaacattaatgcttattaa

SEQ ID NO: 415873 - DNA, 873 bp, Staphylococcus aureus
gtgaagtatagaaaattaataattttagtgttgagtatcttgatcatattgcctgtaagcacactggatggtcatcatattgcaaatgcagatgacgattcacctaaaaaactgaaatataaagaaaatagtgctctggcattaaattatcaccgtgtaagaaaagcgaattttctgaataattttatttacttcttttctagtagtaaagaaattaaaaattatagtgttagtcaatcacaatttgaatctcaaataaaatggctaaaatcacatgatgctaaatttttaaccttgaaagaatttttatattacaagaaaaaaggtaagtttccaaaacgaagtgtatggattaactttgatgatatggatgaaactatttatgaaaatgcttatccaatcttaaaaaaatataaaataccggcaactgggtttattatcacaggtcatgttggggaagaaaactttcacaacctcgatatgattagtaaaaaagaactaaaagaaatgtataaaactgggttatgggaattggaaacacatacccacgatttgcataacttatctaaaaataataagtcaaaattaatgaaagcttctgaagctacaatcataaaagatttaaacaaaagtgaaaaatatctaactaaaaactttaaaaagtcgcagaaaactatagcctatccttatggcttgatgaatgacgataaattaccggtaatcaaaaaagctgggttaaaatacggtttttcattagaggaaaaagcagtcactccgaactccaatgattattacatccctagaatattaattagtgatgatgcttttgagcatttaattaagagatgggacggattccatgaaaaagattag

SEQ ID NO: 415874 - DNA, 306 bp, Staphylococcus aureus
atggtcaagcccagacagagggaatacccaacgctaaaatcatcgctaaatattgtaagagaaacagcacttatcgctatatcgtgtgtcttttggatatattgtttagttgttctactcgtttatattggtactatatttgaaattcatgacgaaagtatcaatacaatacgtgttgctttaaacattgaaaatactgaaattttagatatatttgaaactatgggcattttcgcgattatcatttttgtattttttacaattagcatattgattcaaaaatggcagagaggaagagaatcgtga

SEQ ID NO: 415875 - DNA, 1239 bp, Staphylococcus aureus
ttgcaattttttaactttttgcttttttatcctgtatttatgtctatttactggattgtcggttcaatttatttctattttaccagagaaattagatattcattgaacaagaagcctgacataaatgtggatgaattagaaggcattacatttttacttgcctgttataacgaaagtgaaacgattgaagatacgttgtctaatgttcttgcactcaaatacgagaagaaagaaattattatcattaatgatggaagttcagataatacagcagaactcatctataaaatcaaagaaaataatgactttattttcgtcgatttacaagaaaacagaggtaaagccaacgcactcaatcaaggcattaaacaggcttcatatgattatgtaatgtgcttggatgcagatactatcgttgatcaagatgcaccatattatatgattgagaatttcaaacatgatccaaaacttggtgcagttacaggtaatcctagaattcgaaataagagttctattttaggtaaaattcaaacgatagaatatgcaagtttaattggctgtattaagcgaagtcagacacttgctggcgcagtcaatactatttcgggtgtcttcactctatttaaaaaaagtgcagttgtcgacgttggctactgggatactgatatgattaccgaagatattgcagtttcttggaaattgcatttacgtggatatcgtattaagtatgaaccgcttgccatgtgttggatgttggttccagaaacattgggaggtctttggaagcaacgcgtgagatgggctcaagggggacacgaagtattactacgagacttttttagcacaatgaaaacgaaaaggtttcctttatatattttgatgtttgagcaaatcatctcaattttatgggtatatatagtgcttctatatttaggctatttgttcataacagcaaacttcttagactatacatttatgacatatagtttttcaatatttctactatcatcatttactatgacttttataaacgttattcaatttacagtcgcactctttattgatagtcgctacgagaaaaagaatatggctggactcatatttgtaagttggtatccgacagtatactggattattaacgcagcagtagttcttgtcgcatttccaaaagcattaaaacgtaagaaaggtggttacgcaacatggtcaagcccagacagagggaatacccaacgctaa

SEQ ID NO: 415876 - DNA, 561 bp, Staphylococcus aureus
ttgaaggataagattattgataacgcaataaccttattttcagagaaggggtatgacggtacaacacttgatgatatagctaaaagtgtaaatataaagaaagcgagtttatattaccattttgactcgaaaaaaagtatttacgaacaaagtgttaaatgctgttttgattaccttaataatattattatgatgaatcaaaataaatcgaactattcaattgatgctttatatcaattcttatttgagtttattttcgacatcgaagaaaggtatattagaatgtacgttcaattatctaatacgcctgaggaattttctggaaatatttacggacaaatacaagatttaaatcaatcattaagtaaagagatagcaaaattctatgatgaatcaaagataaagatgacaaaagaagactttcagaatttaatattgctgtttcttgaaagttggtatttgaaagcatccttttcgcaaaaatttggagcagtggaagaaagtaaaagtcaattcaaagatgaagtgtattcgctactaaatatatttttgaagaaataa

SEQ ID NO: 415877 - DNA, 663 bp, Staphylococcus aureus
atgaaagaaaagtttgatttagtaaaactattaaatattctaaagaagaatattaaattattgcttattttaccggcaatatgtcttgtagtaagtacggcattaaccttctttgttatgcctgacaaatatactgcttctactcaaatactagtgaacatgaaaaagtcctcaagtgatttagctttccaaaatgttcaaagtagtttgcagtctgttaatacatatacggaaattatcaaaagtccaagaattctagataaagtatctagagagtttgatggtcagtattcaacagctgagttgaattcgtttttaaaagtaaccaatcaaacaaactctcagattattactgtatcagttacaactgggaataaatctgaatctgacaaaattgttaatagaatatctaaagtttttgcacatgatatgcctaaaattatgagtgttgataatgttacgatactttcctcagcacatgataatgctgtaaaagtatctccaatagtatctgtcaacttagtgatcagcattattgttggtattgttttagcaatattgattattttcttaaaagaattattagataagcgtattaagacagaagaagatgttgaatcgcaactaggattacctattttaggttcaatacaaaaattttaa

SEQ ID NO: 415878 - DNA, 693 bp, Staphylococcus aureus
atgacgaatacacgaagaagtacatcaagtttaattgtccatgaacaaccaaagtcacctattagcgagaaatttcgaggcataagatcaaatattatgtttgcaaatcctgacagtgcagttcaaagcattgtaatcacttcagaggcaccaggcgcaggtaagtctacaattgcagcaaatttagcagttgcatatgcgcaagcaggttataaaacactaatcgtagacggggatatgcgtaaacctacgcagcattatatttttaatttgccaaacaatgaaggcctatcaagtttattgctaaattggtcaacttatcaagacagtattatctcaactgaaattcaagatttagacgtcttgacgtctgggccaatcccaccgaatccgtcagagttaattacatcaagggcatttgcaaatttgtatgacacattattgatgaattataactttgtcattatcgatacgccaccagtgaacacagttacagatgcgcaattattttcaaagtttaccggcaatgttgtctacgtagttaattcggaaaataataataaagatgaagttaaaaaaggaaaagaacttattgaagcaacaggtgctaaattattaggtgtagtcttaaatagaatgcctaaagataaaagtgctagttactatgcatattatgggactgatgaatcatga

SEQ ID NO: 415879 - DNA, 768 bp, Staphylococcus aureus; identical to SEQ ID NO: 412680

SEQ ID NO: 415880 - DNA, 501 bp, Staphylococcus aureus
atggtattaagaaaagtaatcatgcaggacttagatcaaattattgcacttgaaaatattggtttttcaccggaagaagctgcaacacgagaggcattgaaattgagaattgaacaaattcaagaaacttttattgtagctgaaaagaatgatgaagtaattggatacatcaacggtccagtcataaaagagcgttacattagcgatgatttatttaaaaatgtctccataaataatagtgaaggtggctatattagtgtgttaggtcttgttgtagcaccaaattatcaaggtcagggtattgcaggtcgcttactaaactattttgaaactcttgctaagaatcatcatcgacatggtgtaacgttaacatgtcgagaatcattaatttcattttatgaaaaatatgggtatcgtaatgaaggtgtatcagaatcatgtcatggcggtattaaatggtataaccttgttaaaaatataaaaaaggatgatgaggtgtaa

SEQ ID NO: 415881 - DNA, 477 bp, Staphylococcus aureus
atggtagttgtttatgtagcaggagggtgtctatggggtgttgaagcattttttgcaacaatacctggaattatacatacagaagcaggaagagcaaatggaagaagctctaaattagacggtccgtatgatggttatgctgaatgtgtcaaacttcatttcgatgatcgtatgttaacaattacagacattatgaattatttatttgaaatcattgatccttacagtgtgaatcaacaaggaaatgatattggagaaaagtatcgaacgggtttatatagttgtgtagatgaccacttaattgaagcgcgtcagttcattgaacgacgtaaagacagagatcaaattgcagtggaagtcttaccgctgtctaactacattaaaagtgctgaagaacatcagcaacatttagaaaaatatccagaagatatgcatatgtgtcatatttcaaaagatttgctaaataaatacaagtga

SEQ ID NO: 415882 - DNA, 612 bp, Staphylococcus aureus
atgtatacgtttgatgcacaatcattaactgctagagaaaactataaattattaattggttcaattattccacgacctatagcatttgttacaacattaaatcaagatgcatcagtaaatgcagcaccatttagcttttttaatattgttaataaccatccgccaatggttgctattgcagttcaacgtgcaggaggtaagagaaaagatactgccttgaatatagaacggactggagactttgttgtgcatattacagacgaagataatgttcaagatattaatgagactgcagcgccgttagcatatggtgacagtgagttgagtcgtacaggattatcacttttaacatctacaacgattaagacgccaggaattaaagacgcgaaaatgagattcgaatgtaaactatcgcaaatgatattgcttggagatgtattagatggggctgatttaataataggtgaaattgtaacttatcatattgatgacagtatttatgagggtgattttaaaatcaatccacacgcattacaggctgtttctcgtttagccggaaatgattatgctaaattagggggaatatttacgataaagagaccagaaaaataa

SEQ ID NO: 415883 - DNA, 360 bp, Staphylococcus aureus; identical to SEQ ID NO: 412681

SEQ ID NO: 415884 - DNA, 303 bp, Staphylococcus aureus
atgagaacaaataatcatataaccgatttagatgctattgagttaagtagcggttggaattacaattcgaaattggtgactggcaaaaatgcactactatcagatagtcttttaagagatattaaagtattaagttctaatgctaaaggcgacgctgacatactagaaacagaacttcgtgctgtaataaacgcaatgtctcaaaacgaaggtaaatctgttgatgcacttaaaaatagtaccacttctctaaaaaacaatctaaccaaattaaaagagcaactcgacaaaactacacattaa

SEQ ID NO: 415885 - DNA, 429 bp, Staphylococcus aureus; identical to SEQ ID NO: 412682

SEQ ID NO: 415886 - DNA, 693 bp, Staphylococcus aureus; identical to SEQ ID NO: 412683

SEQ ID NO: 415887 - DNA, 1212 bp, Staphylococcus aureus
atgttaaaacttttacaacaatacgaatataaaattatatataaacgtatgctatacacatgttttatattatttatttatatattaggtacaaacatttccatcgtttcctataacgatatgcaagtaaaacatgagtcattttttaaaatagctatttctaatatgggtggagacgttaatactttaaacattttcactttaggattagttccgtggttaacatcaatgattatcttgatgctgatttcttatcggaatatggataaatacatgaaacaaacaagtcttgagaagcattataaagagcgtatcttaacattaattttaagtgtgattcaaagttattttgtgattcatgaatatgtttcgaaagaacgtgttcatcaagacaatatttacttaacaatattgattttggttactggaacgatgttattagtttggttagctgacaaaaatagtcgttacggcatcgcaggaccaatgccgattgtaatggttagcattattaaatcaatgatgcatcaaaaaatggaatatatagatgcaagtcatattgtgattgcgttgttaatcatccttgtgataatcacattgtttatcttattattcattgaattagtagaagtgagaataccatatatcgatttaatgaacgtttccgcaacaaatatgaaatcttatttatcttggaaagttaaccctgcaggcagtattactttaatgatgagtatttcagcatttgttttcttgaaaagtggcattcattttattttatctatgtttaataaaagcatatcagatgacatgccaatgctgacatttgatagtccagtaggtatttcagtatatttagtgattcaaatgttattgggttattttttatcgagatttttaatcaatactaaacaaaaatccaaagatttcttaaagagtggcaattatttttcaggagttaaacctggtaaggatacagaacgttatttaaattatcaagcaagacgcgtatgttggtttggatcggcattagttacagtcattattggtataccgctttatttcacattgtttgtaccgcatttatctactgaaatttatttctcagtacaactgattgtattagtttacatcagtattaatattgcagaaacaattcgtacatatttatattttgataaatataagccatttttaaaccagtattggtaa

SEQ ID NO: 415888 - DNA, 1554 bp, Staphylococcus aureus
atgaaatactttattccagcttggtacgatgaccaacgatggtggcaagacacgactgtgccgtattatcaactacaaaataagacggaatttgacgatatgattagtttaatgggaatgcaccttgaaaatgacttagattatcaactgattgttctcaatcatgcaccaaatttaagaacatttttacatcgatatgacttatatgaaacaaagtattcgtctgtgtttgatgaaattcaaggattcagtcaccatgcgccacaagcgattaattatcatcacttaaaatggccggatgatgttgagtttgtgtacacgccgtatttattaaaatgtgtgacgagtgaacagacctatacaaatatttattttagtcaagaagggtattcaatttggtttgaagaatttgaaagagatcagttacaacggcgttatatttttgatgacagaggttatttatcagcgatacgttattttgatgatcagggagaggcttcttaccaacaatatttaacgattaatggagattgtgtacttcatgaagatttgaaaaatggcagagtcactgtatcaaaaagatatcaacatcactatcaacaaacagaatataacaatatggctcaactaattgaagaaaaatttcaagcaatgattgcacaacaaatacatgaagatgatcatgtgattgtggcttcagatgctaggcacaatcgacaaatagccaatcatattccagcgaaattgttaagttattcattttttaaaaatagaaatgaaactgtgtcagatgaggaatatcaatctatcgtaaagaatgcccatttaattgttgatagtgtgcaactagaacgtgatttaattagtcatcaagagaagtatcagcgggagaatacaatgattcgaatcacaccatttgaaacgagacaatcacctaatataagtagtcaattgatggaaacatttataggtgtatggatagatggtatgagtgacgctgatttgcaacaaatgatgcaacgacttgtggattatatcgcacaggaagattattaccgtttaattttattatcgcgccatcaaaatgacataccgatgtggcttcgtgaatgtattacgtcggtaaatgaggaataccaagctaaacagaatgcggatgttaatgtttcagcattaatgacacctgaagatcaagatgacatcattgctgttaagacgatacatgctgaacatgatgttgtagaagcattgcggacgttgcgacttgtgatagatatgtcaaaagaacctgatttgtatttacaaattagtgcaattagcgctgggattccacaaattaatggtcaacaaacagattacgtctctgattatgacaatggccgtattataaatacagttgatgaattagatgatgcgttaaattattatttattttatttgaaaaattggaattatgcgtacgcctattctttaaaattaatagatgcatatgcttctaagaatattattaatcagctcgatgagttaatagaaggtgaaaatgatgccacgtaa

SEQ ID NO: 415889 - DNA, 960 bp, Staphylococcus aureus; identical to SEQ ID NO: 410319

SEQ ID NO: 415890 - DNA, 1509 bp, Staphylococcus aureus; identical to SEQ ID NO: 415716

SEQ ID NO: 415891 - DNA, 1359 bp, Staphylococcus aureus
atgattaaattatttgattactttaacgatcattcacgaaagttatatgagtcttttaaagccagtaagttggaagaagatttaacaattgtactcaatgacaatggctttttaccggacgatgttatatcaccgtatcaattttttgcagataatcataatacagaaaatatgaaaccacgattttttaatcaggttactgtaccagctttttgggaaattaaaggtaacaacaattcggctacaattaatgatatgggacgtctacgaggcaaaatattttatcaaagtggagagcgccctagaattgttagtcgtgtcgaatggtttgatgaccaacaacgtgtccgatttgtcgattattattctaagaatggtattaaatttgcacaaactgtttacgatttaaatcgtaaagcgatcttgaagaaatatatgacagcagaaggtaaagaagtgatttatgaaaattttgtaacatctgatgtcatattggattggcaagggaagtcttactttttcccttcaaagctcgcattcgtattattttttatcaagcaacttgaaattacggaacatcatttcgttattaactcactagccctaccattttcagtgttatataatttgccatcaaaaggtagtgatgttttggtatggcaagaacactgtaatggtaatgtcccgggaaatatgcaattgatgtgtaaaggtgatatgaaacgacattgtaatattattattccagataaaaacgaatatgaaacgatgctcaatatagcagacgcaaaggttcaatctcgtattttacaaggcggatatctatataactatcgtagtcgtaatagatatactaaagaaattgtaatattaactaactcggatcaacttcgtaacatcaaggtattggttgaaactttaccagattttaattttcacatcgctgctattacagagatgtctgataagctaatgcaacttgatcaatatgctaatgtgcacttatacccatctattaatattgacagggtaaatgaactataccagttatgtgatatttatcttgatatcaatgagggtaatgaaattttaaatgcggtggaacaagcgtttgactatgagttgttgattttaggttatcgtcaaaccgcacaccatgctaaagtaacattatcagagcacttatttgagcataatgatgagataacaatggaaagtaaagaccaattaatacaaatgttagaaagtttgaaagatcaacaacagtttcgagatgctttattagcacaaaaagcacatgcacacgaaatctcgcgtgaacaattcgagcaagtttttaaacaggcgctcgaaagctaa

SEQ ID NO: 415892 - DNA, 1908 bp, Staphylococcus aureus
atggctaaatatcgagggaaaccgtttcaattatatgtaaagttatcgtgttcgacaatgatggcgtcaagtatcattttaacgaatatcttgccgtacgatgcccaagctgcatctgaaaaggatactgaaatttcaaaagagatattatctaagcaagatttattagacaaagttgacaaagcaattcgtcaaattgagcaattaaaacagttatcggcttcatctaaagcacattataaagcacaactaaatgaagcgaaaacagcatcgcaaatagatgaaatcataaaacgagctaatgagttggatagcaaagaaaataaaagttctcacactgaaatgaacggtcaaagtgatatagacagtaaattagatcaattgcttaaagatttaaatgaggtttcttcaaatgttgataggggtcaacaaagtggcgaggacgatcttaatgcaatgaaaaatgatatgtcacaaacggctacaacaaaatatggagaaaaagatgataaaaatgatgaagcaatggtaaataaggcgttagaagacctagaccatttgaatcagcaaatacacaaatcgaaagatgcattgaaagatgcatcgaaagatccggcagtgtctacaacagatagtaatcatgaagtagctaaaacgccaaataatgatggttctggacatgttgtgttaaataaatttctttcaaatgaagagaatcaaagccatagtaatcaactcactgataaattacaaggaagcgataaaattaatcatgctatgattgaaaaattggctaaaagtaatgcctcaacgcaacattacacatatcataaactgaatacgttacaatctttagatcaacgtattgcaaatacgcaacttcctaaaaatcaaaaatcagacttaatgagcgaagtaaataagacgaaagagcgtataaaaagtcaacgaaatattattttggaagaacttgcacgtactgatgataaaaagtatgctacacaaagcattttagaaagtatatttaataaagacgaggcagataaaattctaaaagatatacgtgttgatggtaaaacagatcaacaaattgcagatcaaattactcgtcatattgatcaactatctctgacaacgagtgatgatttattaacgtcattgattgatcaatcacaagataagtcgctattgatttctcaaatcttacaaacgaaattaggaaaagctgaagcagataaattggctaaagattggacgaataaaggattatcaaatcgccaaatcgttgaccaattgaagaaacattttgcatcaactggcgacacgtcttcagatgatatattaaaagcaattttgaataatgccaaagataaaaagcaagcaattgaaacgattttagcaacacgtatagaaagacaaaaggcaaaattactggcagatttaattactaaaatagaaacagatcaaaataaaatttttaatttagttaaatcggcattgaatggtaaagcggatgatttattgaatttacaaaagagactcaatcaaacgaaaaaagatatagactatattttatcaccaatagtaaatcgtccaagtttactagatcgattgaataaaaatgggaaaacaacggatttaaataagttagcaaatttaatgaatcaaggatcaaatttattagacagtattccagatatacccacaccaaagccagaaaagacgttaacacttggtaaaggtaatggattgttaagtggattattaaatgctgatggtaatgtatctttgcctaaagcgggggaaacgataaaagaacattggttgccgatatctgtaattgttggtgcaatgggtgtactaatgatttggttatcacgacgcaataagttgaaaaataaagcataa

SEQ ID NO: 415893 - DNA, 561 bp, Staphylococcus aureus
atgtctcgaaaaacggcgctattagttttggatatgcaagaaggtatagcgagtagtgtacctagaataaaaaatattattaaagcgaatcagagagcaattgaagcagcaagacaacatcgaataccagtcattttcatacgtttagtgttagataagcattttaatgatgtctcctcgagtaataaagtgttttcaacaattaaagctcaaggatatgcgattactgaagcagatgcatctacacgaatacttgaagatttagcaccactagaagatgagccgattatttctaagcgacgctttagcgcatttacaggtagttacttggaagtttatttacgtgcaaatgatattaatcatttagtattaacgggtgtctctacgagtggagctgtattgagcacggcattagaaagtgtagataaagactattatattactgttttagaagatgctgttggtgatagatcagatgataaacatgactttattattgaacaaattttatcacgctcatgtgacattgaatccgtagagtcatggaaaagtagtttatag

SEQ ID NO: 415894 - DNA, 1860 bp, Staphylococcus aureus
atgcctaaaaataaaattttaatttatttgctatcaactacgctcgtattacctactttagtttcacctaccgcttatgctgatacacctcaaaaagatactacagctaagacaacatctcatgattcaaaaaaatctaatgacgatgaaacttctaaggatactacaagtaaagatactgataaagcagacaacaataatacaagtaaccaagacaataacgacaaaaaatttaaaactatagacgacagcacttcagactctaacaatatcattgattttatttataagaatttaccacaaaccaatataaaccaattgctaaccaaaaataaatacgatgataattactcattaacaactttaatccaaaacttattcaatttaaattcggatatttctgattacgaacaacctcgtaatggcgaaaagtcaacaaatgattcgaataaaaacagtgacaatagcatcaaaaatgacactgatacgcaatcatctaaacaagataaagcagacaatcaaaaagcacctaaatcaaacaatacaaaaccaagtacatctaataagcaaccaaattcgccaaagccaacacaacctaatcaatcaaatagtcaaccagcaagtgacgataaagcaaatcaaaaatcttcatcgaaagataatcaatcaatgtcagattcggctttagactctattttggatcaatacagtgaagatgcaaagaaaacacaaaaagattatgcatctcaatctaaaaaagacaaaaatgaaaaatctaatacaaagaatccacagttaccaacacaagatgaattgaaacataaatctaaacctgctcaatcattcaataacgatgttaatcaaaaggatacacgtgcaacatcattattcgaaacagatcctagtatatctaacaatgatgatagcggacaatttaacgttgttgactcaaaagatacacgtcaatttgtcaaatcaattgctaaagatgcacatcgcattggtcaagataacgatatttatgcgtctgtcatgattgcccaagcaatcttagaatctgactcaggtcgtagtgctttagctaagtcaccaaaccataatttattcggtatcaaaggtgcttttgaagggaattctgttccttttaacacattagaagctgatggtaataaattgtatagtattaatgctggattccgaaaatatccaagcacgaaagaatcactaaaagattactctgaccttattaaaaatggtattgatggcaatcgaacaatttataaaccaacatggaaatcggaagccgattcttataaagatgcaacatcacacttatctaaaacatatgctacagatccaaactatgctaagaaattaaacagtattattaaacactatcaattaactcagtttgacgatgaacgcatgccagatttagataaatatgaacgttctatcaaggattatgatgattcatcagatgaattcaaacctttccgcgaggtatctgatagtatgccatatccacatggccaatgtacttggtacgtatataaccgtatgaaacaatttggtacatctatctcaggtgatttaggtgatgcacataattggaataatcgagctcaataccgtgattatcaagtaagtcatacaccaaaacgtcatgctgctgttgtatttgaggctggacaatttggtgcagatcaacattacggtcatgtagcatttgttgaaaaagttaacagtgatggttctatcgttatttcagaatccaatgttaaaggattaggtatcatttctcatagaactatcaatgcagctgccgctgaagaattatcatatattacaggtaaataa

SEQ ID NO: 415895 - DNA, 2982 bp, Staphylococcus aureus
atgaagaacgcatttaaattatttaaaatggatctgaagaaagtagctaagacgccagctgtgtggattatcttagcaggcttagctattttgccatcgttctacgcttggtttaacttatgggcaatgtgggatccatatggcaacacgggacacatcaaggtcgcagtcgttaatgaagataaaggcgacacaatcagagggaaaaaagttaatgtcggtaatacgatggttaatacactcaagaaaaataaaagttttgattggcagtttgtaagtagagagaaagctgatcatgagataaaaatgggtaaatattttgcaggtatttacatcccatctaagtttacacatgaaattaccgggacactacgtaagcagcctcaaaaagcagatgtagaatttaaggtgaatcagaagattaacgctgttgcgtctaagctaacagatactggttcgtcagttgtcgttgaaaaagcgaatgaacaatttaataaaacagtaactcgagcattattagaagaagctaacaaagcaggtttaactattgaagaaaatgtgccgacaattaacaagataaaaaatgcggtatattcagcagataaagctttacctaagattaatgactttgcgaataaaattgtgtatttgaataaccaccaagcggatttagataaatatgccaatgattttagaaaactaggaaattataaaggtgatattttagatgctcagaaaaaattaaacgaagtcaatggtgctattccgcaacttaatgaaaaggctaagttgatattagctttaaataattatatgccgaaaattgaaaaagcgttaaattttgcagctgatgacgtgccagcgcagttccctaaaattaatcaaggacttaacattgcgagtcaagggattgatcaagctaatggacagttaaatgatgccaaaggcttcgtcacacaagttagaagtagagtcggtgattatcaagatgcaattcgacgcgcgcaagatttaaatcgaagaaaccagcaacagattcctcaaaatagcgcggcgaacaacgaaacatcaaatagttcacctgcagctggtaatggtgtagcatcaacgccaccaagtgcaccaagtggcgatactgcaccaaataataatgttacgcaaaataccgcaccaaatagtaataatgcgcctgtatcgactacaccacaaagtacaagcgggaaaaaagatggtcaaagttttgcagatataacaacaacacaagtcagcacagctaacgagaacacacaaaacattacagataaagatgttaaatcaatggaagcggcattaacgggctctttattatcattatcaaataatttagatacccaagcgaaagccgcacaaaaagatagtcaggcattacgtaatatttcgtatggcattttagcatcggacaagccttctgattttagagagtctttagataatgttaagtccggtttagaatacacaacgcaatataatcaacaatttatcgatacattaaaagagattgagaagaatgaaaatgttgatttatcaaaagaaattgataaggtaaaagcagctaataatcgaattaatgaatcattaaggttagttaatcaattaagcaatgcattaaagaatggtagttcaggaactgctgaagctactaaattactagatcaactttcaaaactagattcatcattatcatcatttagagattatgttaaaaaagatcttaacagctctttagtatcaatatcacaacgtattatggatgaattgaacaaagggcaaactgcattatccaatgttcagtctaaattaaatacaattgatcaagtcattaacagtggacaagctattttaaaaaatggtaaaacacgtattgatcgcttacaaacagtattaccaagtattgaacaacaatacattagtgctgttaaaaatgctcaagcaaacttcccgaaagtgaaaagtgatgtagctaaagctgctaactttgtgcgcaatgacttaccacagttggaacagcgattaactaatgcgacagcaagtgtgaataaaaatttaccaacgttattaaatggttatgatcaagcggtaggattactaaataaaaatcagccacaagcgaaaaaggctttatcagatttagctgatttttctcaaaataaattgcctgatgttgaaaaagatttgaaaaaagcgaataaaattttcaagaaattagacaaagatgatgcagtcgacaaattaatcgacacacttaagaatgatttgaaaaagcaagcgggtattattgcaaatcctattaataagaagactgttgatgttttcccagttaaggattatggttcaggtatgacaccattctatactgcactgtcagtatgggtaggtgcactcttgatggtaagtttattaacggttgataataaacataagagtctagagtcagtcttaacgacaagacaagtgttcttaggtaaggcaggattctttataatgcttggtatgttgcaagcactcattgtatcggttggagatttgttaatcctaaaagcaggagttgagtcacctgtattatttgtacttataacgattttctgttcgattattttcaactcaatcgtatatacgtgcgtatcattacttggtaacccaggtaaagcaattgcaatcgtattgcttgtattacaaattgcaggtggtggaggaacattcccaattcaaactacgccacaatttttccaaaacatttcgccatacttaccatttacgtatgcaattgattcattacgtgaaacagtaggcggtattgttccggaaatcctaattacaaaattaattatattaacgttatttggcataggattcttcgttgtaggtttaattttaaaacctgtaacagatccattgatgaagcgcgtatctgaaaaagttgaccaaagtaacgttacagaataa

SEQ ID NO: 415896 - DNA, 939 bp, Staphylococcus aureus
atggcattatttttacaacccgtttttaaagacagaatttggggcggtcatgcattaaaagcatttaactatgatatccctaatgaaacaactggtgaatgctgggcaatttctgcacatccaaatggtcctaatacaattatcaatggtccatacaaggatatgaccctagatcaactttggtcacaacatcgtgaattattcgataatgattcacgagatagtttccctctgctaactaaagtattagatgccaatgataaattatctgttcaagttcatccagatgatgactacgctttaaaacacgaaggcgaactaggtaaaacagaatgttggtatattttagatgcagccccaggtgctgaaattatatatggcgtacatgcacataataaacagacgttaatcgacatgattgataatcatgaatttgacagtcttttcaaacgtatacctgttaagcccggtgacttttattatgttcctgctggcactgtccatgccattggttcgggtattttaattttagagacacaacaatcatccgatacgacataccgtatttatgactatgatagacgagatcaaaatggtcaattgcgtgatttgcacttagagcaaagtaaagatgtgattgaattaggcaatcatgaaccaaatactactcctataacaactcacatcgacacacacactgtaactcaatttgtagataatcaatattttgcagtatataaatgggatattcatggagatttaaaattcaataaaccacatgcttattgcttagttactattatcgatggtactggtactttaacagtaaacgataagcactatgacatccaaaaaggttctagctttattttaactacggaagacgaggatattcactttgtcggtaatattagtgctatagtaagtcatcctggataa

SEQ ID NO: 415897 - DNA, 1953 bp, Staphylococcus aureus; identical to SEQ ID NO: 410913

SEQ ID NO: 415898 - DNA, 1875 bp, Staphylococcus aureus
atgcttgatagacacttaaaactactccagttttttattaaaaatccatcaaagcacattagttctaatgaaattgctgaacatgtcaatgtttcaaaccgcacagttcgcaatgatattcatgttatcaatagcaattttatggatgatatcatcgtaagtattaaatctaaaggatatcaattaaatacatcgcagtataccttagaaacgataactgaacgttacacgcatattcaatcatataaagaaaaactattattatctatggcgtatcaactgctaatgcacaataaatcgcagacattgcaacaactagagcaagattatctattatctaaaactgtgctcaacgactatttcgttcgaattcaacaatggtgtcaaaaatttaatatcgttttaacaatcaagaaaaaacaaggtattgtggtcgatggaacagataatgatatcactaatgccatcatccatttaaatcaattatcatcagggcatgtacatgttgaagacctaattttaaatgaattacctgattcacaccaaaggatgatttcgcatattatacaagagacacttcaacaacatagtattgaaacaactgatattcaaatacaacagcttttaattcatctcattttaatcattaaacgtaagcaatctttaagtgagctagacacgttaaaccatgatgcaaaattgatatctcaatcttgcattaagcaaatcaacgaaagattaggttatgacttgaacgaaaaagtaatcaatatgttttcattctttattgcttatcattttaataaactcgatattggtatagaacgtatatttatacaaagttatattgatcgcttaatcgaattgatgcagcaacgtattcatgtacctttcaatgaagattcgattttacaacaaaatttatataatcattttagtaaagcatatttacgtatcactcaaaacatttatttaaacaatcctttagttatagagattaaaaaactctatccctttgtgtttaacacactttttgaagcgattgataaattagcaattgatactgatatagagatgagcgaagatgaaattgcatttttaacaattcattttcaagctgccatcgagcgtcgtaccaaaacacaattaaatgtagtcattgcttgttattatggtctaggtgtgtcgaattttttagaaactaaaataaataacttatccgaagagttgtcagtaataaatacgattaaactagaaagtataacacactatcactttgacaatgtagatttattaataacgacccatgatattccaaaacaaacgctaaacatacttcctaagcacctgacgactatcaaggttgcaccattattttctgaagatgatcgtcacaaaatcagacacgttgtgaagcaaaagcaaaatccggttcaagcacatcatcatatggacactgtcaatttccttgtcgtaaatactgaacaaaaatcacggcatactgtgcaaatttttgaagaagctcaaaaaatattacaagcacatcatgcgattgtagaaggatatatcgaatcagctttagagcgtgagaaatcatcttctacatacataggtaattttatggcgattcctcatggagatcctgaaaaagttttacaatcacatgtgcttatttttcgcacaaaagatgtttttccttggcgacaacacgatgtaaaacttgtctttttcttagcgatttcgcataaagacaaagcttttacaaaacaaatgatgcaattaattgctaacttggatgatgattcagtgaaccatttatgtagtttagatgatcatagtttaaagcaacagttatttgaatacttacaagaataa

SEQ ID NO: 415899 - DNA, 459 bp, Staphylococcus aureus
ttgaaaaaacttcttattaccatcgtaattatcgtattaatcggagcacttgggttcgcaatttatgctgcaataaatcattctacatcatcaagtaataaccaagaacaagaaaataaatctacgcataaaaaaacagaaaccgaagaaaatgatcaacaagatgatagtgcagacaaaacagataaaaatcaaaataatggcaataacgatactaatgacaatcaaccatcttcaccgtcaaatgttcctaacaaccattcaacagtaccatcgaatacgcaaccagctcagccaaaagactcaaattcaaataaaaataatactcacggtggtggcagtcaatcgtcaacaaacaaccaaaataatcaacaacagaacacaccacctgctaataaatcaaataataccaatacgccttctaaacaaacacctcaagcacaatcacctaaaaattaa

SEQ ID NO: 415900 - DNA, 1530 bp, Staphylococcus aureus; identical to SEQ ID NO: 414914

SEQ ID NO: 415901 - DNA, 450 bp, Staphylococcus aureus
atgaagaaaagtaaacgattagaaattgtttctacaatagttaaaaagcataagatttataaaaaagaacaaatcatttcatatattgaagaatattttggtgtaagatatagtgcaacaacaattgctaaagacttgaaagaacttaatatatatcgtgtccctatcgattgtgaaacatggatttataaagctattaataatcaaacagaacaagagatgagagaaaagtttagacactattgtgaacatgaagttctaagttcaatcatcaatggttcatacattatcgttaaaacctcacctggtttcgcccaaggcataaactattttatcgatcagctaaatatagaagagatattaggtacggtgagtggaaatgacactacattaatcttaactgcctcaaatgatatggcagaatacgtatatgcaaaattatttaaatag

SEQ ID NO: 415902 - DNA, 1236 bp, Staphylococcus aureus
atgacagatggtccaattaaagtaaatagcgaaattggagctttaaaaactgtgttacttaagcgtcctggaaaagaattagaaaatttagtacctgattatttagatggattactatttgatgatattccatatttagaagtagctcaaaaagagcatgaccattttgcgcaggtgctaagagaagagggtgttgaagtactttaccttgagaagttagcagctgaaagtattgaaaatcctcaagtaagaagtgaatttattgatgatgtattagcagagtctaaaaaaacaatattaggtcatgaagaagaaattaagacattatttgcgacactttctaatcaagaacttgtagataaaataatgtcaggggtacgtaaggaagaaattaatccgaaatgtacacatctagtagagtacatggatgataagtatccattctatttagatccaatgccaaacctttattttactagagatccacaagcctcaataggacacggtataacaatcaatcggatgttctggagagcacgacgacgagaatcaatatttattcaatatattgtaaagcatcatcctagatttaaagatgcgaatattccaatctggttagatcgagattgcccattcaatattgaaggcggcgatgaacttgttttatctaaagatgtcttggctataggcgtttcagaacgtacatctgcacaagctattgaaaagttagcgcgacgtatttttgaaaatccgcaggcgacgtttaaaaaagtagtagcaattgaaattccaactagtcgaacttttatgcacttagatacagtatttacaatgatagattatgacaaatttacaatgcattcagccattttaaaggcagaaggcaatatgaatatatttattattgaatatgatgacgtaaataaagatattgccatcaaacaatctagtcatttaaaagatactttagaagacgtactaggtatagatgatatccaattcattccaacaggaaatggtgatgtcattgatggtgctagagagcaatggaatgatggctcaaatacattatgtataagaccaggcgttgtagtgacttacgatagaaactatgtatcgaatgatttattgagacaaaaaggcataaaagtcattgaaatatctggtagcgagctggtacgtggacgtgggggccctagatgtatgagtcaaccactattcagagaagacatttaa

SEQ ID NO: 415903 - DNA, 1011 bp, Staphylococcus aureus
atgacagaaattcaaaaaccgtatgatttaaaaggcagatcattattaaaagaaagtgattttaccaaagcagaattcgaaggacttattgattttgcaattacattaaaagagtataagaaaaacggtattaagcatcactacttatctggaaaaaatattgcactactattcgaaaagaattcgacgagaacgcgtgcagcgtttacagttgcgtctattgatttaggtgcgcatccagaatttttagggaaaaatgatattcaattaggcaaaaaagaatctgtagaggatactgcgaaagtattaggtagaatgttcgatggtattgaattccgtggtttttcacaacaagctgttgaagatttagcgaagttctctggtgtaccggtgtggaatggattaacagacgattggcatcctacacaaatgttagctgattttatgacaataaaagagaattttggatatctagaaggaataaacttaacttacgttggagatggacgtaataatattgcgcattcattaatggtagcaggtgctatgttaggtgttaatgtaagaatttgtacacctaaatcattaaatccaaaagaggcatatgttgatattgcaaaagaaaaagcgagtcaatatggtggttcaatcatgattacggataatattgcagaagcagttgaaaatacagatgctatatatacagatgtttgggtatcgatgggtgaagaaagtgaatttgaacaacgtattaatttattaaaagactatcaagtgaatcaacagatgtttgatttaacaggtaaagattcaacgatattcttacattgtttaccagcattccatgatacaaatacactttatggacaagaaatttatgaaaaatatggattagctgaaatggaagttacagaccaaatctttagaagtgaacattcaaaagtgtttgatcaagctgaaaatagaatgcatacaattaaggcagtaatggcagcaacattggggagttaa

SEQ ID NO: 415904 - DNA, 1431 bp, Staphylococcus aureus
atgaacgaatcaggagataacaaactcagtaaatcttctttaattggactagttataggatccatgattggtggcggtgcgttcaatataatgtctgatatgggcggtaaagccggtggattagccattattattggttggattattacagctataggaatgatttcattagcgttcgtatttcaaaatttaaccaatgaacggccggagctagacggtggtatttatagttatgctcaagcaggatttggcgattttgtaggatttatcagtgcttggggatattggttctcagcgtttttaggcaatgttgcctatgcaacactattgatgtcagcagtaggtaactttttcccgatttttaaaggaggcaacacattaccaagtattattgtcgcctcgttactactctggggtgtccatttcttgattttaaaaggcgttgaaacagcagcatttatcaatagtattgttactgttgcaaagttaatcccgattttacttgtaatcatatgcatgataattgcattcaattttgacacttttaaaacaggctttttcggtatgacgtcagagggtgtattgccatttagttgggcgagcacaatgagccaagttaaaagtacgatgctagtgacagtttgggtgtttatcggtatcgaaggtgcagtaattttttctagtagagctaaaaataaaaaagatgtaggtagtgccacggttataggacttatatcagttttaattatctatttcttattaactgtattagctcaaggcgtgattttgcaaaatcatatttctcaattagattcgccaagtatggcacaggtgcttgcaactattgtaggtggttggggatctacacttgtaaatattggtttaattatttcggtactaggtgcatggttaggatggacattgcttgctggtgaattacctttcattgttgcaaaagatggattatttccaaagtggtttgctaaagaaaataaaaatggagcacctgtaaatgcactgcttattaccaatatattagtacaattatttttaataagtatgctatttacacagagtgcgtatcaatttgcattttcactagcatcaagtgctattttatacccttacatgttcagtgcattttaccaagttaaatacactttagagcatcgacagcaagcaactactaaacaatggacgattggcatcatagcctcaatttatgctatatggcttatatatgcagcaggtatcaattacttattattgacgatgttactttatattccagctcttcttgtttattcaatcgttcaaaagaataatcagacacgtttgattaaatcagactatattctttttatgattattatcgtacttgcagttatcggattaattaagttattgatgggaacgataaatgttttttaa

SEQ ID NO: 415905 - DNA, 942 bp, Staphylococcus aureus
atgaaagagaaaattgtcattgcattaggcggtaatgcgatacagacaaaagaagcaacagctgaagcacaacaaacagctattagacgtgcgatgcaaaaccttaaacctttatttgattcaccagcgcgtattgtcatttcacatggtaatggcccacaaattggaagtttattaatccaacaagctaaatcgaacagtgacacaacgccggcaatgccattggatacttgtggtgcaatgtcacagggtatgataggctattggttggaaactgaaatcaatcgcattttaactgaaatgaatagtgatagaactgtaggcacaatcgttacacgtgtggaagtagataaagatgatccacgattcaataacccaaccaaaccaattggtcctttttatacgaaagaagaagttgaagaattacaaaaagaacagccagactcagtctttaaagaagatgcaggacgtggttatagaaaagtagttgcgtcaccactacctcaatctatactagaacaccagttaattcgaactttagcagacggtaaaaatattgtcattgcatgcggtggtggcggtattccagttataaaaaaagaaaatacctatgaaggtgttgaagcggttatagataaagattttgctagtgagaaattagcaacgctgattgaagcagataccttaatgattcttacgaatgtagaaaatgtatttattaactttaatgaacctaatcaacaacaaatcgatgatattgatgtagcaacactgaaaaaatacgcggcacaaggtaagtttgcggaaggatcgatgttgccaaaaatagaagctgcgatacgatttgttgaaagtggggaaaacaaaaaagttatcattaccaatttagagcaggcatacgaagctttgattggtaataaaggtacacacattcacatgtag

SEQ ID NO: 415906 - DNA, 705 bp, Staphylococcus aureus
atgacagaaaactttattttgggtagaaataataaattagaacatgaactaaaggcattagcagattacattaatatcccatatagtatattacaaccatatcaaagtgaatgttttgtcagacattatacgaaaggccaagttatttatttttcgccacaagaaagtagcaatatttactttttaattgaaggtaatattattagagaacattacaatcaaaatggagatgtatatcgttattttaataaagagcaagtattatttccaatcagtaacttatttcatccgaaagaggttaacgaattgtgtacagcattaaccgattgtacagttcttggattgcctagagaattgatggcttttttgtgcaaagctaatgatgatatatttttgacactttttgcattaataaatgataatgagcagcaacacatgaactataacatggcattaacaagtaaatttgctaaagatcgaattattaaattgttatgtcatctatgtcagacagtagggtacgatcaagatgaattttatgaaatcaaacagtttttaactattcaactcatgagtgatatggctgggatttcccgggaaacagctggtcatattattcatgaacttaaagatgaaaaacttgttgttaaagatcataaaaattggttagtaagcaaacatttattcaatgatgtatgtgtttaa

SEQ ID NO: 415907 - DNA, 2616 bp, Staphylococcus aureus
ttgaaaaaaagaattgattatttgtcgaataagcagaataagtattcgattagacgttttacagtaggtaccacatcagtaatagtaggggcaactatactatttgggataggcaatcatcaagcacaagcttcagaacaatcgaacgatacaacgcaatcttcgaaaaataatgcaagtgcagattccgaaaaaaacaatatgatagaaacacctcaattaaatacaacggctaatgatacatctgatattagtgcaaacacaaacagtgcgaatgtagatagcacaacaaaaccaatgtctacacaaacgagcaataccactacaacagagccagcttcaacaaatgaaacacctcaaccgacggcaattaaaaatcaagcaactgctgcaaaaatgcaagatcaaactgttcctcaagaagcaaattctcaagtagataataaaacaacgaatgatgctaatagcatagcaacaaacagtgagcttaaaaattctcaaacattagatttaccacaatcatcaccacaaacgatttccaatgcgcaaggaactagtaaaccaagtgttagaacgagagctgtacgtagtttagctgttgctgaaccggtagtaaatgctgctgatgctaaaggtacaaatgtaaatgataaagttacggcaagtaatttcaagttagaaaagactacatttgaccctaatcaaagtggtaacacatttatggcggcaaattttacagtgacagataaagtgaaatcaggggattattttacagcgaagttaccagatagtttaactggtaatggagacgtggattattctaattcaaataatacgatgccaattgcagacattaaaagtacgaatggcgatgttgtagctaaagcaacatatgatatcttgactaagacgtatacatttgtctttacagattatgtaaataataaagaaaatattaacggacaattttcattacctttatttacagaccgagcaaaggcacctaaatcaggaacatatgatgcgaatattaatattgcggatgaaatgtttaataataaaattacttataactatagttcgccaattgcaggaattgataaaccaaatggcgcgaacatttcttctcaaattattggtgtagatacagcttcaggtcaaaacacatacaagcaaacagtatttgttaaccctaagcaacgagttttaggtaatacgtgggtgtatattaaaggctaccaagataaaatcgaagaaagtagcggtaaagtaagtgctacagatacaaaactgagaatttttgaagtgaatgatacatctaaattatcagatagctactatgcagatccaaatgactctaaccttaaagaagtaacagaccaatttaaaaatagaatctattatgagcatccaaatgtagctagtattaaatttggtgatattactaaaacatatgtagtattagtagaagggcattacgacaatacaggtaagaacttaaaaactcaggttattcaagaaaatgttgatcctgtaacaaatagagactacagtattttcggttggaataatgagaatgttgtacgttatggtggtggaagtgctgatggtgattcagcagtaaatccgaaagacccaactccagggccgccggttgacccagaaccaagtccagacccagaaccagaaccaacgccagatccagaaccaagtccagacccagaaccggaaccaagcccagacccggatccggattcggattcagacagtgactcaggctcagacagcgactcaggttcagatagcgactcagaatcagatagcgattcggattcagacagtgattcagattcagacagcgactcagaatcagatagcgattcagaatcagatagcgactcagattcagatagcgattcagattcagatagcgattcagaatcagatagcgattcggattcagacagtgattcagattcagacagcgactcagaatcagatagcgactcagaatcagatagtgagtcagattcagacagtgactcggactcagacagtgattcagactcagatagcgattcagactcagacagcgactcagaatcagacagcgactcagaatcagacagcgactcagactcagatagcgactcagactcagacagcgactcagattcagatagcgattcagactcagacagcgactcagactcagacagcgactcagactcagatagcgattcagactcagacagcgactcagattcagatagcgattcggactcagacagcgattcagattcagacagcgactcagactcggatagcgattcagattcagacagcgactcagactcggatagcgactcggattcagatagtgactccgattcaagagttacaccaccaaataatgaacagaaagcaccatcaaatcctaaaggtgaagtaaaccattctaataaggtatcaaaacaacacaaaactgatgctttaccagaaacaggagataagagcgaaaacacaaatgcaactttatttggtgcaatgatggcattattaggatcattactattgtttagaaaacgcaagcaagatcataaagaaaaagcgtaa

SEQ ID NO: 415908 - DNA, 762 bp, Staphylococcus aureus; identical to SEQ ID NO: 415417

SEQ ID NO: 415909 - DNA, 456 bp, Staphylococcus aureus
atgtcgaccaataaaaacgattatgagcatatgttgttttattttgcatataaaacgtttattactaccgctgatgaaattatagagaagtatggtatgagccgtcagcatcatcgttttttgttttttatcaataaattacctggtattactattaaatcattactagaaatattagaaatttctaaacaaggatcacatgcaacacttcaaaaattaaaagagcaaggtctcattattgaaaaagttttagagactgatcgacgtgtcaaaaaattatattcgacggataaaggcgatcaactcattgctgaattgaacaaggcgcaagatgaattattgcaaaatatatatcaacaagtcggttcggattggtatgatgtgatggaagcattggctaaagggcgacctggctttgattttattaagcatttgaaagatgaaaaagaaagctag

SEQ ID NO: 415910 - DNA, 201 bp, Staphylococcus aureus
atgatactagtaatgttatctccattattaatcatattctttatagtgttgtctattttagaggagcgtaaacgtacgaagaaaaagcaactcgagaaagaaaaagcaaatacactaaatcaaaatacaaatgacacggaaagttcaaatcaagagccgtcattgcagcagactaaagaacaaaaagataacaaaggataa

SEQ ID NO: 415911 - DNA, 756 bp, Staphylococcus aureus
atgttgctagaagtgaaacatgtaaaaaaggtttatggtaaaggtttgaatgctacgacagcacttaatcaaatgaatttatcagttggagctggtgaatttgttgcaattatgggtgagtctgggtcagggaagtctacactactaaatttaattgcttcttttgatggactaactgaaggtgacattattgtggatggcgcacatttaaataatatgaaaaataaaagtaaagcattgtatcgtcaacaaatggtaggttttgtttttcaagattttaatcttttaccaacaatgacgaataaagaaaatataatgatgccattaattttagctggtgctaaacgaaaagatatagaacaaagggtacatcagttggcagtacaattacatttagagggattcttaaacaagtatccttctgaaatctctgggggtcagaagcaacgcattgccattgcacgtgcattagttactaagccgacgattttactagccgatgaacctacaggtgcacttgattcaaaaacgtcaaaggcattgatgatgttatttcaagagattcatcaattggaacagacaattttaatggtaactcattcaaatatcgatgcgtcttatgcagagcgagtcatttttattaaagatgggcgtctatatcatgaaatatatcgtggtgaagaaagtcaattagcttttcaacaacgaataacagatagcttagcacttgtgaatggaggaagtgtcaatatatga

SEQ ID NO: 415912 - DNA, 2001 bp, Staphylococcus aureus
atgaagttaagattgttatggcacatagtgcgacgtcaatttattacgcagcgacttgtaatcattccattcattttagcggtaagtgtactattcatgattgaatatacgcttgtgtcaattgggttaaatagctacataaaacagaagaatgacttcctagtaccatttattatcatagctaatttttttatggcgcttttaacttttatttttattttctatgcaaatcactttatgatgtcacaaagacgaaaagagtttagcatttttatgacattgggcatgaccaagaaaagtatgcgtttaattgtagtgatggaaactatcttacaatttgtgataatttcagtcgttagtattgccggcggatacttacttggtgcgatatttttcttgtttatacagaaaataatgggcagtgaagttgcgacgttaaggtattatccatttgactctgtagcgatgtttattactttgattatcattgctgtattaatgggcatgctacttatattcaacttgttcagtattaattttcaacggccgataacttatcaacatcgttccgattctagtgtcatatcacgatggttgcgttacgttttaattgttataggaagcgcagcactatatttaggttactttattgcattacaacaagatacgacgtttggtgccttttttaaaatatggattgtcataggattagttattatcggtacttatgcattttttgtaggtataagtgaaataattattagtatattgcagcaggtatcaaaagtttactatcatccacggtatttttttgtggtagttgggatgcgtgtacgtcttaaaatgaatgcagtcagtcttgcaacaatcactttgctgtgtacatttttgattgtaacgctcacaatgacattaacaacctatcgtgatatgaatcataccattacgaaattgattacgaatgattatgatttgtcatttagcgacaattctaagtcacaaatagaacgtcaacaaacaattgagaatattaaacgtgatatacagggttcggttaatgcaaaagacttcaaagtatatgaaacgacattatttagagcttctttagaaaagaatcgtgcttattacaagttaaaacaggctagtgatgatattccaatagacttcattggtaatgaaggcgcgatattttcaagacaatcagtaatgattacagcttttactgcacaagattataatcgatatcaccaaaacaaattacacttagacaatcaaagtataggtatgattacgaatgtacctatttttaaaaagcagtctaaggtcggtcttaataatgaagtctttaaagtgaaacaacttgacgcacatgcgttaaatttgatgatgattcaagatagtatggttttaattgttaaagataacaatcaattacaaaaagtaaaaggattttatgcacatgaacaaaaggattcgacaatatcgataaactttaatgtatttggaaagacgaaattaacaacatcacaaatacaaaagctatcgaaaaaatacgatgcgtcaataaattctaaatcagaaatgctaatggtttgggatcgtttgacaggtggactaatatttgtaggtggcgtagtatcaattgtacttgtcattggaatatttctaatgatgtactataaacaagtctcagaagcctatgcaaatcagcacaattatgacattatgaaaaaacttggtttagataatggaagaatagcaaagataacacgaaatcaaatgactttcttgttcgcaataccaataacagtagcactgattcacacattaatttctagtaacattgtatatacgttactaaatatgataggtattaataaccatcatatatttttaacaagttacgtactagctgtcattataatttcgtttctatatatggcgatgtacaaaataacttcctatatttatgctaaagttattcatcaacaacgtaattaa

SEQ ID NO: 415913 - DNA, 252 bp, Staphylococcus aureus; identical to SEQ ID NO: 408119

SEQ ID NO: 415914 - DNA, 498 bp, Staphylococcus aureus
atgaataatagaaatgtgtatgatatcgaagtaagtgattataaaggcttaacttataaattagaagcatttagaggtaaagtgattttagttgttaatactgcaacagaatgtatatatagcgaacaattgaaaaaactagagactttgtttcaaaaatataaggatcgtgggtttgtagtgttgagttttccgaataataattttgacaatcgacaaccaggttctaatgaagaaatcttgaaaattagtcgtgagaaatttggtgttacatttccagtgctagctaaaatatctgtgaacgggaacgatgaacatccgttatttacgcatttaaagaatgaacaaccaggaatctttgggtccccaataaaatggaatttcacaaaatttataatcgatcgacaaggcaatgttgtaaatcgattcttgccaatggaagatccattggatatatcgacaaatatagaaatattattgcaagaatcttcatcttaa

SEQ ID NO: 415915 - DNA, 1881 bp, Staphylococcus aureus
ttgaaattaaatacatctaatagtccatttacagaaaaacaagtcacagagattaacaatctgctgcaaacattaacagagagccaacaacagtggcttagtggttttttactagctaatagtaacgatacgacaagtgatagtaatcaacaacaattagagacagaagtgtggcaacaatcacaaatatcagaagaacaagcaacttcaacaacgtatatgttacaaaataaagagccacatatcgaagctaatcagcggcatgttacagtgctatatggttctgaatcaggtaatgccatgcgtttagctgaaattttttcagaacgtttaagtgatatcggacatcaagttgttttgatgtcaatggatgaatatgatacgacaaacatcgcacagttagaagatttatttattattacgtctactcatggtgaaggagaaccgcctgataatgcatgggatttctttgaatttttagaagacgataacgcacctaatttaaatcatgtgagatattcagtactagctttaggtgatcaaacatatgaatttttctgtcaagctggtaaagatgtagatgctttactagaaaatctaggcgctgagcgtatatgtaagcgtgtagattgtgatattgattatgaagaagacgcagaaaagtggatggcagacatcattaatatgattgatactacatcagaaggtattcaaagtgaatcggtgataagtgaatcaattaagtctgccaaagaaaagaaatattctaaattaaatccataccaagcagaagttttagcgaatatcaatttaaatggtaccgattcaaataaagaaacacgacatatagaatttttacttgatgattttagtgaatcatatgaaccaggagattgtatagtagcattaccgcaaaacgaccctgaattggttgaaaaactaatatccatgttaggttgggatccgcaatctccggtgccaattaatgatcgtggtgatacagttcctattgttgaagcactaacatcacattttgaatttactaaattaacattgccattattgaaaaatgcagatatctattttgacaatgaagaattatctgaacgtattcaagatgagtcatgggcgcgtgaatatgttataaatcgggactttatagatttaataacagattttccaactatagaattacaacctgagaatatgtatcaaatccttagaaaattaccaccaagagagtattcgatttctagtagttttatggcaacgccagatgaagtgcatattaccgttggtacggttcgttatcaagcacatggacgtgagagaaaaggtgtatgctcggttcattttgctgagcgaattaaaccaggcgatatagtaccaatttatttgaagaaaaatccgaacttcaaatttccgatgaagcaagatataccggttattatgattggaccaggtactggaattgctccttttagagcatatttacaagaacgtgaagaacttggtatgactggaaaaacatggttgttctttggtgatcaacaccgtagttctgactttttatatgaagaagaaatagaagaatggcttgaaaatggaaacttaacacgcgtagatttagcattttcaagagaccaagaacacaaagaatatgtacagcatcgtataatggaagaaagtgaacgtttcaatgaatggattgagcaaggcgcagcaatctatatttgtggcgatgaaaaatgtatggcgaaagatgtccatcaagccattaaagatgtattggtaaaagaacgtcatatttctcaagaagaagcagagttattattgcgacaaatgaaacaacaacaacgctatcaacgtgatgtttattag

SEQ ID NO: 415916 - DNA, 606 bp, Staphylococcus aureus
atgaatatgccattaatgatagatttaacaaataaaaatgtcgtcatagttggtggaggcgtcgttgcaagtcgtcgggcacaaacattaaatcaatacgttgaacatatgacggtcatcagtccgacaatcactgaaaaacttcaaaatatggtagataacggtgtcgtcatatggaaagaaaaagaatttgaaccaagcgatattgtagacgcgtatctagttattgcagcaaccaatgagccacgtgtcaatgaagcggtaaaacaagccttacctgagcatgccctttttaataatgttggagatgcatcaaatggcaatgttgtatttccaagtgcactacaccgcgacaagctaactatcagtgtatcaactgatggtgcgagtcctaagttgacaaaatcaattatggcagagcttgaggcgttatatccaccatcatacagttcgtatatcgactttttatatacttgccgacagaaaataaaagtacttgatataacatataacgaaaagcaacagttactgtcacaaattgtgtcacaagaatatttaaatcatgacaaacaagctcaatttttagcgtggttggatgtaagataa

SEQ ID NO: 415917 - DNA, 1371 bp, Staphylococcus aureus
atgaatagtgataatatgtggttaacagtaatggggctcattattattatttcaattgtaggtttactcattgccaaaaagataaatccagttgtaggtatgacaatcataccttgcttaggggcaatgattttaggatatagtgtgacagatttggttggattttttgctaaagggttagatcaagtcatcaacgttgttattatgtttatctttgccattattttctttggcatcatgaacgatagtggtttattcaagccgcttgtcaaacgcttaatattaatgacacgaggcaatgtcgtcattgtctgtgcaatgacagctttaattggcacaatagcccaattagatggggccggtgcggtaacatttttgctttctattcctgcattattacctttatataaagcgttaaatatgaataaatatttattgattttactattagcattaagcgcggcgattatgaacatggtaccttggggaggtccaatggctcgtgtagctgcagtgttaaaagccaaaagtgtcaatgaattatggtatggattaatacctattcaaataataggtttcattcttgttatgttgtttgcggtatatcttggatttaaagaacagaaacgtatcaaaaaagcaatagagagaaatgaattaccgcaaacacaagatatagatgtacataaattagttgaagtatatgaacgagatcaagatgtaaggtttcctgtaaaaggacgtgcaagaacaaaatcatggataaaatgggtgaatacagctttaactttagctgttattctatcgatgttaataaatattgcgccacctgaatttgcattcatgataggtgtctcattggcgcttgttattaattttaaatcagtggatgaacaaatggagcgattaagagcgcatgcgccgaatgcattaatgatggctgcagtgattattgcagcaggtatgtttttaggtgtactaaatgaaaccggtatgcttaaagcgattgcgaccaatttaatcaaagtgattcctgcagaagtaggaccatacttgcatattattgtaggtttacttggcgtaccattagatttactaactagcacagacgcttattattttgctgtgttaccgattgtcgaacaaacagcagggcaatttggtgtaccgtctgtatcaacagcttattcaatggtcatagggaatattataggtacatttgtcagcccattttcaccagccttatggttggcaattggtttagcagaggcaaacatgggcacgtatattaagtatgcattcttttggatttggggattcgccatcgttatgttagtaattgcaatgttgatgggcattgtgacgatttaa

SEQ ID NO: 415918 - DNA, 1851 bp, Staphylococcus aureus
atgaatcaaatcgaagaagcattaacgggtttgatttctaaagatcctgctattgttaacgaaaatgccaacaaagatagtgatacattttcaacaatgagagatttaacagcaggtatcgtttctaaatcttacgcattaaattatttattaccaaagcacgttgcagatgcacatcaaagaggggacatacattttcacgacttagattatcatccattccaaccgttaacaaactgttgtttaatagatgctaaaaatatgctacataatggatttgaaataggcaacgcgaatgtaacttcaccaaaatcaatacaaactgcatcagcgcagcttgtacaaattatagccaatgtttccagcagtcaatatggtggctgtacggttgaccgcgttgacgaattacttagtacatatgcacgacataatgaagaacaacatagaaatatcgcaaagcaatttgtcaaagaatctgaaattgatcgttatgttgatcaacaagtcactaaagacatcaatgatgcgattgaaagtctagaatatgaaattaataccttatatacatctaatggacagacaccttttgtaacattaggattcggcttaggtacagatcatttaagtcgcaaaattcaacaagctatcttaaatactcgtatcaaaggcttaggaaaagaccgcacgacagcgattttcccaaaacttgtattttcaattaaaaaaggaaccaactttagtccgcaagatccgaactatgacattaaacaactagcattaaagtgttcaacgaaacgtatgtatccagatattttaaattatgacaaactcgtagaaatattaggtgatttcaaagcgccaatgggttgtcgttcatttttaccaagttggaaagatgcggaaggtcattttgaaaataatggtcgttgtaatcttggtgttgttacacttaatttacctagaatggcattagaatctgccggtaatatgacgaaattctgggaaatcttttatgaacgtatcgatgtgttacatgatgcattactttatcgtataaatcgtttgaaagatgctgtaccgaataacgcaccaattttatataaaagtggcgcttttaactataaattaaaagaaacagatgatgttgctgagttatttaaaaataaacgtgcaacgatttcaatgggctatatagggttgtatgaaacagctactgttttctatggtccagactgggaaacatctcaagaagcaaaagcatttacgcttgaaattcttaaagaaatgaaacgttatcaaacgaaatggacagaattatatgacatttggttcagtatttacagtacgccgagtgaatcgctaacggatcgtttttgtcgtttagaccaagagagatttggagatattaaagacattacagataaaggatattatcaaaactctttccattatgatgtacgtaaagatgttacaccttttgaaaagttagattttgaaaaagattatccttattatgcgagtggtggtttcattcactattgtgagtatccgaaattgcaacacaatttgaaagcactagaagcggtatgggactactcttatgacaaagttggttacttaggtacaaatattccgattgatcattgttatgaatgtgattacgatggagattttgaagcaactgaaaaaggatttaaatgcccgaactgtggcaatgataatcctaaaacagttgatgtcgttaaacgaacatgtggttacttaggcaatccagttcaacgtccagtaattaaaggccgtcataaagaaatttgcgcacgagtaaaacatatgaaagcgcctaaagaatga

SEQ ID NO: 415919 - DNA, 537 bp, Staphylococcus aureus
atgacacttttagacattaaacaaggacaaggttatattgctaaaatagaatcaaatagctttgttgacggtgaaggagtaagatgcagtgtttatgtatcaggatgtccatttaattgtgttggatgttataacaaagcctcacaaaagttcagatatggcgagaaatacactgatgaaatattagcagaaatattagatgattgcgatcatgattatatatctgggctaagtctattaggtggcgaaccattttgtaatttggatattacattaaatcttgtcaaagcatttcgagcacgttttggaaatacaaagacaatttgggtatggactggatttttatatgaatatttagcaaatgattgtacagaacgtcgagagttattatcatacattgacgttttagtagatggtctatttatacaacacttattcaaacctgatttaccatataaaggttctttaaatcaacgcattatagatgtacaacaatcactctcgcatgcgcgtatgattgaatatatagttagttga

SEQ ID NO: 415920 - DNA, 1623 bp, Staphylococcus aureus
ttgaaaaaagagaaagttatggactggacgacctttatagggacagtagctgtacttctttttgcagttatacctatgatggcttttccaaaagcaagtgaagatatcatcactggtattaatagtgccatttctgattcaattggttcgatatatttatttatggggctggcgattttttgctttgtaatgtatatcgcatttggtaaatatggtaatgtcacacttggtaaagcaagtgataaaccagaatttaatacatttacatgggcggcaatgctgttttgtgcaggcataggctctgatattttatactggggcgttattgaatgggctttttactatcaagttccaccaaatggcgcgaaaagtatgagtgatgaagcactccaatatgcgacgcaatatggtatgttccactggggaccaattgcttgggctatttacgttttaccagcattaccaattggttatttagtgtttgttaaaaaacaaccggtgtataaaattagtcaagcttgtcgtccgattttaaaaggtcaaacagataaatttgtaggtaaagttgtagatatcttatttatctttggattgctaggtggtgcggcaacatcactagcgttaggtgtgccattaatttctgcaggcatagaaagattaactggtttagatggtaaaaatatgattttacgttcggctattttattaacgattacggtcatatttgctattagttcatatacaggattgaaaaaaggtattcaaaagttaagtgatatcaacgtttggctatcatttgtacttttagcctttatatttattattggaccgactgtttttattatggaaacgacagtgacagggttcggaaatatgttgagagattttttccatatggcaacatggttagaaccattcggtggtattaaaggtcgaaaagaaacgaatttcccacaagactggacaatattctactggtcatggtggttagtatatgcgccatttatcggtttatttatcgctagaatttcaaaaggtagacgccttaaagaagtcgtgctaggaacaattatttatggaacgcttggatgcgtattattctttggtatttttggtaactatgctgtgtatttacaaatttctggacagtttaatgtaacacaatatttaaatacacatggtacagaggcaaccattattgaagtggtgcatcatttaccattcccatcattgatgattgtactattcttagtatctgctttcttattcttagcaacaacatttgattcgggttcatatattttagcggcagcatctcagaaaaaagtggtaggcgaaccattacgtgccaatcgtttattctgggcatttgcattgtgcttattgccattttcattgatgctagttggtggcgaacgtgcattagaagtattgaaaactgcttcaatactggcaagtgtgccattaattgttatttttattttcatgatgatatcatttttaatcattttagggcgcgatagaattaaacttgaaacgcgtgctgaaaaattaaaagaagttgaacgtcgttcattgcgaatcgttcaagtatcagaagaagaacaagacgataatttataa

SEQ ID NO: 415921 - DNA, 564 bp, Staphylococcus aureus
atgactcgttctcagaacaaacagcaacaattagaacaagcaaaagatattgtaattaattcaattggacagacaatggatttgtatggcactaatagaagtgtaggaaacttatatggcactatggtgtttgaaggcagtatgacgcttgatgaaatgcgtcatcaattgcaaatgagcaaaccaagtatgagtgctggcgttaagaaattgcaggaatttgatattgttaaacaacaatttacgagaggaagccgcaaacaacattttatcgccgagaaagactttttcatctttttccgaaactttttcactaaaaaatttcagcgtgaaattgacatcaatgtcgaagcagtaaaagatgctcaagctattatcaatccattacttgaaagcagtgatttaactgaagctgaaacacaagaggcacaaaaaattaaagctcagcttgatcatacacatgtttattacgaatggttagaacagttaaccgaagcgattgaaagcggtgaaattttcaaatatttcccaattccagaacagccttctgattctgaaaattaa

SEQ ID NO: 415922 - DNA, 1491 bp, Staphylococcus aureus
atggaacttttaaaacatttatctcagcgtcaatatattgatggtgagtgggttgaaagcacgaataaaaatacaagagatattatcaatccttacaatcaagaagtgatatttacggtttctgaagggacaaaagaggatgcagaacgtgcaatcttagctgcaagacgtgcgtttgagtctggtgaatggtcgcaagaaactgctgaaaaaagaggtaaaaaagtacgtgccatcgcggacaagatcaaagaacatcgcgaagcgttagcacgattagaaacattagatactggaaaaacgttagaagaatcatatgcagatatggatgatattcataatgtgtttatgtattttgctggattagcagataaagatggtggcgaaatgattgattcaccaattccagatacagaaagcaaaattgttaaagaaccagtaggtgtagttacacaaattacaccttggaattatccgttattacaagcatcatggaaaattgcgccagcgcttgctacgggttgttcactagttatgaaaccaagtgaaattacaccattaacaacaatacgtgtttttgaattaatggaagaagttggtttccctaaaggaacaattaatcttattctaggtgcaggttctgaagttggtgacgtaatgtcaggtcataaagaggttgaccttgtatcatttacaggtggcattgagactggtaagcatattatgaaaaatgctgctaataatgttacgaatattgccttggaacttggcggtaaaaatccaaacattatctttgatgatgctgattttgaattggcagtagaccaagcgttaaatggtggatattttcatgcaggtcaagtttgttcagcaggatcaagaatattagtacaaaacagtattaaagacaaatttgagcaagcacttattgatcgcgtgaaaaaaatcaaattaggtaatggttttgatgctgatactgaaatgggaccagtgatttcaacagaacatcgtaataagatcgaatcttatatggatgtagctaaagcagaaggcgcaacaattgctgttggtggtaaacgtccagatagagacgatttaaaagatggtctattcttcgagccaacagtcattacaaattgtgatacgtcaatgcgtattgtacaagaagaggttttcggacctgtcgttactgtagaaggctttgaaactgaacaagaagcgattcaattagcgaatgattctatatatggtttagcaggtgctgtattttctaaagatattggaaaagcacaacgcgttgctaacaagttgaaacttggaacggtgtggattaatgatttccatccatattttgcacaagcgccatggggtggatacaaacaatcaggtatcggtagagaattaggcaaagaaggcttagaagagtaccttgtttcaaaacacattttaacaaatacaaatccacaattagtgaattggtttagcaaataa

SEQ ID NO: 415923 - DNA, 1710 bp, Staphylococcus aureus
atgagtaacaaaaataaatcatatgattatgtcatcattggaggaggcagtgcaggttctgtactaggtaatcgtctgagtgaagataaagataaagaagtcttagtattagaagcgggtcgcagtgattatttttgggatttatttatccaaatgcctgctgcgttaatgttcccttcaggcaataaattttacgattggatttattcaacagatgaagaaccacatatgggcggtcgtaaagtagcacatgcccgaggtaaagttttaggtggatcaagttcgattaatggcatgatttatcaacgtggtaatccaatggactatgaaggctgggcagaaccagaaggtatggaaacttgggattttgcgcactgtttaccgtattttaaaaaattagaaaaaacatacggtgcagcgccttatgataaatttagaggccatgatggaccaattaagttaaaacgagggccagcaacgaatcctttattccagtcattctttgatgcaggtgttgaagcaggttatcataaaacacctgatgtgaatggatttagacaagaaggttttggaccgttcgatagtcaagtacatcgtggtcgccgaatgtcagcttcaagagcatatttacatccagcgatgaagcgtaaaaacttaaccgttgaaacacgtgcctttgtaactgaaattcattatgaaggtagaagagcaactggtgttacgtataagaaaaatggcaaactacataccatcgatgctaatgaagtcattttgtctggtggggcattcaatacgccacaattactacaattatctggtatcggtgattcagagttcctaaaatcaaaaggcattgagccacgtgttcatttaccaggtgtgggtgaaaactttgaagatcacttagaggtatacattcaacataaatgtaaggaacctgtatcattacagccaagcttagatatcaagcgcatgccatttattggtttacaatggattttcacacgtacaggtgcagcagcatctaaccattttgaaggtggcggatttgtacgttcaaataacgaagttgattatcctaacttaatgttccatttcttaccaatagctgtaagatatgatggtcaaaaggcagcggtcgcacatggttatcaagttcacgtaggaccaatgtattcaaactctcgtggtagcttgaaaatcaaatctaaagatccattcgaaaaaccaagtatccgctttaattatttatcaacagaagaagataaaaaagaatgggtagaagcaattcgtgtagcaagaaatatcttatctcaaaaagcaatggatccattcaatggtggagaaatttcaccaggaccagaagtgcaaacagacgaagaaattcttgattgggttcgtagagatggtgaaacagcattacacccatcttgtagtgctaaaatgggtcctgcttcagatccaatggcagtagttgacccgttaacaatgaaagtccacggtatggaaaatttacgtgtagttgatgcatccgctatgccacgtacgacaaatggcaatatacacgcacctgttttaatgttagctgaaaaagcagcagacattatacgtggcagaaagcctttagagccacaatatattgattattataagcatggtgttcatgatgaaaatgaaggtgcaatcgaagtaaaaccatacgctaaataa

SEQ ID NO: 415924 - DNA, 213 bp, Staphylococcus aureus; identical to SEQ ID NO: 404795

SEQ ID NO: 415925 - DNA, 444 bp, Staphylococcus aureus
atgaacatttatgatgaatatagaagttatttaatagaagaactggatgattgtctcacaatacaaaaaaataatgacactgcatattacgatgtgctagaagcgataaatgatttatcaaatgattcattatgtgtgttaaatcatttatatattaacgaaggacaagaagaaacattcgagcaaaaatttttgcaacgtaataagcatttaaaaaacgttgatgggtttaaagcattaaggtttttaagacctagaacagctggtagacactatatcattattacgctgtgggaaaataggcaagcattttatcattggcaaaattcagctgagtacaagcatacacacaagcatcgtggcacttcgaaaggtgcagatgtaaaaataattaatcgtgaattatcatacaatattcgtattgaattagctgatatggtctag

SEQ ID NO: 415926 - DNA, 1599 bp, Staphylococcus aureus
atgcaaaagtcagctctattcgcgcctgaaaaatataacattatttcggaaatcgaaaaatatagccacataccagataaaaaggcaattttatatcataatactgaaggcgaagatatatcagtcacttaccaacagctcattgaacagtctaataaagtaggtaatgttttagcatcgcacggtttatctaaaggcgataaagtactcattatgatgccacgatctattgcgacgtatgaattatatattgctgctttaaaattaggtgttgcaatcattccatgttctgaaatgctaagaactaaagatttacaataccgtatcacgcacggtgaaataaatgcagttattgcactagagccattcacagttgaatttgaaaaaattaaagaatatgatgcgttaactaaatttgttattgccggtcaaaaagatggatggatttcacttgaagctgaaaaagaaaacgcaagtaacaaactagaaatggcagatacgacgcgtgatgatatggcgattctgtcatatacatctggtacaactggcaatcctaaagccgttacacattgtcatggatggggatttgcacatttacaaatggcaccaaaacattggttatgtattaatgaagatgacttagtttgggcaacagcagcaccaggttggcaaaaatgggtatggagtcctttcttatctgtattaggttcaggtgcaactgcttttgtatttaatggaaggttcagtcctgaaacatacttagaattgcttcaaaaatatcaaattaatgttttatgttgtacaccgacagaatatcgtatgatggctaaattacagaacttaaatgattatgacttaacgcatttacatagtgccgtttctgcaggtgagccactaaatcgagaagtagttgaacaattcaagaaatactttaatttaactgtaagagatggatatggccagactgaaagtaccttgcttataggctttttaaaagatacaccacagaggattggatcaatgggtaaaggcattccaggtagttcggtcactgtagtagatgatgaggggaatagcgtacctgctaatacgaaagggaatattgcagtaccacttgatttgccagcacttttcaaagggtattataaagagccagaacgtacggcgaaagcgcaaacaggtaaatactacatcactggtgacttagctcatgtagatgatgatggttatttctggtttgaaggacgtcgagatgacattattattagttcaggctatacgattgggccttttgaagttgaagatgcgttaacgaatcatccagccgttaaagaatgtgctgtagtagcaaaacctcatgatatacgaggaaatattgttaaagcattcgttattttacaggaccatactgcgggtgatgatacgttagttaaagaactacaacaatttgttaaaaatgaagttgcaccatataaatatccgagagagattgaattcgttgacgacttaccaaaaacaaactcaggtaaaattcgtcgtgttgaactacgagattctgaaatagaaaaatggcaacaacaaaaagatagcaatcaataa

SEQ ID NO: 415927 - DNA, 1497 bp, Staphylococcus aureus; identical to SEQ ID NO: 408120

SEQ ID NO: 415928 - DNA, 891 bp, Staphylococcus aureus
atgaataaagagcaattagaaaaaatgaaaaatggaaaaggctttattgccgcattagaccaaagtggtggtagtacaccaaaagcacttaaagaatatggtgtaaacgaagatcaatatagcaatgaagacgaaatgttccaacttgttcacgatatgcgtacacgtgtggtaacttcaccttcattctcaccagataaaattttgggtgctattcttttcgaacaaacaatggatcgcgaagtagaaggcaaatacactgcagattacttagctgataaaggtgttgttccgttcttaaaagtagacaaaggtcttgctgaagagcaaaatggtgttcaattaatgaaaccaatcgacaacttagacagtttattagaccgtgcaaacgaacgtcacatttttggtacaaaaatgcgttctaacattttagaattaaatgagcaaggtatcaaagacgttgttgaacaacaatttgaagttgctaaacaaattattgctaaaggtttagtgccaattatcgaaccagaagttaatattaatgcaaaagacaaagctgaaattgaaaaagtattaaaagctgaacttaaaaaaggtttagatagcttaaatgctgatcaattagtaatgttgaaattaacaattcctactgaaccaaacttatacaaagagttagctgaacatcctaatgttgttcgtgtcgttgtattatcaggtggttacagcagagaaaaagcaaatgaattacttaaagataacgatgaacttatcgcaagtttctcacgtgcattagctagtgatttaagagctgatcaatctaaagaagaattcgataaagctttaggtgatgctgtagaatcaatctacgacgcatctgtaaacaaaaactaa

SEQ ID NO: 415929 - DNA, 417 bp, Staphylococcus aureus; identical to SEQ ID NO: 404800

SEQ ID NO: 415930 - DNA, 1338 bp, Staphylococcus aureus
atgagtaaagcacatcaattaattcaagaggatgaacattattttgcgaaatcaggacgtattaaatattatccgttagtgattgatcatggatatggagcaacattggttgatattgaggggaagacatatatcgatttgttatcgagtgcaagttctcaaaacgtaggtcatgcacctagagaagtaacagaagcgataaaggcacaagttgataaatttattcattatacaccagcatatatgtatcatgaaccgttggtacgtttagctaagaagctttgtgagcttgcacctggagattttgaaaaaagagtgaccttcggattaaccggatcagacgcaaatgatggcatcattaaatttgccagagcatatacagggcgtccttatatcattagtttcactaatgcatatcatggttcaacttttggctcattgtctatgtcagctattagtttaaatatgcgcaaacattatggtccgttattgaatggtttttatcatattccgtttccagataaatatcgtggtatgtacgagcagccacaagctaattcagtagaagaatatttagcacccttaaaagaaatgtttgcgaaatatgtacctgctgacgaagtagcatgtattgttattgaaacgatacaaggcgatggtggacttttagaaccagttccagggtattttgaagcgttagaaaagatttgtcgtgaacatggtattttaatcgctgtcgatgatattcaacaaggttttgggcgaacaggtacatggagttcagtctcgcattttaattttacgcctgatttaatcactttcggaaaatccttagcaggtggtatgcccatgtcagcaattgttggacgcaaagagattatgaattgtttagaagcaccagcacatttatttacaacaggtgctaatccagttagttgtgaagctgcattagccacaattcaaatgattgaagatcagtcgcttcttcaggctagtgcggaaaaaggggaatatgttaggaaacgaatggatcaatgggtatctaaatacaatagtgtaggcgatgttagaggtaaaggtctgagcattggtattgatattgtttccgacaaaaaactcaaaacacgtgatgccagtgcggcacttaaaatttgtaattactgctttgagcatggcgtagttattatagctgtagcaggaaatgtgttgcgattccaaccgccattggtgataacatatgagcaattagacacggcgttaaacactatagaagatgcactgactgctttggaagcaggtaacttagatcaatatgacatatctggacaaggttggtaa

SEQ ID NO: 415931 - DNA, 1449 bp, Staphylococcus aureus
atgggaagttttttcaataaaatagcacgaaaagaggatccggctatctatcaaaataaagatggtcatttaaagcgtacacttcgggtgcgtgatttcttagctttaggtgtaggaacaattgtatcgacatctatctttacgctacctggcattgttgctgcagaacatgcaggaccggccgttgcgttatcattcttactcgctgctattgttgctggtttagttgcatttacttatgcagaaatggctgccgctatgccatttgcaggttcagcctattcttgggtcaatgtattatttggtgaattttttggatgggttgccggttgggctctattagctgaatattttatcgccgtagcctttgttgcatcaggattctcagcgaatttacgcggacttgtgaaaccaattggcatcgaattacctgcagcattatcaaatccatttggtacgaatggcggttttatcgatattattgctgctatcgttattttattaactgcattattactatcacgtggtatgtcagaagcagcacgtatggaaaacattttagttattttaaaagtattagctattattttatttgtcatcgtaggtttaacagcaataaatgttagtaactatgtgccatttattccagaacacaaagtaactgctacaggtgactttggtggatggcaaggcatatatgctggtgtttcaatgattttcttagcgtatatcggtttcgattctatcgcagcaaactcagcagaagcacttgaccctcaaaagacaatgcctagaggtattcttggttctttaagtgttgctatcgtattatttattgctgtagcacttgtgttagttggtatgttccattactcacaatacgcaaacaatgctgaacctgttggttgggctttacgtcaaagtggtcatggtgttgtagcagctattgttcaagctatctctgttatcggtatgtttacagcattaattggtatgatgttagcaggctcacgtttactttattcatttggacgtgacggcttattaccttcatggttaagccatttaaacgacaaacatttacctaatcgcgcactagttatacttactattattggtgttttaattggttctatgttcccattcgcatttttagcacaattaatttcagcaggtacacttgttgcatttatgttcgtttcattagcaatgtatcgtttgagaaagcgtgaaggtaaagatctaccaattcctgcatttaaattacctttatatcctgtgttaccagcaattacatttgttttagtattgctagtattctggggattaggattcgaagcgaaattatacactttaatttggtttattgttggtatcattctatatttaagttatggacttagacattctaagaaaaatgatgtagctgaataccacccaccaaaataa

SEQ ID NO: 415932 - DNA, 960 bp, Staphylococcus aureus; identical to SEQ ID NO: 408195

SEQ ID NO: 415933 - DNA, 705 bp, Staphylococcus aureus
atgacgaatgtcttgtatcaacatggtacattaggtacgttaatggctggcttactagaaggaacagctacaattaatgaattgttagaacatgggaatttagggattgcaacgttaacagggtctgatggcgaagtaatatttttagacgggaaggcatatcatgctaacgagcataaagaatttatagaattaaaaggcgatgagaaagtaccgtatgcatcgattactaattttaaagcgagtaagacatttccattgcaacaattatcacaagatgatgtattcgcacaaattaaaaatgaaatgttaagtgagaatttattttcggctgttaaaatttatggcacatttaaacatatgcatgtacgaatgatgcctgctcagcaaccgccatatacacgtttgattgattcagcacgcagacaacctgaggaaaaaagacaagatattcgtggtgccattgttggattttttacaccagaattatttcatggcgtagggtctgctggttttcatatacattttgcggatgatgaaagagcttatggtggacatgttcttgactttgaagtggatgacgttgtcgttgagatacaaaactttgaaacattccaacaacatttcccggtaaataatgagacgtttgttaaagcgaaaatagactataaagatgtggcagaagaaattagagaagctgaatag

SEQ ID NO: 415934 - DNA, 861 bp, Staphylococcus aureus
atgttatcagttgcgattatcggcccaggcgctgtcggtacaactattgcctatgaattacaacaatcattgcctcatacaacgcttatcgggagacacgccaaaacaataacatattatactgtaccacatgcacctgcacaagatattgttgtgaaaggttatgaagatgtcacaaacacatttgatgttattattattgcagtcaaaacacatcaacttgatgccgttattcctcatttaacttatcttgcacatgaggacacgctcatcattttagcccaaaatggttatggtcaactcgaacatattccatttaaaaatgtatgccaagcagttgtctatataagtggtcaaaagaaaggcgatgttgttacgcacttcagagattatcaattacgtatacaagataatgcattaactcgacaatttagagatttggtccaagacagtcaaatcgacattgtattagaagcaaatattcaacaagctatttggtataaattgttagttaacttgggcattaattctatcacagcactcgggagacagacagttgcaatcatgcataatcctgaaatacgtatactgtgtagacagttattactagatggttgtcgtgttgcacaggcagaggggttaaacttttcagaacaaactgtcgatactattatgactatatatcaaggttatcccgacgaaatgggaacgagcatgtattacgacattgtgcatcagcaacctcttgaagtcgaagcgattcaaggctttatttatcgacgtgcacgtgaacacaatcttgacaccccatatcttgatactatttatagctttttacgcgcttatcaacaaaatatgtaa

SEQ ID NO: 415935 - DNA, 819 bp, Staphylococcus aureus
ttgaaaacagtaagtcaattaatagatatgaaacaaaagcaaactaaaatttctatggtaacagcttatgattttccaagtgctaaacaagtggaagcagcgggtattgatatgattcttgttggggattcacttggtatgactgtattaggttatgaaagtaccgtacaagtgacgttagcagatatgattcatcacggtcgtgcagtaagaagaggcgcaccaaatacatttgtagttgttgatatgccgattggtgcagtaggcatctctatgacacaagacttaaatcatgctctaaagctttatcaggagacgaatgcaaatgcaattaaagcagaaggagcgcatattacaccatttattgaaaaagcaacggcaattggtattcctgttgttgcacatttaggattaacacctcaaagtgttggcgttatggggtataaattacaaggtgcaacgaaagaagcagcggagcaacttattttagatgcgaaaaatgtagaacaagctggtgcagttgcgttagtacttgaagcaattccaaatgatttagcagaggaaattagcaagcacttaacaattccagtcattggtattggtgcaggaaaaggtacagatggtcaagtattggtttatcacgatatgttaaattatggtgttgaacataaagcgaaatttgtgaagcaatttgctgattttagtgttggtgtggatggtttaaaacaatacgatcaagaagttaaatctggtgcatttccatcagaagaatatacgtataaaaagaaaattatgaatgaggttaataacaatgactaa

SEQ ID NO: 415936 - DNA, 852 bp, Staphylococcus aureus
atgactaagctgattactacggtaaaagagatgcaacacattgttaaagcagccaaacgctcaggaacaacgattggttttatcccaacaatgggtgccttacatgatggacatttaacgatggtacgcgaatcagttagtacaaatgatattacagttgtgagtgtatttgttaatccattacaatttggtccaaacgaagatttcgatgcttatccgagacaaattgataaagatttagaattagtatcagaagtaggggcggacattgtttttcatcctgcagtagaagatatatatccaggtgaattaggtattgatgtcaaagtaggtccattagctgatgtgttagaaggagcgaagcgtccagggcattttgatggggtggtaacagtagttaataagctatttaatattgttatgccggattatgcttattttggtaaaaaagatgcccagcaattggctattgtcgagcaaatggtaaaagacttcaatcatgccgttgaaattattggtattgatatcgttcgagaagcagatggtttggcgaaaagttcaagaaatgtttatttaacggagcaagaacgacaagaagcggtacatttaagtaaaagtttgctattagcacaagcgttgtatcaagacggtgaacgtcaaagtaaagtaattatagacagggttactgaatatcttgaatcacatataagtggacgcattgaagaagttgctgtttatagttatcctcaattagtagaacaacacgaaataactggacgcatatttatctcgttagctgtcaaattttcaaaagcgcgtttaatagataatataataattggagctgaataa

SEQ ID NO: 415937 - DNA, 384 bp, Staphylococcus aureus
gtgataagaacaatgatgaatgctaaaattcatagagcaagagtgactgagtcaaatttaaattatgtaggtagtattacgattgattcagatattttggaagcggtagacatcttgccaaatgaaaaagtagccatcgtgaataataataatggtgcacgttttgaaacatacgtaatagctggtgaaagaggtagtggtaaaatttgtttgaacggtgcagcatcaagacttgttgaagtaggcgatgtagtcataatcatgacttatgcacagttaaatgaagaagaaattaaaaaccatgctcctaaagtagcagtaatgaatgaagacaatgtcattattgaaatgattcatgaaaaagaaaatacgatagtgttataa

SEQ ID NO: 415938 - DNA, 1077 bp, Staphylococcus aureus; identical to SEQ ID NO: 408194

SEQ ID NO: 415939 - DNA, 636 bp, Staphylococcus aureus; identical to SEQ ID NO: 408193

SEQ ID NO: 415940 - DNA, 588 bp, Staphylococcus aureus
atgactatagatcgacgtattagaaaatcacaagttgcaatgagaaatgcatttattgaacttttacatcaacaccaattagaagagattactgtgcaacaaattgcagatttagctgatgttaaccgtagtacattttatacgcattattatgataaatatgatttgcttgaaaaattagaggaccagcagttggaggaaataagagacttcattcatgatgagaagttaaatggagcagttaagttatccacggataacatacatcaaattatgactgttttaatagatatgatagaaaaagacatcgcattttatcaattgatgtttcgtatgggtaaagattcaaatatacacgaaaaactatatgacttaattatgtgtcatttacaacgttataaaaatgaaaatgatcaaattaatggtataccattttcttatttcatgagttatgtttcaggtgcgggattgtctttgataagacattgggtagaagatccaaaccgtatagacaaagttgacttaataatgcattttaatacgattgtcaatcaagggccagcaacgataattaaaaatatacaataa

SEQ ID NO: 415941 - DNA, 450 bp, Staphylococcus aureus
atgacagcattattcccttatatcgcttttgaaaattcaaaagaagcccttgcatattacgaagaagtatttggtgcaactgacgttaaacgtttagaagttggcgaagaacaagcgtcacattttggtatgactaaggaagaagcgcaagaagcaactatgcatgctgaatttgaagtgcttggcgtaaaagtgctatgttctgattcttttggtcgcgctgacaaaattaataatggcatatcattattaattgattatgatgttaacaataaggaagatgctgataaagttgaagcattctatgagaaaattaaagatcattcttcaattgaaatagaattaccgtttgctgaccaattctggggtggcaaaatgggcgtctttaccgataaatacggtgttcgttggatgttacatggtcaagactatactgcaatccaacaataa

SEQ ID NO: 415942 - DNA, 723 bp, Staphylococcus aureus
atgattaatgctgaacctattatcagtaaaatgaaaaatcaaaaaattaattatgacaaggtgttgaagaaattaatcgggcagtgggaaagagaagcaatcagacctaaaatcttattgcatagttgttgtgcaccttgtagtacatatacattagagtttttaacacaatatgcagacattgcaatttatttcgcgaattcaaatattcatccgaaaaatgaatatttacgacgtgctaaagtgcaagaacaatttgtggaagattttaatcgcaagactggtgcgaatgtgaagtatattgaagcaccttatgaaccgcataagtttgtgaaaatggtgaaggataaagaattagctgatgaaaaagaaggcggcttacgttgtaccgcttgttttgaaatgcgtttggatattgtagcgaaagcagctgtagaacatggctatgattattttggcagtgcaatcacgttatcacctaaaaagaacgcacaattaatcaatgaacttggtatggatgtccaaaaaatatacgatgtgaactatttgccaagtgattttaagaaaagtaaaggttatgagcgttccatagaaatgtgtaatgactataatatctttaggcagtgttattgtggatgtgtctttgcagcgatgcaacaaggtattgattttaaaacagttaataaagaagcgaaagcatttttagaacaatatccagattaa

SEQ ID NO: 415943 - DNA, 276 bp, Staphylococcus aureus
atgactaaagaaacagataataaaaaaacagtagcgacttctgacaacaaagacacacagcaacaaaatcaaactgaagaagatgaacgtcaaggtttgaatggttatcgtaaaacagatcttgatttagaaattgagcaagagctacgtgaaatgatgaaaacaggagaaaatgaaacgaaaaacgactacaaaaagtttaaagtgttttcacttatttcaacacttgtcattgtcattttagcaattataagatttgttcataaaatgatttaa

SEQ ID NO: 415944 - DNA, 1065 bp, Staphylococcus aureus
atgtacaaattaattaaacctttcttattcaaaatcgaacccgaaaaagcacacggactaactatcgatgcattaaaaacgttacaaaagtttccggttttattcccagtcgtcgataaactatttacttataagaatccaacgttatcacaaacgatacaaggtaatacgtacgacaatccaattggcttagcagctggtttcgacaaatcttgcgaagtaccaaaagcattggaacaccttggattcggtgctttagaattaggtggtatcacacctaaacctcaaccgggtaaccctcaaccacgcatgtttagattattagaagatgacgccttgataaatcgaatgggcttcaataatattggtatgaacaaagcactcagtcatttgcgtaaaaatgcttatcaagtacctgttggtatcaatgttggtgtgaataaaatgacaccttatgaagcgcgttatcaagattatataaaagtcattgatacgtttaaacacgacgtttcatttttcacagtcaatatcagttctccaaatactgaaaaccttcaaaatttccatgataaagatgaattttcaatgttatgtcaagctttgacaacatttaaaaaacagcacgatgtaacagtgccaatttacttaaaactaacgtctgatatggatttcgatggcttaaaagcactattaccagcgattactgagacatttgacggtatcatcttagcaaacacaacgcgacaacgagatggtttaacttctgctaataaagtcgaagaaggcggtttgagtggtcgtccattatttgaacgtaatttaaaattgattaagtatgcttatcagcaaacaaatggtgaatttttaattataggtacaggcggcgtattcagtactgaagatgcaatcaaaatgatgcgtcacggtgcgtcacttattcaaatttattcatcacttgttattgaaggcccaggtttaactaagaaaatgaacaaaggcatcgcacgttacttaaaagatcatcattttgacaatgtcagtgatattataggactagatgcctaa

SEQ ID NO: 415945 - DNA, 867 bp, Staphylococcus aureus
atgaatgaacaatggttagagcatttacctttaaaagatattaaagagatttcaccagtgagtggtggtgatgtaaacgaagcatatcgagtcgaaacagatacggatacatttttcttacttgtccaacgtggacgtaaagaatcattttatgctgcagaaattgcaggtttaaatgaatttgaacgtgcaggtatcacggcacctagagtaattgcaagtggcgaagttaacggtgatgtgtatttagtgatgacgtatttagaagaaggagcttcagggagtcaacgtcaattaggtcaactcgtagctcaattacacagtcagcaacaagaagaaggcaaatttggcttctcattaccttatgaaggtggcgatatttcttttgataatcattggcaagatgattggcgtaccatttttgtcgataaacgtttggatcatttgaaagaagagttgctaaatagagggctatgggatgccaacgatatcaaagtatatgacaaagtgcgaagtcaaattgtggaggaattagaaaagcatcaaagtaaaccgtctttattacatggtgatttatggggcggtaattatatgtttttaaaagatggacgtcctgcattatttgatccagcaccattatatggtgacagagaatttgatatcggtattacaacggtatttggtggttttacgagcgaattttacgatgcgtataataaacattatccgctcgcaaaaggagcatcctatagacttgaattttatcgtttatatttattgatggtgcatttattgaaatttggtgagatgtaccgtgatagtgttgcgcattctatggataggattttacaaggtacaacaagttag

SEQ ID NO: 415946 - DNA, 276 bp, Staphylococcus aureus
atgagtacagttcaaagtgatattttcaagactaatagtgcatcatcatctattaaaagtgccgttgaaacatgtaataatgtgtcgaaaccggataaagatgaaagtacaacagtaagtggaaataataatgctcatagtgtgatagacgatttgattagtaagaatcaatctgttgctgaagcaataagaaatgcgagcgatagtatacaaaaagttggcgaagaatttaatcaaacagacgtaatgattggtaatgaaattggtaaaaattaa

SEQ ID NO: 415947 - DNA, 339 bp, Staphylococcus aureus
atgatcacagcgaaacataagcaaatggatgacttatatgatgaaaagcgagaggttaaagctttgatagacgaaagtgatgagcttaatcattcgatagaacaattatatcaacatttaggtgaccgttatcatagtagcaatatggctagtcgtatggaacagttccgcgatgaatttcattttgcgaaacgacgttcaacggaagcgttatacgagcagcaacagcaaattcaacatggcattcgtaaagcggaagaagagatgattgacttggaaatgcgaaggaatgttgaaattgagacggtgacaaaggaggaaaataaatggaaacaatag

SEQ ID NO: 415948 - DNA, 297 bp, Staphylococcus aureus
atggaaacaataggaagcattatttatttaaaagaaggttcgcaaaagttaatgattattaatagaggaccaattgtagaaattgaaaatcaaaagtatatgtttgactattctgcatgtaaatatccgattggtgttgtggaagatgaaatttattattttaacgaagaaaatatagattcagttatttttaaaggttattctgatcaagatgaggttagatttcaagagttgtttgaaaatatgaaacaaaatttggatagtgaaatacaacgtggagaagttacaccacaataa

SEQ ID NO: 415949 - DNA, 1107 bp, Staphylococcus aureus
atgcaacatcataaagtggctattatcggtgccggtgctgcaggtataggtatggccattaccttaaaagatttcggtataacagatgtcattattttagaaaaaggaacagtaggacattcatttaaacattggccgaaatcgacccgtacgatcacgccatcatttacgtctaatggatttggcatgcctgatatgaatgcaatttccatggatacttcaccagcatttacatttaatgaagaacatatttccggagaaacatatgctgaatatttacaagtggttgccaaccattacgagctgaatatctttgaaaatacagttgtcacaaatatatctgcagatgatgcatattatacgattgcaacgacaacagagacatatcacgcggattatatctttgtcgcaacaggtgattataatttccctaaaaagccatttaaatatggtattcattatagtgaaattgaagactttgataactttaataaggggcaatatgtggttatcggaggtaatgaaagtggctttgatgctgcatatcaacttgcaaaaaatggctctgacatcgcactttatactagcacaaccggtttaaatgatccggatgctgatcctagtgttagattgtcaccttatacacgtcagcgactaggtaatgtcattaagcaaggtgctcgcatcgaaatgaatgtacattatacagttaaagatattgattttaacaatggacagtatcatatcagttttgatagcggacaaagtgtgcatacgcctcatgaaccaatactagcaactggctttgatgcaacaaaaaatccaatcgttcaacaattatttgtgacaacaaatcaagatattaaattaacaacacatgatgaatcgacacgttatccgaatatttttatgattggtgcaacagttgaaaatgataatgccaaattatgctatatctataaattcagagcgcgatttgcagtacttgcccatcttttaacacagcgggaaggcttaccagctaaacaagaggtcattgaaaattaccaaaaaaatcaaatgtatttagatgattattcatgttgtgaagtgtcatgcacatgttag

SEQ ID NO: 415950 - DNA, 1341 bp, Staphylococcus aureus
atgttagaagtgaaatatgatatgagaactgggcattatacgcccatacctcatgaacctcattatttggttattagccatgcggataaacttaccgcaacagaaaaagcgaaattaagattattaatcataaaacagaaattagatatttcattggcagaaagtgtagtttcttcgcctatagcgagtgaacatgtgatagaacaattgacactatttcaacatgagcgacgacatttaagacctaaaataagtgcgacatttttagcctggttgttgatatttttaatgtttgcattgccaattggtatcgcttatcaattttcagattggtttcaaaatcagtatgtatcagcatggatagaatatttaactcaaacaacattgctcaatcacgatatattacagcatatattatttggtgattatggtgtgctatcacttggaacatattcgctcgtatgggcattgccggttgtaatattaattagtttatcaactgcaataattgatcaaacaggactcaaatcatggatgatatgggcaattgaaccgtcaatgttatggatcggattacaaggtaatgatatcgtgccactattagaaggatttggatgtaatgcagcagctatttcacaagcagcacaccaatgccatacctgcacgaagacacagtgtatgagtttaataagctttggtagttcttgtagttatcaaataggtgcgacattatctatttttagtgtagctggaaagtcatggctatttatgccgtacttaatattagtacttttaggtggcatcttacataataggatatggttgaaaaagaatgatcaacaacttagtgttccgctaccttatgataggcaattacatatgccaaatatacgtcaaatgttgctacaaatgtggcaaaatatacaaatgtttatcgttcaagcgctacctatttttatcacaatctgtcttattgttagtattttatcactaacgccaattttgaatgttttatcacaaatatttacacctatattatcgttattaggcatctcttcagaattgtcaccagggattttattttcaatgattcgaaaagacggcatgctcttgtttaatttgcatcaaggcgccttattacaaggaatgacagcaacacagttactactacttgtgttttttagttcaacatttacagcgtgctcggtcacaatgacgatgcttttgaaacatttaggtggtcagtcagcactaaaattaattggaaagcaaatggtgacatcattgtctttagttattggtgtaggcatcattgttaaaatagtaatgctgattatttaa

SEQ ID NO: 415951 - DNA, 891 bp, Staphylococcus aureus
atgaaaatagttattataggtgggtttttaggtggcggtaaaacgactgtcttaaatcatttgctcgctgaatcattaaaggaatcgctgaaaccagcagtcatcatgaatgaatttgggaaaatgagtgttgatggtgccttagtatctgaagacatacctttaagtgaactgacagaggggtgtatctgttgcgcaatgaaagcagatgtatcagaacagttacatcaattatatttaaaagagcaaccagacattgtatttattgaatgtagtgggattgcagaaccagtctctgtcttagatgcttgtttaacgcctattttagctccgtttacaacaattacacatatgattggtgtaatagacgcaagcatgtataaacacattaaatcattccctaaagacatccaaggcttattttatgagcaattagcatattgttctgtcttatttgttaataaaatagattcagcagatgttgaaacaacgagcaaactattgaaagatttagaagttattaacccagaggccgatatacaagtcggtatgcatggcagcgtcactttgccaatatcagttagacaaatgacagcaacttctgacaataaacatgaatcattacacaaaacaataaatcatcaatttgtgcaatcaccagtcacatgtactaaagcagagtttataaaacgtttagcatgccttccgtctcatatttataggttgaaagggtttatgacatttgaagacaccacacatacgtatctcattcaatttacacaaggccaatatgaattaacacctgtagcattttcaaaaaaagtgccagaatatttggtgcttatcggaaagggtatttcaaaagaagactatcaatgtttggaacagtag

SEQ ID NO: 415952 - DNA, 831 bp, Staphylococcus aureus
atggaaactttagaattacaaggcgctaaattacgataccaccaagtcggacaaggacccgtgctcatctttattcctggtgcaaacggtaccggaaacatttttctgcctcttgcagaacagttaaaagaccattttactgttgtagccgttgatcgtcgtgattatggagaaagcgagttaactgaaccactccctgattccgcttcaaaccctgacagtgattatcgtgtcaaacgcgacgcacaggacattgccgaacttgcaaagtcattaagtgatgaacctgtctatatattaggttcaagttcaggttcaatcgttgcgatgcatgtgttaaaagattaccctgaagtcgttaaaaagattgcatttcacgaaccaccaattaatacatttttaccagacagtacttattggaaagataaaaatgatgacattgtgcatcaaattttaacagaaggcttagaaaaaggtatgaaaacatttggtgaaacattaaatatcgcaccaattgatgcaaaaatgatgtctcaacctgctgatactgaagaaggacgtatagaacagtacaaacgtacgatgttctggtcagaatttgaaattagacaatatacgcattcagatattactttggatgatttcacaaaatacagcgataaaatcaccctactaaatgggacagattctagaggctccttcccacaagatgttaacttttatataaacaaagaaactggcatacctattgtagatattccaggcggtcacttaggttatattcaaaaacctgaaggctttgctgatgtattattaaatatgtggggttaa

SEQ ID NO: 415953 - DNA, 1011 bp, Staphylococcus aureus
atgaaaagtattacgtttgaagaacattatgtcattgaagatattcaaaaagaaacgatgaatgcgatatcagcagatcctaaaggtgtaccgatgaaagtaatgttagaaggccttgaaaaaaagacaggttttacaaatgccgacgaattatcacatcatgatgaacgtatccaatttatgaataatcaagacgttcaaattcaagtcttatcttatggaaatggatctccttcaaatttagttggtcagaaagccattgaattatgtcaaaaagcaaatgatcaattggcaaactatattgcccaatatcccaatcgctttgtaggctttgcaactttacctatcaatgagcctgaagccgcagcgcgagaattcgaacgttgcatcaatgatttaggattcaaaggtgcgctcattatgggacgtgcacaagatggttttcttgatcaagacaaatatgacattattttcaaaacagctgaaaatttagacgtaccgatttatctacatcccgcgccagttaacagtgacatttatcaatcatactataaaggaaattatcctgaagtaactgcggcaacatttgcttgttttggttatggttggcacattgatgtcggaattcatgcaatacatctagtattatctggcatttttgatcgttatccaaagttaaatatgattattggacattggggtgagtttatcccattcttcttagaacgtatggatgaagctttattcgctgaacatttgaaccactctgtaagctattactttaaaaatagtttttatatcacaccaagtggcatgttaacgaagccacagtttgatttagtcaagaaagaagtaggtattgatagaattctttatgctgctgattatccatatattgagcctgaaaaattaggtgtatttttagatgaactgggtttaacagatgaagaaaaagagaaaataagttatacaaatggtgctaaattattaggtttatcatctaacaattaa

SEQ ID NO: 415954 - DNA, 705 bp, Staphylococcus aureus
atgactaaaattgtgttaatcacaggaggcaataaagggttaggctatgcaagtgcagaggcacttaaagcattgggttacaaagtttatataggttctcggaatgatgtaagaggacaacaagcatcacaaaaattaggtgttcattatgtacagttagatgttacaagtgactactcagtcaaaaatgcttataacatgattgctgaaaaagaaggccgtcttgatatcctcattaacaatgcaggtatatctggtcaattttcagcaccttccaaattgccacctcgtgacgttgaagaagtatatcaaacgaatgtattcggtatcgtacgaatgatgaatacattcgtccctctcttagaaaaatctgaacaacctgttgtcgtcaacgtatcaagtggtttaggttcatttggaatggttacaaaccccgaaacagctgaatctaaagtgaattcattagcttattgttcgtctaaatcggcagtaacaatgctaacgctacaatacgctaaaggattacctaacatgcaaatcaatgctgctgacccaggcgctacaaatactgatttagttggtgattttagtaataattccaaacacgtttctgaaggaatcaagccaatcattcaattagcaacgattggtgcagatggcccaacaggtacatttattaatggcgatggagaaatgccttggtag

SEQ ID NO: 415955 - DNA, 558 bp, Staphylococcus aureus
atgcgaaaagatgcaaaagagaatagacaacgaattgaagaaatagcgcacaaactttttgatgaagaaggcgttgaaaacattagtatgaatcgtattgctaaagaactaggtatcggtatggggacattgtatcgacatttcaaagataaaagcgatttatgctactacgtcatacaaagagaccttgatatttttatcactcattttaagcaaattaaagatgactatcattctaattatgaggttatgcaagtgtcgttagattatcttttacaatttaaaatcgataataaggcactactgcaatgtattgaagcaggcaacaataaattacgtttttaccaaagcgcattttatcaagaattatttgatttttattatgacttatttaaaagcgatgacgacacttacacgaagttcaaaacagatatgctgttgcaatcattatcaactagtgtatttgccttccaaatagagcatcgccatatttcaattgaagcgtacagaaattatttattaaacatttatttagatgaggtggaacgtaatgactaa

SEQ ID NO: 415956 - DNA, 300 bp, Staphylococcus aureus
atgtctttaaataaagagcaaagacgcatcacagctgaagagttgcaagcacattttgaagaatctaccttatcggttcaaatgattgctgaaaaactgaatgtcactacagaagatgtggaaaaagtattagctatgacagcgccactaggcatttttagtcatcaattacaacgatttattcatttagtatgggatgtcagagatgtaataaacgacaatattaaaggaaatggacaaacaccagaaccatatacgtatttaaaaggtgaaaaagaggactattggtttttaagataa

SEQ ID NO: 415957 - DNA, 822 bp, Staphylococcus aureus
atgaaagatattttagtaataggcgcaacagggaagcaaggtaatgcagttgtaaaacagttgttagaggatggatggtatgtaagtgcattaactagaaataagaataatcgtaaactttcagacataggacatccgcatttatcaatcgttgaaggtgatctgagtgataatgttagtttgcaatcagcgatgaaagggaagtatggcttatacagtattcagccaatcgttaaagatgatgttagcgaagaattaagacaaggtatgaagataattgaaatagctgagcaagaaaatattcaacatattgtgtatagtactgcgggaggggttaatcgaaatcgaactggcccacactttgaagtactagcaaaaatagaaaatagattaatggaatctaatataaatgcaacagttatcaaaccatcattctttatggataattttttacgcattgctaaagtcgaagatgaacgtattacattaccagaatttattaatccgaatataaaattcacaatgatttcttctattgatatagctaaaattgcatcgtatatttttgcacatccacaaagctttacgcatcaatcaatagagattggttccgatgaagttacattaagtgaagcagcaacaatttttagtgaagtgacaggtaaatctactgttatagaaggagaatttgttagtggtgttgcagaaaagcaatggttggaagaaaaaggttatgaagtagactttgaattaatggctgaaataaatccaacaagattatcattaagtgattggcttaaagtccaaaactataataagtaa

SEQ ID NO: 415958 - DNA, 378 bp, Staphylococcus aureus
atgattcaatcaatgtggtttaatttgcatgtgcaagatttagaaaagagcgcacagttttataaagcgttaggatttaaaataaatagaaacccacaaatgttagataaaatggtcggtattcaaataggtcaaacaaccgtaattttaatagaaaacaagcattttcaaaatgtaagtcagcaaagccttaatactgaaccaaatgaagtgatgatttctctaggtgtgaacacaaatgaagaagttgaccagttggtgaataaagtgaaagaagcgggtggcgcagtcgttcaagaaccaacagtaagccaagggttttatggtgcaatgttcaaagatcttgatggacaccattttaattttttagtctgctaa

SEQ ID NO: 415959 - DNA, 231 bp, Staphylococcus aureus; identical to SEQ ID NO: 415792

SEQ ID NO: 415960 - DNA, 321 bp, Staphylococcus aureus; identical to SEQ ID NO: 404830

SEQ ID NO: 415961 - DNA, 588 bp, Staphylococcus aureus
atgttaggtagtgaacaaatgatggaaagtaaatccatagatccaagaatcgttagaaccaaacaattgcttgtcgatgcttttcttaaaatttctagagaaaagaaattatctcaaattacagttaaagatatcactgatattgctacgctaaatcgtgcaacattttacgctcatttcactgataaagaagacctcctagactacacattatctgtaaccattttaaaagacttgaatgataacttgagcatttctaatgtcattaatgaaaaggtgctgcgtaatattttcatttcaattgcgagttatatcaaagatgctgcaaagtcttgcgaattaaatagtgaagcattttgcaacaaagcacatcaacgtattaataatgaattagaagatatttttgcgattatgttagaaaacagctatccggagcatcaacgagatatcattgtaaatagtgcgagttttttagcagctggtatctcaggcttagcattacattggtttaacacgagtcaagagacagccgatgtgtttatcgatcgcaaccttccatttttaattcatcatatagcacatttttaa

SEQ ID NO: 415962 - DNA, 1056 bp, Staphylococcus aureus; identical to SEQ ID NO: 409071

SEQ ID NO: 415963 - DNA, 702 bp, Staphylococcus aureus; identical to SEQ ID NO: 410926

SEQ ID NO: 415964 - DNA, 276 bp, Staphylococcus aureus; identical to SEQ ID NO: 409072

SEQ ID NO: 415965 - DNA, 243 bp, Staphylococcus aureus; identical to SEQ ID NO: 414970

SEQ ID NO: 415966 - DNA, 1812 bp, Staphylococcus aureus
atggatacaaaagactttaaacgtttagaaaaaatgtattccccgcgatacttacccggattagatggattgagggcattcgcagttataggaatcattatttatcacttgaatgcacaatggttaagtgggggctttttaggagtagatacattcttcgttatttcaggttatttaataacaagtttgttgataagtgagtattatcggacgcaaaaaatcgatttgctagagttttggaagcgacgattgaaacgactcattccggcagtgttatttttaatctgtgtcgtgcttacgttcacactgatatttaaaccggaattgattatacaaatgaaacgagatgctattgcagctatattctatgtttcaaactggtggtacatttcacagaatgtagattattttaaccaatttgctattgaaccactcaaacatttatggtctttagccattgaagaacaattttacttgcttttcccattggttatcacgttcttattacatagatttaaaccgagaaatattattcaaacgctatttattgtatcgttgatttctttaggacttatgatagtgattcatttcatcactggagataattcacgtgtgtattttgggacagatacacgactgcaaactttattgcttggttgtatattagcatttatttggcctccgtttgctttgaaaaaagatatttctaaaaagattgtcgtatcattagatattatagggatatctggttttgcggttctaatgactttgttctttatagttggcgaccaagatcaatggatctataatggaggattttacattatatcatttgcaactttattcattattgcaattgcggtacatccttctagtttatttgctaaatttttaagtatgaaacctttactaattataggtaaacgatcatatagcttatatttatggcattatcctatcattgtttttgtgaacagttattacgtacaaggacaaataccggtatacgtttatattatagaaattttgttaacagcgttaatggctgaaatttcgtatcgctttattgaaacacctatacgtaaaaaaggatttaaagcttttgcatttttacctaaaaagaaggggcaatttgctagaacagtgttagttatcctattattggttccgtctatcgttgtgctcagtggacagtttgatgcacttggcaaacaacatgaagccgagaagaaagagaagaagacggaatttaaaacaacgaagaaaaaagtcgttaaaaaagataagcaagaggataagcagacagcgaatagcaaagaggatattaaaaagtcatcaccactattaattggtgactcggtcatggtggatattggtaatgtctttactaagaaaataccaaatgcacaaattgatggtaaagttggacggcaactcgttgatgctacaccaattgtgaaatcgcaatataaagactatgctaaaaaaggtcaaaaagttgtagtagagcttggtacaaatggggcatttacgaaagatcaattaaatgaactattggatagttttggaaaagcagacatatatttagtttctattagagtacctagagattatgaaggtagaataaataaattaatttatgaggcagctgaaaagcgctctaatgtacatctagtcgattggtataaagcttctgcaggtcatccggaatactttgcatatgacggtattcacttagaatatgcaggtagtaaagcgctgactgatttgattgtaaaaacgatggaaacacatgctacaaataagaaataa

SEQ ID NO: 415967 - DNA, 768 bp, Staphylococcus aureus; identical to SEQ ID NO: 408192

SEQ ID NO: 415968 - DNA, 498 bp, Staphylococcus aureus
atgaaaaccatgaaaaaatatatcaaaacagcatttttttgtagtatgtattggttaattgttcaactaaatatagcaaatttaggtacaagaattcctgataagtattttcgtcagaagtacataatatttaaatcatttaattttgagaagcatggaaaattttggaacaaatggttttacgtaagaaaatggaaacataagattttagatggtcatcagcttaatcaaaatatatatgatcagcgtcatttaatgacaatcaatactgatgaaattgaaaaaatgattatagagacaaagagggcagagttgattcattggatatcgatacttccagtcatcatattcaataaaggctctcgtttagtaaagtatataaatattttctatgcaatgatagctaatgttccaatcattattgtgcaacgctataatcgaccgagattaacgcagttactacgcatattaaaacgaagaggtgaacgtcatgactaa

SEQ ID NO: 415969 - DNA, 1494 bp, Staphylococcus aureus; identical to SEQ ID NO: 409073

SEQ ID NO: 415970 - DNA, 1128 bp, Staphylococcus aureus
atgaaatggttatcacgaatattaacagtaatagtgaccatgtctatggcgtgtggtgcattgatatttaatcgtagacatcagctaaagacgaaaacgctgaacttcaatcataaagcattaacaattattattccggctagaaatgaagaaaaaagaataggtcatttactacattcgataatacaacagcaagttccagtagatgtcattgttatgaatgacggatcgacagatgaaacagcacgtgtagcacgttcatatggtgcgactgtagtagatgttgttgatgatactgacggcaaatggtatgggaaatcacatgcttgttatcaaggtgtgacgcatgcatgtacgaatcgtattgcctttgtagatgctgatgtaactttcttaaggaaagatgctgttgaaacgttgattaatcagtatcaattacaaggtgaaaaaggattgttaagcgtacagccttatcatataacaaagcgtttctacgaagggttttcagcgatatttaatttaatgacagtcgttggtatgaatgtattttctaccttagacgacggtcggactaaccagcatgcatttggaccggtgacattaacaaataaagaagattattatgcaactggaggtcataaaagtgcgaaccgtcatattattgaaggatttgctttaggaagtgcatatacttcacaatcattgcccgtaacagtttatgaaggatttccatttgttgcatttcgcatgtatcaagaaggatttcagtcattacaagaaggatggacaaagcatttgtcaactggggcaggtggcacaaagcctaagatcatgacagcaattgtgttgtggttgttcggttctatagcgagtattttagggctatgtcttagtttaaaatatcgccaaatgtctgtaagaaaaatggtagcactttacttgagctatactacacaatttatttatctgcatcgaagggtcggccaattttctaatttattaatggtatgtcatccattgttatttatgttttttactaaaattttcatccaatcttggaaacaaacgcatcgttatggtgtagttgaatggaaaggtcgtcaatattctatatctaaagaacaataa

SEQ ID NO: 415971 - DNA, 864 bp, Staphylococcus aureus; identical to SEQ ID NO: 414666

SEQ ID NO: 415972 - DNA, 1509 bp, Staphylococcus aureus
atgaagattgcagtaattggtgcaggtgtcacaggattagcagcggcagcccgtattgcttctcaaggtcatgaagtgacgatatttgaaaaaaataataatgtaggcgggcgtatgaatcaattaaagaaagacggctttacatttgatatgggtcccacaattgtcatgatgccagatgtttataaagatgtttttacagcgtgtggtaaaaattatgaagattatattgaattgagacaattacgttatatttacgatgtgtattttgaccacgatgatcgtataacggtgcctacagatttagctgaattacagcaaatgctagaaagtatagaacctggttcaacgcatggttttatgtcctttttaacggatgtttataaaaaatatgaaattgcacgtcgctatttcttagaaagaacgtatcgcaaaccgagtgacttttataatatgacgtcacttgtgcaaggtgctaagttaaaaacgttaaatcatgcagatcagctaattgaacattatattgataacgaaaagatacaaaagcttttagcgtttcaaacgttatacataggaattgatccaaaacgaggcccgtcactatattcaattattcctatgattgaaatgatgtttggtgtgcattttattaaaggcggtatgtatggtatggctcaagggctagcgcaattaaataaagacttaggcgttaatattgaactaaatgctgaaattgagcaaattattattgatcctaaattcaaacgggccgatgcgataaaagtgaatggtgacataagaaaatttgataaaattttatgtacggctgatttccctagtgttgcggaatcattaatgccagattttgcacctattaaaaagtatccaccacataaaattgcagacttagattactcttgttcagcatttttaatgtatatcggtatagatattgatgtgacagatcaagtgagacttcataatgttattttttcagatgactttagaggcaatattgaagaaatatttgagggacgtttatcatatgatccttctatttatgtgtatgtaccagcggtcgctgataaatcacttgcgccagaaggcaaaactggtatttatgtgctaatgccgacgccggaacttaaaacaggtagcggaatcgattggtcagatgaagctttgacgcaacaaataaaggaaattatttatcgtaaattagcaacaattgaagtatttgaagatataaaatcgcatattgtttcagaaacaatctttacgccaaatgattttgagcaaacgtatcatgcgaaatttggttcggcattcggtttaatgccaactttagcgcaaagtaattattatcgtccacaaaatgtatcgcgagattataaagatttatattttgcaggtgcaagtacgcacccaggtgcaggcgttcctattgtcttaacaagtgcgaaaataactgtagacgaaatgattaaagatattgagcggggcgtataa

SEQ ID NO: 415973 - DNA, 1155 bp, Staphylococcus aureus; identical to SEQ ID NO: 408190

SEQ ID NO: 415974 - DNA, 1029 bp, Staphylococcus aureus
atgaataataaagttaagggtgatgttaaaatgacaaaaattaaaatcatgagtgtacgtgatgaagatatgccttatatcaaggcgtgggcagagaaacatcatgttgaggtagatattactaaagaagcattaactgatgacaatgttgaaggtgtcgctggttatgatggcttatcgctatcacaacaaataccattatcagagcatgtttataaacgattaaatgaactaggtattaaacaaatcgcacaacgtagtgctggatttgatacatatgatttggagttagcaaacaagtataacttgattgtgtcaaatgtgccgtcatactctccgaattcaattgcggagtttgctgtgaaccaggctattaatgtggttcgtcattttaatcaaattcaaacgaaagtgcgggagcatgattttagatgggaacctactattttatcgaaatccattaaagatttaaaagtagctgttattggtacaggtcgaattggccgtgtagtagccgatatatttgccaatggttatcaaagtgatgtggtcgcatacgacccgtttcctaatgctaaaattgcaacgtatgtcgattacaaagatacgattgaggaagcggttgaaggtgctgatatcgtgacattacatgtacctgcaacgaaatataatcattatctatttaatgctgaattatttaaacattttaaaaagggcgcagtatttgtcaattgtgcgagaggttctttagtagatactaaggcgttattagacgcattagacaatggtgtgattaaaggtgcagcacttgatacgtatgaatttgaacgcaaacttttcccaagtgatcaaaggggcaaaacaccgaacgatccattgttagaatcgttgattgacagggaagatgtcatattaacaccacatattgcgttttatactgaagctgcagttaaaaatctaattgtcgatgcattagatgcaacattagatgtattgcagactggagatactaggttacgagtaaattaa

SEQ ID NO: 415975 - DNA, 207 bp, Staphylococcus aureus; identical to SEQ ID NO: 404844

SEQ ID NO: 415976 - DNA, 2409 bp, Staphylococcus aureus
gtggctaatacgaaaaaaacaacattagatatcactggtatgacttgtgccgcatgttcaaatcgtatcgaaaagaaactgaataaacttgatgacgttaatgcccaagtgaatttaactacagagaaagcaactgttgagtataaccctgatcaacatgatgtccaagaatttattaatacgattcaacatttaggttacggtgtcactgtagaaactgtcgaattagacattacaggtatgacttgtgctgcatgctcaagccgtattgaaaaagtgttaaataaaatgaacggcgttcaaaatgcaacggtcaatttaacaacagagcaagctaaagttgactattatcctgaagaaacagatgctgataaacttgtcactcgcattcaaaaattaggttatgacgcgtctattaaagataacaataaagatcaaacgtcacgcaaagctgaagcgctacaacataaattgattaagcttatcatatcagcagtattatctttaccactattaatgttaatgtttgtgcatcttttcaatatgcatataccagcactatttacgaatccatggttccaatttattttagctacacctgtacaatttattattggatggcaattttatgtaggtgcttataaaaacttaagaaatggtggcgccaatatggatgtacttgttgctgttggtacaagtgcagcatatttttacagtatttatgaaatggttcgttggctaaatggctcaacaacgcaaccgcatttatactttgaaacaagcgccgtactacttaccttaatcttattcggtaagtatttagaagctagagcgaagtctcaaacaaccaatgcgcttggcgaattattaagtttacaagctaaagaagcacgcattttaaaagatggtaatgaagtgatgattcctctaaatgaagtacatgttggagatacacttatcgttaaaccaggtgaaaagatacctgttgatggcaaaattattaaaggtatgactgccatcgacgaatctatgttaacaggtgaatctatccctgttgagaagaatgttgatgatactgtaattggttcaacgatgaacaaaaacggtactattactatgacagcaacaaaagttggcggggacactgcgttggcaaatattattaaagttgtcgaagaagctcaaagttctaaagcgccgattcaacgattggcagatattatttctggttatttcgttcctatcgttgttggtatcgcactattaatatttatcgtgtggattactttagttacaccaggtacatttgaacctgcacttgttgcgagtatttccgttcttgtcattgcttgtccatgcgcattaggacttgctacaccaacttctattatggtaggtactggtcgcgctgctgaaaatggcattttatttaaaggtggcgagtttgttgaacgcacacatcaaattgataccatcgttttagataagacgggtaccattacaaatggtcgtccagtcgtgacagattatcatggtgacaatcaaacgctacaactgcttgctactgctgaaaaagattctgaacacccattggcagaagccattgtcaattatgcaaaagaaaagcaattaacattaactgagacaacaacatttaaagcagtacctggccatggtattgaagcaacgattgatcatcaccatatattggttggtaaccgtaaattaatggctgacaatgatattagcttgcctaagcatatttctgatgatttaacacattatgaacgagatggtaaaactgctatgctcatcgctgttaattattcattaactggtatcatcgcagtggcagatactgtcaaagatcatgccaaagatgctataaaacaattgcatgatatgggcattgaagttgccatgttaactggcgataataaaaacactgctcaagccattgcaaaacaagtaggcatagatactgttattgcagatattttaccagaagaaaaagctgcacaaattgcgaaactacagcaacaaggtaagaaggttgcgatggttggtgacggtgtaaatgatgcacctgcattagttaaagctgatatcggtatcgccattggtacaggtacagaagttgccattgaagcagctgatattactattcttggtggcgacttgatgcttattcctaaagccatttatgcaagtaaagcaaccattcgtaatattcgtcaaaatctattttgggcattcggctataatattgccggtatccctatagctgcattgggcttacttgcgccatgggttgctggtgctgcaatggcactaagttcagtaagtgttgtcacaaacgcacttagattgaaaaagatgcgattagaaccacgccgtaaagatgcctag

SEQ ID NO: 415977 - DNA, 192 bp, Staphylococcus aureus
atgagaatattaattacaggcacagttgctatcttaatcattctaggtttagttaaaacgatacaagattacgaaatgacaaacgatacaagtcgtcagttgtcagacaacaaagatgatgataaagtcatccatcttaataatttcaaaaatttacatgcgaaagaatttaacccatctgatttcttttaa

SEQ ID NO: 415978 - DNA, 600 bp, Staphylococcus aureus
atgactgaaaaagaaaaaatgttagcagaaaaatggtacgatgcaaactttgatcaagacttaatcaatgaacgtgcacgagcgaaagatatttgctttgaattaaatcatacaaagccgagtgatacaaataaaagaaaggaattaatcgatcaattatttcaaacaacaacagacaatgtaagtatttcgattccttttgatacagattatggttggaacgttaaactaggaaaaaatgtctatgtaaacaccaattgttattttatggatggtggacagattacaattggcgataatgtttttataggacctaattgtggattctacacagcaacacatccacttaatttttatcatagaaatgaaggttatgaaaaagccggacccattcatattggcagtaatacttggtttggcggtcatgtagccgtgttaccaggggtgacgattggagaaggcagtgtgattggtgctggtagtgttgtcactaaagatattccgccacacagcttagcggttggaaacccttgtaaagtcgttcgtaaaattgataatgacctaccatccgaaacattaaatgacgaaacgataaagtag

SEQ ID NO: 415979 - DNA, 1545 bp, Staphylococcus aureus
atggtagtagaatttaaaaatgaacctggttacgatttttcagtccaagaaaatgtggatatgtttaagaaagcattgaaagacgtggaaaaagaattaggtcaagacataccattagtgattaatggagagaagattttcaaagatgacaaaattaaatcaatcaatcctgcagacacatcacaagtgattgcaaatgcatcaaaggcaacaaaacaagatgttgaagatgcatttaaagcagcaaacgaagcttataaatcttggaaaacatggtcagcaaatgatcgtgcagagcttatgttacgtgtttcggcaattattcgtcgtcgaaaagcggaaattgcagcaattatggtttatgaagcaggtaagccatgggatgaagcagttggtgatgcagctgaaggtattgattttattgaatactatgcacgttcaatgatggatttggctcaaggtaagccagtacttgatcgtgaaggtgaacacaataaatatttctataaatcaattggtacaggtgttacaattccaccgtggaacttcccgtttgcgattatggctggtacgactttagcaccagttgttgcaggtaatacagtgttattgaaacctgctgaggatacaccttatatcgcttataaattaatggaaattttagaagaagcaggattaccaaaaggcgtagttaactttgttcctggtgatccgaaagaaattggtgattacttagttgatcataaagatacgcatttcgttacatttacaggatcacgtgcgacaggtactagaatttatgaacgtagtgccgtagttcaagaaggtcaaaacttcttgaaacgtgttatcgctgaaatgggtggtaaagatgccattgtagttgatgaaaatattgatacagatatggcggcagaagctattgtaacgtcagcgtttggtttctctggtcaaaaatgttctgcatgttcacgtgcaattgtgcataaagacgtttatgacgaagtattagagaaatcaatcaaattaacaaaagaattaacgttgggcaatactgtagacaatacgtatatgggcccagttattaataaaaaacaatttgataagattaaaaattatattgagattggtaaagaagaaggtaaattagaacaaggtggcggcactgatgattcaaaaggttactttgtagaaccaacaatcatttcaggacttaaatctaaagatagaatcatgcaagaagaaatttttggtccagttgttggctttgtgaaagttaacgattttgatgaagccattgaggttgcaaatgatacagattacggtttaactggtgcagtgattacaaataatcgcgagcattggattaaagcggtaaacgaatttgatgtaggtaatttataccttaacagaggttgtacttcagcagttgttggataccatccatttggtggtttcaaaatgtcaggtacggacgctaaaacaggtagcccagactacttattacacttcttagaacaaaaggttgtttcagaaatgttctaa

SEQ ID NO: 415980 - DNA, 549 bp, Staphylococcus aureus
atgaaagagactgatttacgagttataaagacaaaaaaagcattgtcgagtagcttgctacaattgttagaacagcaattattccaaacgattactgtcaatcaaatttgcgacaatgcactcgtacaccgcacaacattttataaacatttttatgataaatatgatcttctagagtatttgttcaatcaattgactaaagactactttgctagagatatcagtgaccgtcttaatcatccattccaaacgatgagtgatacgattaataataaagaggatttgagagaaatcgcagaattccaagaagaagacgctgaatttaataaagtattaaaaaatgtctgcattaaaattatgcataacgatatcaaaaataatagagaccgtatcgatattgacagcgacatcccagataatctcatattttatatttatgactcgttgattgaaggttttatacattggataaaagatgaaaaaattgactggcctggcgaagatattgataacattttccatagattaatcaatattaagattaaatag

SEQ ID NO: 415981 - DNA, 2490 bp, Staphylococcus aureus
ttggcaaaatttttatataagatggggacattcatcgcaaaacataaatggtccgcggtcattgcatggatagtgattgtagctgcaatattgataccacttgctacaaatgcaccgaaatttgacaatgatattaaaatgacaggattagagtcgttagatacgaataaaaagattgaaaaacattttaatcaagatagtgaaaaggcacaaatacgtgttgtctttaagacgactaaagatgatggtattgtgcaaccgaacattgcagaagacattaagaaaacattagaggatataaaaaaagatgacaagcacattgataaaatatcagatccatatgaaaataagcaaattagtaaagataaaacaactgcatttgcagatatcacatatgacgttagtcaaacatctttaaaagatggctctagagataatgttaaaagtcatttgaaagacttacgtgacaatcataatgtacaaacagagttaactggtacaggaatgacatctacagaagtaggcggtaattctgaactagttggtattattgttgcatttgttgtactgttaatcacattcggttcagtcattgctgcaggattaccaattataagtgcattgattggtctagcctctggtgtaggtattatcagtttgttaacttatgcatttgatataccaaatgtcacattgacattagccgtaatgattggactagcagttggtatcgattatgctttgtttattttattcaggtatcgacaagttatgaaaactgaaacagattacattaaaggcattggtcttgcaataggaacagcaggtagtgcagttgtttttgctggtgtgacagttgtgattgccgtatgtggtttatcgctagttggcatagatttcttagcagtgatggggtttgcttcggcaattagtgttatatttgctgtattcagtgcactgactttattacctgcgttaattagtattttccataaacgcattaaagtgaacaaattgcagtctaattttaaaaaagatattgatacgccgtggtctaaatttattacaggaaatgcacttgcggcagtattactaggtttaatcatattagtagcagctgcaataccagttagtcatatgcgacttggtattccagatgacggtgttaaaccagcagattctacacagaaaaaagcttacgatataatctcggataaatttggtgaaggatttaatggccaaattccgatgttgataaatgttaaagataaaaaagatgatccacaaggattacaacaagatttacagtctgtatataaagatattaaagataagaaaaatgtagatatcgttacgccgccacaaatgagtaaagataatgattatgctttgatggtcgtgatacctaagcaagggcctaatgcagagagcacaaatgatttagtgcatgatttacgagattatcataaagatgcacaagataaatatgggttcaaaacggagatttcgggacaaagtgtcattaatattgatatgtctaaaaagttaaatgaggcgatacctttatttgcaacagtaattgttgtattggcatttttcttattaatgattgtcttccgttcaattctaataccgttaaaagcagttttaggatttgtcttgtcattaatggcaacgctaggatttacaacattagtaatgcaagatggttttatgaaaggtctgtttggtattgaaacgacaggaccaatgctagcatttttaccggttattactataggtatcttatttggattagcgatggattatgaagtcttccttatgtcgcgaattcatgaagaatatagtaaaacaggggataatgattattctatcaaagtaggattgaaagaaagcggtcctgttattgtagccgctgcattaattatgtttagtgtcttctttgcgtttgtattccaagaagatgtcatgattaaatcaatgggtatggcattagcgtttggtgtactctttgatgccttcgtagtcagaatgatgttaattcctgcattaacgaaattgtttggaaaaggttcgtggtatttaccagcatggttgaatcgcattattccacgagttgatattgaaggacatgcacttgaaaaatataaaacggttgaatcacaggaatctgaagccaaagatagtaaggaaacatacgacacaacctttaaagtatatccacaaggtgcaacaaatgtatcgaaacatcaagatgtacatgggcaagatgatgcacattcaatagtactagatgataaaacgatggcattgtaccaagaagtgaaacagcaatctgcaagttcattgttcttatatgatgctttaatagattatcaaaacaagcatcaactaaattcaaaacaacaagtaacgaatatagaacagttgaataaaaatattgaaaagctcaatcaattgttagaaaaaaatctacgaaataaatcataa

SEQ ID NO: 415982 - DNA, 228 bp, Staphylococcus aureus; identical to SEQ ID NO: 404851

SEQ ID NO: 415983 - DNA, 1995 bp, Staphylococcus aureus
atggaaaattattgtattttaggaaatcctaatgttggtaaaacatctttgtttaacgctttaactggttcgtatgaatatataggcaactggagtggcgtaacggtagagaaaaaagtagggaaacttaaagaaaatgtaggacaattaattgatttaccaggtacatatgatttatcgccgatttctaaagatgaaactgtagtgacagactatttattaaacgattcattttcaggaatcattaacattgttgatgcgagtcaactaaaaagaaatgtgcaattaacagtacaattgttagaacttaatcaaccaatatacatcggattaaatatgattgatgtagctacaaagcgcgggataaaaatcgattatcataaattgatgaaaaagttaaaaacacctatttttccagttgtggcacgtacaggcaaaggaacaaaatatttacttggcgaaataaagcatctaggggaagggtatcaaccgcattttaaaatcaattatggtgagaagattgaagagacaattaaaaatatgtgtcaaataataatgacagagacatctcatgataagtatcaagctaggtttattgcgattcaattcttattaaataacatgcaaattgcaaacgaacttaattcagagtttgtaaataaattgtcgagtttacgtgatcaagttgctgaacaagtaggggctgtatctgttcgtcgagagatggagcgtatacgcaatcattatattgagacgttattgcaagacgtggtaacgtatccagatgaagataagcaatatttcagctctagaatagacaagatattaacacataaatatatagggatgcctatctttctagcaattatgtggttgatctttcaaactacatttacatggattggcacacctttgtcggatcaactcgatgcatttataggtggtacatttacagatagtgtgaagacgattatgaattatctaggggttataccatttttacaagatttaattacagatggcattattgctggtgtaggatcagtattagtctttgtaccacaaattgttgtgctctttttctttatatctttattagaagattcaggttatatggcacgtattgcggttttaatggatcgtattatggaatcgttcggtttaagcgggaagtcttttataccaatgattatcggatttggttgtaatgtaccgagtattatggctgcgcgcagtattgaaaatgaaaaagagcgtttaacaacgatattaattgcaccattcatgtcatgctctgctagactgccagtgtatgcgttgttcgtaggtatctttttcaaagagaatcaatctttagtagtattaagcctgtatgttttaggtattattatggcatttttagtcagtacagtacttactaagacgattttaaaaaatgataatgcaatctttattgtggaattgccaacataccgtgtgccttccattaaaacgttgtggcgtagtacttgggaaaaggctaagggctttgttcgtaaagcaggtacatttatttttggcggctcagtagtcatttggctattaagttatgtaggaccacatggtatcaatgtgaatatcaatcaaagttttttacatatggttggtagtttctttggtatgttagtgcaaccgctcggatttggaacatggcaagcaggtgctacgttagtgccaggatttttagcaaaagaagttatcgtaagttcgatggcgattatctattcatcaggtgatgcaggccttgttaatgtgattcaaaatcaattcacaccgctatctgcgtatgcatttatgatatttatactattgtatattccttgtgtttctacagtggcagcaatccgtaaagagacttattcatggaaatggacggcacttgcagttgcctatcctctagtcactgcatatgtcttaacattcattttttatcaagtcggacatttatttgtttaa

SEQ ID NO: 415984 - DNA, 171 bp, Staphylococcus aureus
gtgtcagtcattattaacattttaatttttttagcaattttcggatatgccttatatacactagtaaaatttttcaagcgttcgaaacaaggaaaatgtggtacatgtgacattaatcgtgattgttgtggaatagaacagcacacagcgaatcattttccagggaaataa

SEQ ID NO: 415985 - DNA, 2106 bp, Staphylococcus aureus
atgaataacggttttttcaatagcgactttgattcaatttttcgaagaatgatgcaagatatgcaaggttcaaatcaagtcggtaacaaaaagtactatattaatggtaaagaagtttcacctgaagaactagcgcaactcacacaacaaggtagcaatcaatctgctgaacaaagtgcgcaagcttttcaacaagcagcacaaagacaacaagggcaacaaggtggcaacggcaattatttagaacaaattggtcgtaaccttacgcaagaagcacgtgacggtttattagatccagtcattggtcgtgataaagaaattcaagaaactgctgaagtcttaagtagacgaactaaaaacaatcctatattagttggagaagctggtgttggtaaaactgcgattgttgaaggtttagcacaggcaatcgttgaaggaaatgtaccagcagcaatcaaagacaaagaaattatttctgtagatatttcatcattagaagctggaacgcaatatcgtggtgcttttgaagaaaatattcaaaaattaatcgaaggtgttaaatcttcacaaaatgccgtactattctttgatgaaatccatcaaattatcggttcaggtgccacaggaagtgattcaggtagcaaagggttatctgatattttgaaacctgcattaagtcgtggtgagatttctattattggtgcaacaacacaagatgaatatcgaaacaatattcttaaagatgctgcattaacgcgcagatttaatgaagtgcttgttaatgaaccaagcgctaaagatactgttgaaattttaaaaggtattcgcgaaaaattcgaagaacaccatcaagtaaaattaccagatgacgtattaaaagcatgtgttgacttatcaattcaatatattccacaacgattattaccagataaagcaatcgatgtgttagatattacagcagcacatttatctgcgcaaagtccagctgtcgataaagttgaaactgaaaaacgaatttctgaattagaaaatgataaacgtaaagcagtaagtgctgaagaatataaaaaagctgacgacattcaaaatgaaatcaaatcattacaagataaattagaaaacagtaatggtgaacatactgctgttgctacagttcatgatatttcagatactattcaacgattaactggcattccagtttctcaaatggatgataacgatattgaacgtttaaaaaatatttctaatcgtttaagaagtaaaatcataggtcaagatcaagctgtagaaatggtttcacgtgcaattcgccgtaatcgcgctgggtttgatgacggcaaccgtccaattggtagtttcttatttgtcggccctactggtgttggtaaaacagagcttgctaaacaattagcaattgatctatttggtaataaagatgcacttattcgacttgatatgagtgaatatagtgacacaacagctgtttcaaaaatgattggtacaactgctggttatgtcggttatgatgacaattcaaatacgttaactgaaaaagtacgccgtaatccatactcagtcattctatttgatgaaatcgaaaaagcaaatccacaaattttaacattgttattacaagtaatggatgatggtaatttgactgatggtcaaggtaatgtcatcaactttaaaaatacaattattatttgtacatcaaatgctggctttggcaatggcaatgacgctgaagaaaaagatattatgcacgaaatgaaaaaattcttccgccctgaattccttaaccgcttcaacggcatcgttgaattcttacatttagataaagatgcattgcaagatatcgtcaacttattattagacgatgtacaagttacattagataaaaaaggtattacgatggacgtttctcaagatgcgaaagattggttaattgaagaaggctatgatgaagaattaggtgcacgtccattaagacgtattgttgaacagcaagtacgtgacaaaattacagattattatctagatcatacagacgttaaacatgtggatatagatgttgaggataacgaattagtcgtaaaaggtaaataa

SEQ ID NO: 415986 - DNA, 522 bp, Staphylococcus aureus
atggagtataagagttactatgattcgcctgtaggacgattggaacttttgagtgatggggtaagtctgaccgctgttttgtttgaaaatcaacaaggtgatggtactagggaagaaaatacgtctttagcgatatttagagaggcgacacagtggttagacgcgtattttaaaggtgacaatcctgaaatcacaatacctttaaagccaacaggtagtcattttcaacagtgtgtttggaatgaattaagacaggttccttatgggactctaacaacgtatggtgctattgccaaaaaagtaggtaaggtgcttgataagccaaaaatgtcagcccaagcggttggaggtgcagtcggaagtaatccattatcaattatcgtgccatgtcatcgtgttgtcggtaaaacgggtagcttaacaggattcggtggaacgattaataataaaattaagctgttagagttggagaatatcgatatgtcaaagctttatatacctaaacacagtacaaagccgtaa

SEQ ID NO: 415987 - DNA, 1167 bp, Staphylococcus aureus
atgacaataggtatcgacaaaataaacttttacgttccaaagtactatgtagacatggctaaattagcagaagcacgccaagtagacccaaacaaatttttaattggaattggtcaaactgaaatggctgttagtcctgtaaaccaagacatcgtttcaatgggcgctaacgctgctaaggacattataacagacgaagataaaaagaaaattggtatggtaattgtggcaactgaatcagcagttgatgctgctaaagcagccgctgttcaaattcacaacttattaggtattcaaccttttgcacgttgctttgaaatgaaagaagcttgttatgctgcaacaccagcaattcaattagctaaagattatttagcaactagaccgaatgaaaaagtattagttattgctacagatacagcacgttatggattgaattcaggcggcgagccaacacaaggtgctggcgcagttgcgatggttattgcacataatccaagcattttggcattaaatgaagatgctgttgcttacactgaagacgtttatgatttctggcgtccaactggacataaatatccattagttgatggtgcattatctaaagatgcttatatccgctcattccaacaaagctggaatgaatacgcaaaacgtcaaggtaagtcgctagctgacttcgcatctctatgcttccatgttccatttacaaaaatgggtaaaaaggcattagagtcaatcattgataacgctgatgaaacaactcaagagcgtttacgttcaggatatgaagatgctgtagattataaccgttatgtcggtaatatttatactggatcattatatttaagcctaatatcattacttgaaaatcgtgatttacaagctggtgaaacaatcggtttattcagttatggctcaggttcagttggtgaattttatagtgcgacattagttgaaggctacaaagatcatttagatcaagctgcacataaagcattattaaataaccgtactgaagtatctgttgatgcatatgaaacattcttcaaacgttttgatgacgttgaatttgacgaagaacaagatgctgttcatgaagatcgtcatattttctacttatcaaatattgaaaataacgttcgcgaatatcacagaccagagtaa

SEQ ID NO: 415988 - DNA, 1278 bp, Staphylococcus aureus
atgcaaagtttagataagaatttccgacatttatctcgtcaacaaaagttacaacaattggtagataagcaatggttatcagaagatcaattcgacattttattgaatcatccattaattgatgaggaagtagcaaatagtttaattgaaaatgtcatcgcgcaaggtgcattacccgttggattattaccgaatatcattgtggacgataaggcatatgttgtacctatgatggtggaagagccttcagttgtcgctgcagctagttatggtgcaaagctagtgaatcagactggcggatttaaaacggtatcttctgaacgtattatgataggtcaaatcgtctttgatggcgttgacgatactgaaaaattatcagcagacattaaagctttagaaaagcaaattcataaaattgcggatgaggcatatccttctattaaagcgcgtggtggtggttaccaacgtatagctattgatacatttcctgagcaacagttactatctttaaaagtatttgttgatacgaaagatgctatgggcgctaatatgcttaatacgattttagaggccataactgcatttttaaaaaatgaatctccacaaagcgacattttaatgagtattttatccaatcatgcaacagcgtccgttgttaaagttcaaggcgaaattgacgttaaagatttagcaaggggcgagagaactggagaagaggttgccaaacgaatggaacgtgcttctgtattggcacaagttgatattcatcgtgctgcaacacataataaaggtgttatgaatggcatacatgccgttgttttagcaacaggaaatgatacgcgtggtgcagaagcaagtgcgcatgcatacgcgagtcgtgacggacagtatcgtggtattgcaacatggagatacgatcaaaaacgtcaacgtttaattggtacaatagaagtgcctatgacattggcaatcgttggcggtggtacaaaagtattaccaattgctaaagcttctttagaattgctaaatgtagattcagcacaagaattaggtcatgtagttgctgccgttggtttagcacagaactttgcagcatgtcgcgcgctcgtttccgaaggtatccagcaaggccatatgagcttgcaatataaatctttagctattgttgtaggtgcaaaaggtgatgaaattgcgcaagtagctgaagcattgaagcaagaaccccgtgcgaatacacaagtagctgaacgcattttacaagaaattagacaacaatag

SEQ ID NO: 415989 - DNA, 432 bp, Staphylococcus aureus
atggaatataaaaagatactaattcgtttattaattgcttttgcagtacttttctcagcagatttcacttatcaatccgtcgaacaaacgcatcaatcgcatgccgcagttaattattatagtaaaaaccaatgtacatggtgggcatttaaacgtcgcgcacaagtcggcaaacctgtttctaatagatggggcaatgctaaaaattggtattacaatgcacgtaaatcaaaatatgcgactggtcgtacaccaagaaaatttgctgtcatgcaatcaactgcaggatattatggacatgtcgcagttgttgaacaagtatataaaaacggtagtattaaagtttcagaatacaacttttatcgcccattaaaatacaatacacgtgtactaagcaaaaaggcagcacgtaactttaactatatttactaa

SEQ ID NO: 415990 - DNA, 219 bp, Staphylococcus aureus; identical to SEQ ID NO: 404860

SEQ ID NO: 415991 - DNA, 864 bp, Staphylococcus aureus
atgaaatattttattgaagtcgttaagcaaggaggcatgactaatgcctccaaatcattatatattgcacaacctacaattagtaaagcaattaaagatattgaaaatgaaatgggcacgcccttatttgatagaagtaaaagacatttaatacttaccgatgcaggtcaaattttttatgagaaaagtaaagaaattgttgcactgtatgattatttaccatctgaaatggaacgcttgaatggactggaaacagggcatataaacatgggcatgtcggcagtcatgaatatgaagattcttatcaatattcttggtgcattccatcagcaatatccaaatgttacatataatttaatagaaaatggcggcaaaacgattgagcagcaaattatcaatgatgaagtagatataggcgtgaccactttgccagtcgatcatcatattttcgattatactaccctagataaggaagatttgcgacttatcgtgagcagagagcatcgactcgcaaaatatgaaactgttaaactcgaagatttagcaggtgaagacttcattttatttaataaagacttttacttgaatgataaaattattgaaaatgctaaaaacgttggctttgttccgaatactgtagcgcaaatttcacaatggcatgttatagaagatttagttacgaatgaattaggtattagtattttaccaacatcaatttcagagcaactaaatggagatgtgaagctgctacgcattgaagatgcgcatgtacattgggaattaggtgttgtttggaagaaggataaacaattaagtcatgccacaacgaaatggatagaatttttgaaagatcgtttaggctaa

SEQ ID NO: 415992 - DNA, 396 bp, Staphylococcus aureus
atgcacaaagtccaattaataatcaaactactactacaactaggaatcatcattgtgattacttatattggcacagaaattcaaaagatttttcatcttcccttagccggcagtattgttggtctatttttattttatttactattacaatttaagattgtaccgctaacttgggtagaagacggtgcaaactttttattaaagacgatggtctttttcttcataccgtcagttgtaggtattatggatgttgcttccgaaattacgctaaattatatactctttttcgcagtcattattataggaacatgtatcgttgcattatcttcaggttatattgctgaaaaaatgtctgttaaacataaacatcgtaaaggtgtagacgcttatgaatga

SEQ ID NO: 415993 - DNA, 690 bp, Staphylococcus aureus; identical to SEQ ID NO: 413589

SEQ ID NO: 415994 - DNA, 1740 bp, Staphylococcus aureus
atggcaaaaataaaagcaaatgaagcattagttaaagcattacaagcatgggatatagatcacttgtatggtattccaggagactcaatcgacgcagttgtcgatagtttacgtacagtgagagatcaatttaaattttatcatgtacgtcatgaagaagtagcaagcttagcggctgctggttacacaaaattaactggtaaaatcggtgtggcattaagtatcggtggccctggtttaattcatttattaaatggtatgtacgatgccaaaatggataatgtaccgcaattaatattatctggacaaacgaatagtacagcacttggaacgaaagcatttcaagaaacaaatttacaaaaattatgtgaagatgtagccgtttataatcaccaaattgaaaaaggtgacaatgtgtttgaaatcgttaacgaagcaattcgtacggcatatgaacaaaaaggtgtcgctgttgttatttgtcctaacgacttattaactgaaaaaattaaagatacaacgaataaaccagtagatacatcaagaccaacagttgtatcaccaaaatataaagacatcaaaaaagcggttaaactaattaataaaagtaaaaagcctgtcatgttaattggtgtaggtgcaaaacatgcgaaagatgagctacgtgaatttattgaaatggctaaaattcctgtcattcattcattaccagctaaaacaatcttgccggatgatcatccatatagtatcggtaacttaggtaaaattggtaccaaaacatcttatcaaacaatgcaggaagcggatttattaattatggttggtacaaactatccatatgtggattacttacctaagaaaaatattaaagcaatccaaatcgacacaaatcctaaaaatatcggacatcgttttaatattaatgtaggaattgttggagacagtaaaattgcattgcatcagttaactgaaaatattaaacatgttgcggaaagaccatttttaaacaaaacgttagaacgtaaagcggtttgggataaatggatggaacaagataaaaataataatagcaaaccattacgtccagaacgtttaatggcatcaattaacaaatttattaaagatgatgcagtaatttcagcagatgttggtactgcaacagtttggtctacacgttatttaaatcttggtgtgaacaacaagttcatcatttcaagttggttaggtacaatgggttgcggtcttccaggagctatggcatcaaaaattgcatatccaaatagacaagcgattgccattgctggtgacggtgcattccaaatggtaatgcaagacttcgctacagcagtacaatatgatttacctttaactgtatttgtacttaataacaaacagttagcatttattaaatatgaacaacaagcagctggtgaattagaatatgcagttgatttttctgatatggatcatgcaaaatttgctgaggcagcaggtggtaaaggttatacaattaagagtgctagcgaagtagatgctatagtcgaagaggcattagcacaagatgtaccaacgattgtagatgtatatgttgatcctaatgctgcgccattaccaggtaaaattgtaaatgaagaagcgcttggttatggtaaatgggcatttagatctattactgaagataaatatttagatttagatcaaattccacctatttcagttgcagcaaaacgtttcttataa

SEQ ID NO: 415995 - DNA, 2100 bp, Staphylococcus aureus
atggaagcggaaattgagataggggatgtttatatgtttaagaaattgtttggacaattgcaacgtatcggtaaagcattaatgttacctgttgcgattttaccagcagctggtattttattagcgtttggtaacgcaatgcacaacgaacaattagtagaaattgcaccatggttaaaaaacgatatcattgtaatgatttcgtcggtcatggaagcagcaggacaagttgtatttgataacttgccattattatttgcagttggtacagcacttggattagcaggaggagacggtgttgcagcattagcagcgctagtaggttacttaattatgaatgcaacaatggggaaagtgttgcacattacaattgatgacattttctcatatgccaaaggggcaaaagaattaagtcaagcagcgaaagaaccagcacatgctttagtattaggtattccaacgttacaaacgggtgtgtttggtggtattatcatgggtgctttagccgcatggtgttacaacaaattttataatattacactaccaccatttttaggattctttgcaggtaaacgatttgtaccgattgtgacatcggtcgtagcaatcgcaacaggtgtgcttttaagctttgcgtggccaccaattcaagatggattaaatagtttatcgaatttcttattaaataaaaatttaacattaacaacgtttatattcggtattattgaacgctcattaattccatttggtttacatcatattttctattcaccgttctggtttgaattcggaagttatacaaatcacgcaggtgaattagttcgtggtgaccaacgtatttggatggcacaattgaaagatggcgtaccatttactgctggtgcatttactactggtaaatatccatttatgatgtttggtttaccagcggcggcatttgctatttataaaaatgcacgaccagaacgcaaaaaagtcgtgggtggtttaatgttatcagcaggattaactgcatttttaactggtatcactgagccattagaattttcattcttatttgtagcaccagtactttatggaattcacgtattattagctggtacatcattcttagtaatgcatttattaggcgttaaaattggtatgacattctcaggtggtttcatagattatattttatatggtttattaaactgggatcgttcacacgcattattagttattccagtcggtattgtatatgctatcgtgtattacttcttattcgactttgcaattcgtaagtttaaattgaaaacaccaggtcgtgaagatgaagaaactgaaattcgtaactctagtgtcgcaaaattaccatttgatgtcttagatgcaatgggtggaaaagaaaacattaaacatttagatgcatgtattacacgtctgcgcgtagaagtggttgataaatcaaaagtagatgtagcaggtattaaagctttaggcgcatcaggtgtattagaagttggaaacaatatgcaagctatctttggtccaaaatcagatcaaattaaacatgatatggccaagattatgagtggtgaaattacgaaaccaagtgaaacgacagtgactgaagaaatgtcagatgaaccagttcacgtagaagcacttggaacaacagacatctatgcaccaggtgtcggtcaaatcattccattatcagaagtacctgatcaagtattcgctggtaaaatgatgggtgatggtattggctttatccctgaaaaaggtgaaattgtagcaccgtttgatggtacagtgaaaacaatcttccctacgaaacatgcgataggattagaatctgaaagtggcgtcgaagtacttattcatattggtatcgatacagtgaaactgaatggtgaaggattcgaaagtctgattaacgttgatgaaaaagtaacacaaggccaaccattaatgaaagtgaatttagcatacttgaaagcacacgcaccaagcatcgttacaccaatgattattacaaatcttgaaaataaagaacttgtcattgaagatgtacaagatgctgatccaggtaagctaattatgacagtcaaataa

SEQ ID NO: 415996 - DNA, 411 bp, Staphylococcus aureus
atgacaacagaaggtctattagttgcagagaaagaaatcgaagtgaatggttacgacattgatgcgatgggtgtcgttagtaatatcgtttatattagatggttcgaagatttgagaacagcgtttattaatcagcacatgaattactcaacaatgatcaatcaaggcatttcacctatacttatgaaaacggaagcagagtataaagtacctgtcacaatacatgacaaaccagtaggtcgtatttacttagttaaagcaagcaagatgaaatgggtgtttcagtttgaaattgtgtccgcacattgcgtgcattgtattggtacacagacaggcggtttttacagattgagtgataagaagataacctctgtgccacaagtgtttcaagacattttagcaacaaaataa

SEQ ID NO: 415997 - DNA, 969 bp, Staphylococcus aureus
atgcgtaaaaaatggtctacacttgcgtttggatttttagtagcagcatacgcacatattagaattaaagaaaaacgcagtgtgaaaagttatatgttagaacaaggtatacgattatctagagctaagcgtcgttttatgtataaagaagaagcgatgaaagcattagaaaaaatggcgccacagacagcaggtgaatatgagggcaccaattatcagtttaagatgccagtaacagtggataagcactacggttcaaccgtttataacgttaatgataaacaagataagcatcaacgcgttgtattatacgcacatggaggcgcatggttccaagacccactcaaaattcatttcgaatttattgatgaacttgcagaaacactcaatgctaaagtcatcatgccagtatatccgaagattccgcatcaagattatcaagcgacgtatgtgctttttgaaaagttataccatgatttattgaatcaagtagcagattctaaacaaatcgttgtaatgggtgactctgcgggcggtcaaattgctttatcatttgctcaattgttaaaagaaaaacatattgtgcaaccaggacatattgtattaatttcaccagttttagatgcaacgatgcagcatcctgaaattcctgactacttaaagaaagacccaatggtaggtgtggatggcagtgtgttcttagctgaacaatgggcaggggacacacctttagataactacaaagtatcaccaattaatggtgacttagatggtttaggtcgtattacattaactgttggcacaaaagaagtactgtacccagatgctttgaacttatcgcaattgttgagtgcaaaaggtatcgaacatgactttatacctggatattaccaattccatatttatccagtatttccgataccagagcgccgacgctttttataccaagtgaaaaatattattaattaa

SEQ ID NO: 415998 - DNA, 963 bp, Staphylococcus aureus
atgttgttggtgttaagttttaaaggggtgagatacttggcgaataatcattcagctttgcgtttaaaaggaattatacttgccattgtcggtgcttgtttatggggattaggtggtactgtttctgatttcttgttcaaatataagaatattaatgtcgattggtacgtcactgctcgacttgtagtcagtggtgttttcttacttattatgtacaaaatgatgcaacccaaacgttcaatatttagcgtattccaagatcgacgtatgttaggcaaattacttatcttcagtatactgggcatgttagttgtacaatatgcttatatggcatctattaatacaggtaatgctgcgattgcaacattactacaatacattgcgccagtttatattattatttggtttgtcataagaggcgttgcaaaactaacattatttgatgtgcttgctattatcatgacactattaggaacatttttattattaacgaatggttcattttctaatttagtcgtcaatcctgcaagtttattctggggtattttagctggtgtagcactcgctttttacacaatttatccttcagacctacttaaccgcttcggttcgattctaattgtcgggtgggcaatgcttatttctggtgttgcgatgaatttacgccatccaatttggcacattgatatcactaaatgggacatatcaattatattatttttaatctttggtattatcggtggtaccgcactcgcattttatttctttatcgacagtttacaatacatatcagcgaaagaaacaacattattcggaactgttgaacctgtcgtagccgttatcgcaagcagtctatggttacatgtggcattcaaaccatttcaaatcgtaggcatcattcttattatgattttaattttattactatcacttaaaagacaacctgaagcattagatgaataa

SEQ ID NO: 415999 - DNA, 204 bp, Staphylococcus aureus; identical to SEQ ID NO: 404870

SEQ ID NO: 416000 - DNA, 1044 bp, Staphylococcus aureus
atggatattctgttaggtgtaggcacattagtcttggttttagtgatcatgacgctatttttaaagtatgcaccgtacggtaaacaaggactacaagcattatccggtgcagcttgtgcgacatttctaccacaagcattcttaagttacgctattggtggcgtatttgatattaaatttctacaagatattggggatttagcaggaagtttaagcggtatcgcagtaggtattctaacgtgcttaaacttaggcgttgcaccagtatttgcggttattgttggtttagtattacatgactttaaattattaccagcattcatcgcagcttattgcgtagcttttttaattaaatggattgaaaagaaagttccagaaggcttggacttaattgtggtgatcttatttgcaccagcaattgctttcggacttgcatcaatcattacacctggtgtgctagcaacattaaaacaaataggtagtgctgtcactgcggtaggtgataacaatccatatgcattagcggtcattttaggactagtgattcctgttacaggtatgacaccgctaagttcaatggtattaacaagtttattaggactgacaggtgttcctatggctattggagcactaacatgtacaggtagctcatttgttaaccttattttattccgaaaattaaacattggtggaccgtcaaaagcatttgcagtttgtattgagccattgacgcaaattgatttaatagcgcaatatccagtacaactatatggtacaaatgcactgattggggtcgtcaacgcatgtatcgtgacatttagcggactagtaataggtgtcaaaggtatggcaacaccaattgcaggtgccatcgtattgtttggctttaataatgcagtgacatcaattgtaacaatcgcaacagtgattattgtcagcattgtcttagcctatattattggaacactaattaataagtttaatttaatgaatatcaactttaaaatgccgagcaaaaagaatcatattaaggagagtgtttaa

SEQ ID NO: 416001 - DNA, 681 bp, Staphylococcus aureus
atggcaaagagctatgattatcaaagtgctttcgatattatcggaccagttatgatgggcccttcaagttctcatacggctggtgcagtaaagattgggaattcagcacgcgcaatattgggagatattcctaaaaatattgaaatacattattatgaatcatttgctcaaacacaccaaggacatggtacagatgtcgctattgtgggtggagcaatgggatattcaacatttgataaccgaattaaatcttcattagaaattgcagctgatgatggtattaaaatagatatcatcgaagaagaaggcgatagtattggtcaacatccaaactgtgcttatattaaatcatctcgtaatgatggtcgctatattgaaattatcggtatttcaatcggtggtggtacaattaaaattaaaggtattcatataaatggactagaagtagatttaaatcatggattaccaattttagttgttgacggaaatatgactaaagcacaagtaaatcatttcattaatgatatcaacgatatgaaattagactgtaaagatgaatttattaagatagatgaagataaatgcttggttgtaataccattaaataaagcaatctcagaatcgacattaaatacaattaaagagaaatacagtgacgtaaacgtttcctatataaattag

SEQ ID NO: 416002 - DNA, 900 bp, Staphylococcus aureus
atgtttgattcaattagagagactatagattatgccgtagaaaataatatgtcatttgcggatatcatggttaaagaagaaatggaattaagcggtaaatcacgtgatgaagtgcgagcgcaaatgaaacaaaatttagatgtcatgcgagacgcagtaatcaaagggacgacaggtgatggcgttgaaagtgtaacgggctacactggtcatgacgctgctaaactacgtgattataatgaaacacatcatgctttgtctggatatgaaatgattgatgcagtcaaaggtgccattgcaacaaatgaagtcaatgctgcgatgggtattatttgtgcaacgccaacagctggttcctcgggtaccattcccggtgcactttttaaattagaaaaaacacatgatttaacagaagagcaaatgattgatttcttattcacttcagcattgtttgggcgtgtcgtagcaaacaatgcaagtgtagctggtgcaacaggtggctgccaagctgaagttggttcagcatctgcaatggccgcagctgcagcagtagctatattcggaggatcaccagaagcatccgggcacgctatggcattagcgataagtaatttattaggtttagtttgtgacccagtagccggacttgttgaaattccttgtgttatgagaaatgcaattggttcgggtaacgctttaatttcagcagatttagcattagcaggtattgaaagtagaatacctgttgatgaagttattgaagcaatggataaggttggtcgtaaccttcctgcatcattacgtgaaactggattgggtggactagcaggcacaccaactggcgaagcaattaaacgtaaaatctttggcacagctgaagatatggttaaaaataattaa

SEQ ID NO: 416003 - DNA, 171 bp, Staphylococcus aureus; identical to SEQ ID NO: 404874

SEQ ID NO: 416004 - DNA, 492 bp, Staphylococcus aureus
atgattcgatgtgctaaaaaagaagatttaaacgctatattagcgatatacaacgatgccattattaatacaacagctgtttatacttataaaccgcaaaccatagacgaacgtatcgcatggtttgaaacgaaacaacgtaatcatgagcctatctttgtatttgaggaaaatggaagtgtattagggtttgcgacgttcggttcgtttagaccttggccagcatatcaatatactatcgagcattctatttatgtcgatgcttcagctagaggaaaaggtatcgctagtcaattattacagcgtttaattgtagaggcaaaagctaaaggttatcgtacacttgttgctggtattgatgcttctaatgaagcgagtattaaattacatcaaaaattcaatttcaagcatgccggcacactgaccaatgtaggctataaatttgattactggttagatttagctttttatgaattagatttaaaagactag

SEQ ID NO: 416005 - DNA, 621 bp, Staphylococcus aureus
atgaaaaaatggacaaatcgattaatgacaatcgctggtgtagtacttatcctagtggcagcatatttgtttgctaaaccacatatcgataattatcttcacgataaagataaagatgaaaagattgaacaatatgataaaaatgtaaaagaacaggcgagtaaagacaataagcagcaagctaaacctcaaattccgaaagataaatcaaaagtggcaggctatattgaaattccagatgctgatattaaagaaccagtatatccaggaccagcaacacctgaacaattaaatagaggtgtaagctttgcagaagaaaatgaatcactagatgatcaaaatatttcaattgcaggacacactttcattgaccgtccgaactatcaatttacaaatcttaaagcagccaaaaaaggtagtatggtgtactttaaagttggtaatgaaacacgtaagtataaaatgacaagtataagagatgttaagccaacagatgtagaagttctagatgaacaaaaaggtaaagataaacaattaacattaattacttgtgatgattacaatgaaaagacaggcgtttgggaaaaacgtaaaatctttgtagctacagaagtcaaataa

SEQ ID NO: 416006 - DNA, 723 bp, Staphylococcus aureus
ttgaaattagaatttaaaaaaagtatttccaataaaattatttacacgcttggtgtgctattcatattccttttcttacttgggtattttttaccaataggaatagacaaagttaaaaatttaagctatggtcagtttttctttagttcttatacagttgccactgaatttggctttttattattttcatttgttattgcatattttattaataaagagtattcgaataaaaatatattattttacaagctgattggcgataatatatttaccttcttctataaaaaagtagcagttctattcattgaatgtttaatttatattattttaggcatcacaattatttcaataatatattcggatttctcacattacttactattaataatcttattttcactcgttatcttacaatatatcttagttgttggaacgattagtatggtttcacctaacattttaatcagcttaggtatcagcattgtatattggattggttcagtcatcttagttgccattaataaaaatatatttggtatcgttgctccgtttgaggcgagcaacacgatgtatcgtgccgtagaaaaaatattgaataacgagtcaacatttatatgtcctactgaaattataaatacagtatcattcttcgttcttctatttatagttaatactattgtcttattactaagtagaaagagatggttgaaaatcggtatgtag

SEQ ID NO: 416007 - DNA, 636 bp, Staphylococcus aureus
atgaaactaaataactattctttaaaagttaaaaacaaacaactagttgacaattgtgatttaaatttctatcttggtcagatcaatcacattgttggtaaaaatggtgtaggaaaatctttattagctaaagatttcttactaaataatagtggaaatatccctaagtccatttctcaaaatgtaaccttaatatcaagttcatcaaatattcctaaagatataacaaaagattttttattatcattgttaaaatcaaaatttgaaaacaatcgacaaacattcgataagatttataacatactaaacatcgaagcaataccgtctaacgtactactaaaaaacttgagtgatggtcaaaaacaaaagcttaaattattaagtttcttattggaagatcatgatttaatcatattagatgaagttacaaacgctttagacaagaaaacagttaatgaaatttatgaatttttaaatgattttattcaaagccatcaaactaaaactattatcaatattacacataatttatccgatttaagtgctttgccgggtaaatactttatttttaaagaccttcaaatagaagagtaccaatcaaaagaagaagtcataaatgattacattaatttataa

SEQ ID NO: 416008 - DNA, 801 bp, Staphylococcus aureus
atggttaaggctattgcggtagatatggacgggacgtttttagattcgaaaaagacatacgataaaccgagatttgaagcgatttttactgaacttagaaatagagatattacatttattgctgcgagtggcaatcaatatgcgaagttgaagtctattttcggggatagagatatgtattttatttctgaaaatggtgcagttatttataaaggcaatgagttatataattataaaagctttaatcgtcaggtgtttcaacaggtcgtcgattacttaaatatgaaccaaagtattgatcaactcgtcatctgtggtttgaaaagcgcgtatattttaaaacatacttctgaagcatttaaagaagatacgagattttattatcatcagttaaaagaaattgacagtctacaacaattacctgaggatgattatgtcaaaatagcatttaatattaatcgtgagacgcatccaaatgttgacgaagaagtagcaacgcaattcagcaatgatattaaacttgtctcaagtgggcacgatagcattgatattattatgccaaacatgactaaagggcaggcattaaaacgattgttagataaatgggaaatgtctccttcagagctcatggcctttggagatgcgaataatgataaagatatgctagcgttcgctaagcatagttatgtgatggaaaatagtcatgatgaagaattgttcaatattgcctcggctgtcgctccaagtaatgataagcagggtgttttaacgattatcgaacaagaagtattgaacaagtag

SEQ ID NO: 416009 - DNA, 993 bp, Staphylococcus aureus
atgacaaaaattatgttctttggtacgcgtgattatgagaaagagatggcattaaattgggggaaaaagaataatgtcgaagtaactacttctaaagagctattatcaagtgctacagtcgatcaattaaaagattacgatggcgtaactacaatgcaatttggtaagttagaaaatgacgtttatcctaaattagaatcttacggtattaaacaaattgcacaacgtactgctggatttgatatgtatgatttagatttagctaaaaaacacaacattgtgatatctaacgttcctagttattcacctgaaacaattgcagagtattctgtttctatcgccctacaattagtgcgtcgcttcccagatattgaacgccgtgtacaaacacatgattttacttggcaagcagaaatcatgtctaaaccagttaaaaatatgactgttgcaattatcggtacgggtcgtatcggtgctgctacagctaaaatatatgcaggatttggtgctacaattacagcttatgacgcttatcctaataaagatttagactttttaacttataaagatagtgttaaagaagctattaaagatgccgatattatttctttacatgttccagcgaacaaagaaagctatcatttattcgataaagcaatgtttgatcatgtgaaaaaaggtgcaatcttagttaacgcagcacgtggtgcagtcatcaatacacctgatttaatcgctgcagtgaacgatggtactttgttaggtgctgcgattgatacttatgaaaatgaagctgcatacttcacaaatgactggactaataaagacattgacgataaaacattattagagttaatcgaacatgaaagaattttagtaacaccacatattgctttcttctctgatgaagcagtacaaaaccttgttgaaggtggtttaaacgcagcattatctgtcattaacactggtacatgtgaaacacgtttaaattaa

SEQ ID NO: 416010 - DNA, 672 bp, Staphylococcus aureus; identical to SEQ ID NO: 410190

SEQ ID NO: 416011 - DNA, 807 bp, Staphylococcus aureus
atggcatttcacgataaaacagcaacacaagtgacaaacattgaactgaacgtaagagacttagacttaatgacaacattttacaaaaacattttaggactatccgttaaaagttctgacgataacacaaccgtattatctgttgggactggtggccatactctaacgttacatttattagaagacggccgtcagacttccccacgtgaagcaggactttttcatatagcatttttattaccaactactgaggatctagctaacttcttatatttcgtggcacaaaaaaatatgggcattggcgctggtgatcatttagtaagtgaagctttatatttcaacgaccccgaaggtaatggtattgaagtctatcgcgatagaccttcatcttcatgggaatggcaaaatggcaaagttaaaatggatactttagaagttgatagccaaaccttattaacacatcgtactgatgaaggttggcaaggaatgccagcaaaaggcatgattggacacttacatttaaaaacacatgatttagacgcagcatatcaatgttacattgaacaattaggattccaacatgtgtctgattttccacgtgcgctatttatgtcaacgaatcattatcaccatcatattgctgctaatacttggcaatccaatcaagcaagacaaaacaatgcacaaagttatggattaacacatgttgatatttatcaacccgacgcctcaacacatacatttacggcaccagaagggtttgacatcacagttcattcaaatactgaccttgttccagaaaaataa

SEQ ID NO: 416012 - DNA, 285 bp, Staphylococcus aureus
atgagtaaccttgaaatcaaacaaggcgagaacaaattctatattggtgatgatgaaaataatgctttagctgaaatcacataccgttttgtggataataatgaaattaacattgatcatacaggcgtatctgatgaacttggtggtcaaggtgttggcaaaaaactagttaaagcagttgttgaacacgctcgagaaaatcatttaaaaattattgcctcatgttcatttgccaaacatatgttagaaaaagaagattcatatcaagatgtatatcttggttaa

SEQ ID NO: 416013 - DNA, 435 bp, Staphylococcus aureus; identical to SEQ ID NO: 410193

SEQ ID NO: 416014 - DNA, 594 bp, Staphylococcus aureus
atggaacatatttttcgtgaaggacaaaaaggtgcaccaacgctaatattgttgcatggtacaggtggcgatgaattcgatttattgccattaggcgaagcattgaatgaaaattatcacttgttaagtattagaggacaagtttcagaaaatgggatgaaccggtatttcaaacgtcttggtgaaggtgtttatgatgaagaagatttggaatttcgtggacaagaattgttagcgttcattaaagaagctgctgaacgttatgaatttgatattgaaaaagcagtacttgttggattttcaaatggatcaaatatagcgattaacttaatgttgcgttcggaagcaccatttaaaaaagcattgttatatgcaccgttatacccagttgaagtaacgtcaacaaaggatttatcagatgtaagtgtgttgctttctatggggaaacatgatccaattgtgccattagctgcaagtgaacaagtcattaacttgtttaagacacgtggggcagtagtcgaagaagtttgggtgaatggtcatgaaattacagaaactggattaacggctggtcaacaaatacttgggaaataa

SEQ ID NO: 416015 - DNA, 1965 bp, Staphylococcus aureus
atgactcaaattactgaaaaagaattaaaaaagaagtatttagatttactatcccaaaattttgatactccagaaaaacttgcaactgaaattatcaatttagaatcaattttagaattacctaaaggtacggaacatttcgtcagcgatttacatggtgaatacgaagctttccaacacgtattacgcaacggttctgggaatgtgcgagcgaaaatcaatgatattttcaaagagagactttcaactaaggagcttaatgatttaactgctcttgtctactatccagaagacaaattaaaattgattaaaagtgatttccaaagttgcggtcaacttaatgtctggtatatcacaacaatcgaacatttaattgagttgattaaatattgttcttcaaaatatacgcgttcaaaactgcgtaaagcattgccaaaacaatacgtttatattattgaggaactactgtataaaagtaatgaatatcaaaataaaaaatcatattacgaaacacttgttaaccaagtaattgaacttaaacaggcagatgatttaattattggactcgcttattccgtacaacgcttagtcgtcgatcatttacacgttgtcggtgatatttatgatcgtggaccacaaccagataaaattatggatacactgattaattatcattccctagatattcaatggggtaatcatgatgtgctttgggttggagcctatgctgggtcaaaagtatgcttagcaaacttacttcgaatttgtgcacgctatgataatttagatattatcgaagacgcttatggcattaatttaagaccactgcttactttagctgaaaaatactatgacgcagataatcctgcttttaagcctaaaaaaagacctgacaaacacgaacgtttaactcaacgtgaagaaagtcaaattactaaaattcatcaagctattgcgatgattcaattcaagttagaaataccaattattaaacgtcgtccaaatttcgaaatggaagaacgtcttgtgcttgaaaaggttaattatgatacaaatgaaattacagtttatggtaatacatacccgttgaaagacacatgtttccaaactatcaatcgtaataatccagcagaattactacctgaagaagaagaagtcatgaataaactattattgtcattccaacaatctgaaaaattacgtcgtcatatgtctttcttgatgcgtaaaggttcgctttacttaccatataatggtaatttactcattcatggttgtattccagttgatgaaaatggtgagatggaatcatttgaaattgatggtcatacttacagcggccaagaattattagatgtgtttgagtatcatgtccgtaaatcatttgatgaaaaagaaaatactgatgacttatcgacggatttagtttggtatttatggactgggaaatattcgtcattatttggtaaacgcgcgatgactacgtttgagcgatattttattgcagataaagcttctcataaagaagaaaaaaatccatactatcatttacgtgaagatgtgaatatggttcgtaaaatgctcagtgatttcggattaaatccagatgaaggacgcattattaatggtcacacaccagtgaaagaaatcaatggcgaagatcctatcaaggctgatggaaagatgcttgtcattgatggtggtttttcaaaagcttatcagtcaacaactggcattgcaggctatacattgttgtataattcattcggaatgcaactcgttgcacaccaacaatttaacgctaaagaaaaaatactttccgaaggtatcgatgaactttctataaagcgcgttgtagacaaagaattacaacgtaagaagattcgtgataccaatattggtaaagagcttcaagctcaaatagatattttgaaaatgttaatgcatgatcgttacttagactaa

SEQ ID NO: 416016 - DNA, 612 bp, Staphylococcus aureus
atggaacaaattatcactgaatttattagtcgttttgggtatgcagccatttttatattaattttattagaaaatgttttacctatcgtaccatcggaaattattctgacatttgctggccttatgtctgttaaatcacatttatcaattttaaccttatttattattgcaaccatcgcatcgtttatagggctgttaattttatattatatctgccgtttgatttcagaagaacgtctatatcgttttattgatcgacacggtaagtggattaaattgaaaagtaaggatttaaagcgagcaaatgattggtttaaaaagtatggcgtatgggctgtatttatctgtcgtttcatacctgtattacgtgtattgattaccattccagccggtgtaaaccgcatgaatgttgtgacatttaccgttatttcattaataggtacaacaatttggaatttcggtttaattttactaggacgcacgttgagcgatagctttggtatgttgatgactggtcttcatacatattcacgtattatgtatgttgtcatcattatcgcagtcatttactttgctatacgttacattggcaaacgtaagagagtaaaataa

SEQ ID NO: 416017 - DNA, 1824 bp, Staphylococcus aureus
atgattattcctgcaataatcggttacttatgtggtaatttccaatttggattattagttgcaaccggaacactagcccatatttatgtttttaaaggtccgtcgcgatctaagctgcgaactgtaataatttgtaatttagcgtttgcaatatgtatgatgcttggtacgctaacagccaaaacgccactcgtttttggaatgacattattaattgttacggttataccattttatatatttactgccttaaaaatagctggaccgtcatcgacattcttcattgtgacattcagtctacccattaacttacctatagctcccgaagaagcattatatagaggctttgcgattttagtaggcggtatacttgccactatgatggtgttaatcacgatcgtattttctaaaaacaaagctgaagaacaagcaattcaaaatgattttaaactcatatctaagttgttacacacttataatgataaagctgcttttttacaagtagcaaaaacagcggtggatagttttaaagcatctgataaattattaatcacttctacttcaagtaacgataaattaagtagacgtttccaaaaattattattattacacacatctgcccaagggatttattctgaactgttagagttgaacgctaaacaaattcgaccattgccagatgagttaattgaaatgatggatcatatcattgcacaactagataatagtgatgaaaatgtaagatattggcgaaaagaagtgacagtaacagaggaatttcaaaatttattcaaccatatattgaaaattgatgaaatggtgcatgcaaatgaagcgcgtattgcgtatgaagcagacatgcgaaaacctttatatagtaaacgcatttatcaaaatttaacattagactctattgtttttagaaatacattgagatatacagcgattatgatgatagcgatatttattgcgttaatgtttgattttgaaaaagcatactggataccgttatctgcacatacaatattactaggaacatcaactatacatgcaatcgagagaggtatggcacgaggtttaggtactattttaggtgtgttagtactttcagtcatattgttgttttcaataccaacacctgttgcagtaattttaatgggcattgcagcattgtttactgaagcattggtgggagcaaattatgcgattgcagtagtttttattacaatacaagttattttaatgaatggattagcatcacagaatttaacaattaacattgcgtttccaagagttattgacgttgcaataggtattgtgattgcaatcataggtttatttgtccttggacaacgtaccgcatccgtattgcttcctaatgtaatggctgaagttgttcgtaaagaagcaacgctcttccattatttgttttctgaaaaccaatataaagataatgtgtatcagaaaaacacggccatgaacctatctgtgaaattaaataacatgacgcaagtttataatgcagctaatggtgaattatttagtgataagacattgattcaaaattattatcctagcttattcgcattagaagaaattagctttatgttaaatagagccatggctaatgaagatagacttacaataaatgaacaattaatgggcgagtatttagcaacatttgaaaacatcgctaagcatttagaattaaatacagaattagaaataaagatattaccagatttaccacagtataattatattcaatcagcaatgatgaatattcaacacaatggttttcgtgagagagacaagaacgtttaa

SEQ ID NO: 416018 - DNA, 693 bp, Staphylococcus aureus
atgtatgtagatcgaaaaccatcactatatttagaggatttgcgacatgattttaaaaatagtttaagtaaatttgaaaatggtgatgaagcatttgatacgttattaggtttcgtagagttagatcatatttattcgtcagcactaaaggaaataagcactaaactgagtattttagatgacaatttcaatcacatttataaacacaatcctatacatcatatggagcgacgtgtgaaagaaatgcgtagtttaatagaaaagcttaatcgtaaaggattacagattagtgcagaaactgccaaagaacacatactggatattgcgggaattcgcgtagtatgtaattacttagatgatatttatttgattgaagagatgttgcttaaacaagaagacgtacaattgataaaacgtaaagattatattcagcaccctaaagaaaatggttaccgcagtttacatatcgttgtatccattccagtctttttagcagaacgcgttgaggtattgcctgttgaaattcaaattagaacgataggtatggatatgtgggcaagtttagaacataaaatacgttataaaaacaatgcagagacggaaaagtatcgagatttactgaaagaatgtgcgacagagattactgaagttgaagataaattacaacaaattcattctgaaataacagagtag

SEQ ID NO: 416019 - DNA, 765 bp, Staphylococcus aureus
atgtctaactattcgactggagaactcgcaaaattatgcaatgtgacaacacgaacgattcaatattatgatcgcaaaggtattttgaaaccacaaggatttacagaaggaaagcgtcgtgtgtatacagaacaacagcgacaaacattagagttaatcttattgcttaaagatttaggttgtgcgttaagcgatatagatatgttgctaaaaggtgaaggtactttgaagacactcaataccttactaaccatgaaacaacaagaaattaaccaacaagtcaaacagcaacaagcggtattaaacaaaattaaaaatgttcaatattacgtaaatgaagcgtcgacgtctccaatcacacacttaaaagacatagagcatgtcatgagtaaatcagctgaaatgaaaagtattcgtcgtaacatttggattagtgctggtattataggaataattcaatattctagcattatgagttcaatcttgatgaaaaacaaatggccgtttttaattgctttaccatttatgaattgttacggcattggtgttactttttattaccaacaaaaggttgcctatttatgtcctaactgccagcatatattctcaccatctttgtgggcagttatcaaagcgaaacatacagcgacaacacgtcgattcgaatgtccgaactgtcatgaaacgcattattgcattgaagtacctaaagcgcatatgagtacagaacaattagaaatatcccacatacaacataacaattaa

SEQ ID NO: 416020 - DNA, 678 bp, Staphylococcus aureus
atgtatggatatccagagaaatggttggaaggtatgacaactggagaaggtatcgcggcagaattacgcttaggtattgtgaatggtcacatagctgaaggtacgttactcactgaaaatcaaatggcaaagcaatttaatgtgagtcgttcgccaattcgagatgcatttaaattattgcaacaaaatcaactcatccaattagaaagaatgggtgcacatgtgttgccgtttggggaacaagaaaagaaagaaatgtacgatttgcgactgatgctagagtcatttgcattttcaagagttaaaaatcaagagagactacctatcgtaaaagaaatgaagaaacaacttgaaatgatgaaagtggcagtaaaatttgaagatgcagaatcatttacgaagcatgactttgaatttcatgaaacattaatcaaagcatctaaccaccaatatttaaactcattttggagtcatttaaaaccagtaatgatggcactcgttttaacatccatgcgacaacgtatgcaacagaacccgcaagattttgaacgcatacatcataatcatcaagtgtttattgatgcagtggaacaatacgacagtcaaattttgaaggaagcgtttcatttaaattttgacgatgttggtaaagatattgaaggattttggttgaattaa

SEQ ID NO: 416021 - DNA, 1554 bp, Staphylococcus aureus
atgaaatatatgattggtgtcgacattggaacgacgagtaccaagtcagtcttatatgatgaaaatggagcttttatcatgaaacatcaaatcggctatgatttacacacaccaaacgttgatgtctcagaagaaaacccagatgaattatttgatgcggtattaatgacaattaaatacataatgagggaatcgaaagttaatcaagatgatattaaatttgtgtcatttagtgcgcaaatgcatagcttgattgcgatggatcagcaacatcaaagattaacaaataatattacttgggcagataaccgcgctgcaaaatatgcaacagtaataaatgaagtgcatgatggcaatgcgatttatcagcgaacaggtacgcctattcatcctatgtcgcctttagtgaaaattttttggatgaaacatgaatggcaagatgtatttcaacgtactgctaagtttgcagatattaaaacatacattttctatcatttatttgatacatatatcattgattattcaatggcttccgcaacagggatgtttaatttagaaacattagattgggatgttggggcattagaattgcttggtatttccaaggaaatgttcccggaattagtgccaacaacgtacgtaatgaaaggcatgaaagaacgttatgcaacattaatggggcttaatgaagatacaccgtttgttattggtgcgagtgatggggtcctttctaatttgggtgtcaatagtgttggtaaaggagaagttgctgtcacaatcggtacatctggcgcgattcgtactgtgatagataaaccacgtactgattacaaaggtagaatattttgttatgtcttaacagaggaccactacgtcatcggaggtcctgtaaataatggtggtgtcgtattgagatggttgcgcgacgagttgctagcgagtgaagtcgaaactgcgaaacgtctcggtgttgatccttatgatgtcttaactcaaattgcaaagcgtgttaaaccaggtgcagatggtttaatattccatccctatttagctggagaacgtgcgccgctttggaacgcaaatgcaagaggttcattcttcggtttaactttatctcataaaaaagaacatatgattcgcgctgcattagaaggtgttctttacaatttgtataccgtctaccttgcactcattgaagtaatgaatgaaacgcctaatatgataaaagcaacaggtggttttgcgaaaagtgaagtatggcgtcaaatgatgtcagatatatttgacacagagttagtggttcctgaaagttatgaaagttcatgcttaggtgcctgcgtgcttggacttaaagctgtaggtgacattgaagatttttcaatcgtttcatcgatggtcggtgctacaaataatcatacgccgtttgaagaaaatgtcgctgtttaccaagagctcgtatccatttttatcaatttaagtcgttctttaacagagaattatgaacaaattgcagattttcaacgccaacatatggctgaaaataaaacacaataa

SEQ ID NO: 416022 - DNA, 1359 bp, Staphylococcus aureus
atgtttaacgaaatatggccgttaatcagtgttgttttaggtatcgttattttattagtattaattattgggtttaaattaaataaatttatttcattaattatcacatcgatgattacagcgttaatgctaggtataccattgactaaaattatggagacgattgagaaagggatgggcagtacgctcggccacattgcactaatattcggtttaggtgccatacttgggaaattacttgctgatggtggtggtgcaactcgaattgcagacacgttgattcaaaaatttggtcaaaaacatgtacaatgggcaatgcttgttgcagcatttatcgtcggtattgcattgttctttgaagtaggtttagtcttactgattccattagtatttacagtagcaaaacgcgcaaatgtttcagtgttaaaactaggactacctatggtaacagctttatctgtgacacatggctttttaccaccacatccaggaccggtagtcatcgcaaaagaattaaaggcaaatgttggagatgtattactgtacggtatgattattgccattccagttacactcattgcaggacctatatttaacaaagttgcacaaaaaatgattccgtctgcgtatacacgagaaggcgatatttcagcgttaggtgcacaaaaagaatttacggatcaagagatgccaggatttggtatgagtttattaactgcaacattaccagtcatattaatgttagtgtctacgataacgcaacttgtaactgggcacgacaaacctacaaatctatttgaatctatcatttatatgataggaacagcagggacagccatgctaatagcagtattatttgcaatcgttacgatgggattaatgagaaaacgtaagatgaatcatattatggaatcagtgacgaatgcgatttatccaatcggaatgatgttattgattattggcggtggcggtacatttaaacaagtattaattgacggtggtgtcggaaatacaattgctaaaatgtttgaaggtacagagatgtctccaattttactagcatggattgttgcagctgtgctacgtatcgcattaggttcggctacagtagctgcgatttcaactacaggtattgtcttaccattattacaatcatcagatgtaaatgttgcattagttgtacttgcgataggtgcaggtagtgtgattttgtctcatgtaaatgacgcaggattttggatgtttaaagaatattttggtttaactgtaaaagaaacattcttaacatggtcattattagaaacgattatttccgtttcaggtatcatcttcattctattcatcagcttatttgtttaa

SEQ ID NO: 416023 - DNA, 201 bp, Staphylococcus aureus; identical to SEQ ID NO: 415389

SEQ ID NO: 416024 - DNA, 867 bp, Staphylococcus aureus
ttgaaaaaaataaaaaaggcaatcattcccgctgctggtttagggactagatttttaccagcaactaaagcgatgccaaaggaaatgcttcctatcttagataaacccacaatacaatatatcgttgaagaagctgcaagagctggaattgaagatattattatagtgacaggtcgccacaaacgcgcgattgaagatcattttgatagtcaaaaagaattagaaatggtgttaaaagaaaaaggtaaatctgaattactagaaaaagttcaatactcgacagaacttgcgaatattttttatgtaagacagaaagaacaaaaaggtttagggcatgcgattagttctgcgcgtcaatttatcggcaatgaaccatttgcggtattattaggtgacgatattgttgaatctgaagtgccagcagtgaaacagttgattgacgtttatgaagaaacggggcactcagttataggtgtccaagaagttccggaagcagatactcatcgttatggaattattgatccattaactaaaaatggacgtcagtatgaagtgaaaaagtttgttgaaaagccagcacaaggtacggcaccatcaaacctagctattatgggccgatatgtattaacgcctgaaattttcgattatttaaaaacgcaaaaagaaggcgcaggtaacgaaattcagttaacagatgcgattgagcgtatgaacaatgataatcaagtgtatgcatatgacttcgaaggcgaacgttatgacgttggagaaaaattaggatttgtcaaaacaacaatagaatatgcgttgaaagatgacagtatgcgagaagaattaacacgatttattaaagcattaggtttataa

SEQ ID NO: 416025 - DNA, 147 bp, Staphylococcus aureus
atgtctaaaaagttaaaaattataattcctattattattgtcttattattaataggtggaatcgcatggggagtttatgcattttttgcaaacacaccgaaaaatacatacttaaaaaagcgaacaacaaactgcaaaaatgtataa

SEQ ID NO: 416026 - DNA, 732 bp, Staphylococcus aureus; identical to SEQ ID NO: 409080

SEQ ID NO: 416027 - DNA, 204 bp, Staphylococcus aureus; identical to SEQ ID NO: 409094

SEQ ID NO: 416028 - DNA, 357 bp, Staphylococcus aureus
atgttgaagaatgttgaaatacaaagttatatcaaggaggttgaaacaaaactctttgatgagaatatcatgtcaggtaaagaagtgttgtatagactaactagaacagctagaggagaacactcagaagttgaagcagtcgtaacaaaaactggagactataaagagaatcccgacactggcaaaatgcaattggtatacgatgaacacatacaacttgtttctaagtcacctaaaataagtgaccaaaacaaagctttagagatgttaggtagacaccataaattatttacagacaaacaagaagttgactacaaaataccaatgtttgtcgataatattccggaagatgattag

SEQ ID NO: 416029 - DNA, 195 bp, Staphylococcus aureus
atgggggaagttttaaaggattttatgctaacttttaatttgcatgtaaatgggcagtgttacaaaatagtcattgtttttgctgaaatttttgtttgtgaaattagcatatatgtatttggctcatattttcgttttaaaagcgtatataagttttggatagaaaaaatatatgatttacccctaaacctttaa

SEQ ID NO: 416030 - DNA, 195 bp, Staphylococcus aureus; identical to SEQ ID NO: 409860

SEQ ID NO: 416031 - DNA, 681 bp, Staphylococcus aureus; identical to SEQ ID NO: 415429

SEQ ID NO: 416032 - DNA, 486 bp, Staphylococcus aureus; identical to SEQ ID NO: 415428

SEQ ID NO: 416033 - DNA, 675 bp, Staphylococcus aureus
atgaactatttcagatataaacaatttaacaaggatgttatcactgtagcggttggctactatctaagatatgcattgagttatcgtgatatatctgaaatattaagggaacgtggtgtaaacgttcatcattcaacggtctaccgttgggttcaagaatatgctcccgttttgtatcaaatttggaagaaaaaacataaaaaagcgtattataagtggcgtgttgatgagacatatatcaaaattaaaggacagtggtgttatctgtatcgcgcgattgatgcagagggacatacattagatatttggttgcgtaagcaacgagataatcattcagcatatgcgtttatcaaacgtctcattaaacaatttggtaaacctcaaaaggtaattacagatcaggcaccttcaacgaaggtagcaatggctaaagtaattaaagcttttaaacttaaaccggactgtcattgtacatcgaaatatctgaataacctcattgagcaagatcaccgtcatattaaagtaagaaagacaaggtatcaaagtatcaatacagcaaagaatactttaaaaggtattgaatgtatttacactctatataaaaagaaccgcaggtctcttcagatctacggattttcgccatgccacgaaattagcatcatgctagcaagttaa

SEQ ID NO: 416034 - DNA, 828 bp, Staphylococcus aureus
atgtggaagtgggaagctgaaaatgatgcgaaaggcgtcgttgttattgctcataatatattagaacatacgggaagatatgcatatgttattacgatgttaagaagaaatggctatcatgtgattatgggagatttgcctggtcaaggtcaaacttcaagagctaataaaggacaaattgaaaactttcaaacgtatcacgaaagtttgctagactggttaaagatagctaatgaatataaaattcctacttatgtattaggggtaggacttggcggtttgattttattaaatttacttgaaaaagtagaattgccaatcgaggggatgatgttaatttctcctatgctagaacttcaaaagaatggaaaaaatcgtaaagataaacttgtttcaaatataggtaaaatttcaaaagacacacgttttaatgttggtgtagaaccaaaagatttaacacgtaatttagaaattgttgaagaaacagttaacgagggtttaatgttaaaaaaagcaacgtatcattggtataatacaattaatgagacgatgaaagatacgatggctcatattcatgacattcaaccaatgccaacgctattaatgtatggaacgaaggatttaattgttgatactagggcaattgatgagtttaaagaaaaatatcaaacacctgaattatattttaaagcttggcaaggtttttaccacgaggttcacaatgagccagaacgtgatgaagtaatgcgttatattctgactttcttaaataacagcgtcaatacaatgggctttattgttgaagatgacgaaattgtagaaatttaa

SEQ ID NO: 416035 - DNA, 921 bp, Staphylococcus aureus
atggataagtatactgagaagaaacaaagaaatcaagtatttcagaaatttattgaacgacatgtcaaagaaggacaaatggatttgataagggagtgtaatacattcttgagttttgtgtcagataagacgttagaaaaacagaaattgtataaatctaatttgtgtaaaaatcgattttgtcctgtatgtgcatggcgaaaagcgagaaaagatgcgttaggtttatcattgatgatgcaatatattaagcaaaaggaagataaacaattcatctttttaacacttacgacgccaaatgtaacagttgagcatttggaagatgaaataaaacattataatgagtcgtttagacgattaagtaatcgtaaacactttaaatctatagctaaaggttacgtaagaaaattagaaatcacttataacaaaaaacgcgatgattataatccacattttcatgtattaattgcggttaataaatcatattttacagataagcgatattatataagccaaaaagaatggcttgaactatggcgtgatgtgacaggtaatcaagctattacacaagttcatgttcaaaaggttaagcaaaacaataataaagaactttatgaaatggctaaatattccggtaaagatagcgattatctcgttaatcaaaaagtattcgacgcattttataaagcattaaaaggcaaacaggtacttgtctattctggattgtttaaagatgcacgcaaaaagctaaaaaatggcgagttggattatctcaaagaaagtgatccgacagaatatatttaccaaatcttttatgtgtggaatcaaaaagagtatctagcaagtgagatttacgacttaaccgaagaagaaaaacgagaagtaaacaaccaaatgattaacgaaattgaagaagagtaa

SEQ ID NO: 416036 - DNA, 189 bp, Staphylococcus aureus
ttgaataaagacacaatgttagataaaggttacgttatagcaactattttaaatgttttctttttacttggattaatttttatatctcatttggaaaatttatatatattaattccgtatgttattttgatgggaataaatgctatttatttggttgttaaagttatgaatttcaaaaagaataattag

SEQ ID NO: 416037 - DNA, 366 bp, Staphylococcus aureus; identical to SEQ ID NO: 415041

SEQ ID NO: 416038 - DNA, 180 bp, Staphylococcus aureus
atgttaagttatggtggattacttaaagaaaagcataaaattttaaacttagacgatgccgaagatggtaatttaattaatacaagtgatgaagataaaataacagatgaagaagcaaaagcacattcaattacggcaatttggaattttgaaaagcaaaattattatttaagacattag

SEQ ID NO: 416039 - DNA, 378 bp, Staphylococcus aureus; identical to SEQ ID NO: 408858

SEQ ID NO: 416040 - DNA, 1899 bp, Staphylococcus aureus; identical to SEQ ID NO: 409090

SEQ ID NO: 416041 - DNA, 366 bp, Staphylococcus aureus; identical to SEQ ID NO: 415042

SEQ ID NO: 416042 - DNA, 1188 bp, Staphylococcus aureus
atgtcaatcatgcgactatttacattcattttaagtatttttatcgtaggaatggttgaaatgatggttgcaggaattatgaacttgatgagtcaggacttacatgtatcagaagctgtcgttggtcaattagtgacaatgtacgctttaacatttgcgatatgtggacctattctggttaaattaacgaaccgtttttcatcaaggcctgtattattatggacattacttatatttatcattggtaatggcattattgctgtagcgccaaatttttcaatattagtagttggtagaattatctcatctgcagcagcagcactaattatcgtaaaagtattagctattacagcgatgttatcagcacctaaaaatcgtggcaaaatgattggacttgtctatacagggtttagtggggccaatgtttttggtgtaccaattggaacggttatcggcgatttagtaggttggcgctatacatttctattcttaattattgtgagtattattgttggcttcttgatgatgatctatttaccgaaggatcaggaaatacaacgaggccctgtgaatcatgaggcaccatctcatgaaaatcatgttacttcgaaaatattaagacctgctgaagtagcaaaatatttaattattacgtttttagtattgattgcaaactcagtgacattcgtctttataaatccacttattttatctaatggtcatgatatgtcattcgtttcattagcacttctagtaaatggaatcgctggcgttattggaacatcattgggtggtatattctccgataaaattacaagtaagcgttggttaatgatttctgtttctatttttatcgttatgatgttacttatgaatttaatcttacctggttcaggtctattgttagcaggactatttatttggaatatcatgcaatggagtactaatccagcagtgcaaagcggtgtgattcaacatgttgaaggcgacacaagccaagtaatgagttggaacatgtctagtttaaacgctggtattggtgttggcggcattattggaggcttggtcatgacacatgtttctgttcaagctatcacatatacgagtgccatcattggcgcattaggattaatcgttgttttcacattgaaaaataatcattatgctaaaacatttaaatcatcataa

SEQ ID NO: 416043 - DNA, 807 bp, Staphylococcus aureus; identical to SEQ ID NO: 415084

SEQ ID NO: 416044 - DNA, 474 bp, Staphylococcus aureus; identical to SEQ ID NO: 413346

SEQ ID NO: 416045 - DNA, 660 bp, Staphylococcus aureus; identical to SEQ ID NO: 404967

SEQ ID NO: 416046 - DNA, 687 bp, Staphylococcus aureus; identical to SEQ ID NO: 413345

SEQ ID NO: 416047 - DNA, 693 bp, Staphylococcus aureus
atgtatagtataaaaatgcgttctagcaatcaagatgttcatattagtggtgctgaaacgatttgtgagtttgacaaaatagaacagacggtacaaaggttttataataaaggtttttttcatgaaaatgggcaaccggattttctcaatataaaaatacaaaaaattatggaaccgattcaacaaataaaagcattacaaattattgaggatgataaagcaaatctccaacatttaacacaagaatgtggtgtcactgaacaagcgctaaatcaagggatgacatatattaaaaatgaaacggtttatacaggagctattattctatctgctatatctggtaaacgtttagattcatttggacaaagggggattagggcaacacatttttcgtttgaagatataaataataaaggtgatcttaatgaaagagtgactgatgccttagcaattgctagttgtatcaatgcgcatccgtatgtcaaaggagaactttgcgtgtccgatgacttaacgtatacgacaggttattttgccgctgctaaaattggttaccatcgattatttgatattaaaccagttaatacgagatatggaggcagaataatatttgtggacgattgtattgatttaaatcattacatatcatttttagaaagcacaccgaagcaagttgtttatgaaacggtatag

SEQ ID NO: 416048 - DNA, 468 bp, Staphylococcus aureus; identical to SEQ ID NO: 415095

SEQ ID NO: 416049 - DNA, 978 bp, Staphylococcus aureus; identical to SEQ ID NO: 415096

SEQ ID NO: 416050 - DNA, 948 bp, Staphylococcus aureus; identical to SEQ ID NO: 410070

SEQ ID NO: 416051 - DNA, 966 bp, Staphylococcus aureus; identical to SEQ ID NO: 415097

SEQ ID NO: 416052 - DNA, 867 bp, Staphylococcus aureus; identical to SEQ ID NO: 415098

SEQ ID NO: 416053 - DNA, 1251 bp, Staphylococcus aureus
atgaactttgtaacgttgacttcggatgagttcaatgcgtttacaacaaagcatttttcacattacacacaatcagctattcattacaatcatagagttgatttaaaaggcgatgtgcatcttgtaggggttaaagatgacaatggtcaagtgattgcaggatgcttattgacagaagcacgcacacttaaatttttcaaatatttttatacacatcgcgggccagtgatggattatacaaatcaatcattagtagcatttttctttaaagcattaacgtcatatttaaagaaacacaattgtttatatgtccttgtagatccatatttaattgaaaatttacgcaatgcagacggtgaaattgttaaatcttatgataaccgagcatttgttagaacaatggataaattaggttataaacaccaaggtttccctgtaggttatgattcaatgagccaaatccgttggctgtcagtgttagatttaaaagataagactgaagaccaacttttaaaagaaatggattatcaaacgagacgtaatattaaaaaaacatatgatattggtgtcaaaactaaaacgttaacgattgatgaaacgcaaacttttttcgacttattccatatggctgaggaaaagcacggtttcaaattccgtgagttaccatactttgaagaaatgcaaaagttatacgatgaccacgccatgttaaagttggcgtatattgatttaaacgagtatttaaaaacgttacaattaaagcaacaacaattaacagctgaactctcaggtgttgaagaagcattggaagaaagtcctaattcaaagaaaaataaaacgaaacgcacacagctagaacaacagctaaatagcaataagcgtaaaatcgacaatacaatagaacaaattgaacaagatggtgcagtcttaaacttagcttctgctttatttatctacaatgagcatgaagtttattacttatctagtggttcaaaccctaaatataatgcttatatggatgcctaccatttgcagtgggaaatgattaagtttgctaaagcgcatcatattgatcgctataatttttatggtattaccggtgactattcagagtcatcagaagactatggcgtccaacaattcaaaaaaggttttaacgcacatgtagaagagtatatcggtgactttattaagcctatcaaaccattactatataaggtacaaacgtacttaaatcataaacgtcgttaa

SEQ ID NO: 416054 - DNA, 468 bp, Staphylococcus aureus; identical to SEQ ID NO: 414366

SEQ ID NO: 416055 - DNA, 537 bp, Staphylococcus aureus; identical to SEQ ID NO: 410322

SEQ ID NO: 416056 - DNA, 978 bp, Staphylococcus aureus; identical to SEQ ID NO: 415112

SEQ ID NO: 416057 - DNA, 576 bp, Staphylococcus aureus; identical to SEQ ID NO: 415115

SEQ ID NO: 416058 - DNA, 453 bp, Staphylococcus aureus; identical to SEQ ID NO: 405006

SEQ ID NO: 416059 - DNA, 1170 bp, Staphylococcus aureus; identical to SEQ ID NO: 415340

SEQ ID NO: 416060 - DNA, 2106 bp, Staphylococcus aureus
atgacatgccaacttaaaatacatcatacattatcgacaataccaagtcgtaatattaataatattatggtgctattttcacttacaagtaaactcaatattacgattaatggtgaaaccaaagacgtaagtaattatattatcttaattaaccatggtgatatttataatattaaccacggcgaaaatataatcgaattaatgatacccgttttttatttttatcaacaagatgatgatttctttaatggttatttagatcgtcatttattacaatcaagtaattatattaagtcattaattgccgatttaatcagtacaccaacaagttcttctttaatggggaaaaatataggtcaaagtattatagacactttacttaaagaagcttttataagaatagatcatgaatatttaccaaatattgctttaagcaatccggtgttcatagactgtgtaaactatattcatgacaatattgatgcgcacttgtctttaaaagatatagcgatgcattgcaacatctctgaatcatattgttctaatctttttgttcgatatttgagtatgaattttaaagattattttacaagtattaaacttgttaacgccatcaatttattactttctacaaaacattctattacaactgtttctgaattggccggttttaacagtcatacaaattttgcaaatcaatttaagaattacttgcattttagtcctaaacagttccgttcactcgtttccaagattactgaaccaccacaaatacacttccaacaagataacgtatcacaattcactgagttaatttcaacaattgatttaacagctcaactggctacaaatacaacagatattcatatagatgattttaatccgaaagatcgaagtcagcgtgccaaagtatttgttcgatttagtaatttcaatgaactatttcaatttattttcaatgaatattacgatattaactttgagcacttaccaaaacctgtcgttttcattgacgatattcacgatattgagattagccaaacgaattacaacctgttaaatagatgttttgaaaagcttttcgaaaaaaatataggtttagcaatcgctattaaatcaacacaacaattcgaaacgatgaagcagttaatactaacatttttacaaggcaatcaagactataagacaagcaagaaattagttaaatttatgctcgtattttgctctaattctatgacagcagaagaaattcatttatgtcatcttaaaattaaaaacaaaaataaagaaattaaatatagtgtgacagtcgatggctttttagaaacttattcaaccgtggaacaagtttatgatgtcatgcagcgtcttaaattccattattactttattgatattgaaaattcaaaaactgcaacacatcttatcactaaaaaccaacactatcatcaaactgacactcattttgaacagtataagaaatttattttagattcaggtatatcatcaacacaatttgtatataataacctgtctgtaagcggatttaaatatactaatgatggtaagaatccaattcaattatctgacatagtgtatcacttaatcgcattattacgatatggcggtggcattagctatcaattattagatgaccattcaaattatatttccttgtacaacaaatatggtagccccctaccattaatgcatttatataaaatgtttagaccttttgttaatgaagatattgaaattacaaataattatgtattgagtcgtaaagataataactaccatttcttattattcaataaaattaatgatcgatatatgtcagacgtaaaacaagatttcattttccataatgaattacctcaagactctttgatgattattaaaacattgaatcatgaacatggttcaattcaacatttgcttccaataagcgatcaacttgtttatatagaaaaagaaattttagatgaattagacaaaacgaattaccctaaaacggagcttgcagttcaagaagaaactggtcgtacatttgaactcaagttaaatcacgacgaggttaaatatatttgctttaaaccaagctaa

SEQ ID NO: 416061 - DNA, 945 bp, Staphylococcus aureus; identical to SEQ ID NO: 415127

SEQ ID NO: 416062 - DNA, 615 bp, Staphylococcus aureus
atgaaaagattagttacagggttactagcattatcattatttttagctgcatgtggtcaagatagtgaccaacaaaaagacagtaataaagaaaaagatgataaagcgaaaactgaacaacaagataaaaaaacaaatgattcatctaaagataagaaagacaataaagatgatagtaaagacgtaaacaaagataataaagataatagtgcaaacgataaccagcaacaatctaattcaaatgcaacaaacaatgaccaaaaccaaacaaataataaccaatcaagtaataatcaaaaatcaagttacgttgcaccatattatggacaaaatgccgcgccggttgcacgtcaaatttatccgtttaatggaaataaaactcaagctttacagcaattgccaaatttccaaacagctttaaatgcggctaataatgaagcaaataaatttggtagtaataataaagtgtataatgattattctattgaagaacataatggcaactataagtatgtgtttagttttaaagacccaaatgcaaatggaaaatattcaattgtaacggttgattatactggacaagcaatggttactgatccaaactaccaacaataa

SEQ ID NO: 416063 - DNA, 207 bp, Staphylococcus aureus
gtgacacaatatttagtcacaacattcaaagattcaacaggacgtaaacatacgcacataactaaagctaagagtaatcaaaggtttacagttgttgaggcagagagtaaagaagaagcgaaagagaagtacgagaaacaagttaaaagggatgcagttattaaagtgggtcagttgtttgaaaatataagggagtgtgggaaatga

SEQ ID NO: 416064 - DNA, 243 bp, Staphylococcus aureus
atgacatataacgcgcgcaaagaatacttaaaccaatttttcggatctaagagatatctgtatcaggataacgaacgagtggcacatatccatgtagtgaatggcacttattactttcacgggcatatcgtgccaggttggcaaagcgttaaaaagacatttgatactgctgaagagctcgaaatatatataaagcaacatggtttggaatacgaggaacagaagcaactaactttattttag

SEQ ID NO: 416065 - DNA, 462 bp, Staphylococcus aureus; identical to SEQ ID NO: 408096

SEQ ID NO: 416066 - DNA, 294 bp, Staphylococcus aureus
atgactaacaaaagtcaagaatttaaagatttactagatgcagatttagccattgcatttaatttagcagtaggtactgaatttactattagtgatttaacacaaaaatcaggtatcacttgctctagagatgttcaacgagaggtaggccgttggttcgcatactttgtaaaacatgcaccacgtgttccatttgttattattggtaaaaattctcatggacacttagtttaccttaaaacaggaccgaatccatataataacagcaacccttcgaaaggaggtgttcgctaa

SEQ ID NO: 416067 - DNA, 1068 bp, Staphylococcus aureus
atgaatacgtggaaaaatgatttgtacgggagattaggagatgttattgaacttgagattgcaatacatctaatgattagaaaatatgaacgcaattcaatggataaatatatgaacattaatgagttttatcattatctattgcaaaaagacatagttatttatgattatgagacatttcatcgattctataaaacgagtaatattcataattacttgcgagtaaagctaagaccaaaaaaagcttgggaggaagaaaaggttattcatccagagtcttttaaaagtattttagcaatacgtttaggtgaaacaaaattgatggctggaactaaatacattgactccaatattaaaagcttaagccaaacttataaacaactaaattctaatattgaacagattttagataaaataagtaagaatacatttgacataaaattggaaccaaagttgattgcttataaaaatttatatgagttatacagttattttatggacgaaatagaaaactatagcaacgactttgagcaattacgagcgcttctatatttagaattagattactcatttgtactctataatgagttactaaggatgatacatttaatcaaaaagtataaactagctgctaatagtaagataatagaaaaagcaataggtgaaattagtatgaagttagcaaatatagaatttccatggctaagattagtagttctaagagcttttattgataatataaaaaaatatcatgatataaattcattgattaacgatattagtcatattatcaattatacgttatttgaaatcgaacagtggattgaacgagcagaaattgaagaaggaattagagatttaatgaatgtgaaatatggtagggttccttatctagatgcaattatagaaaacagatataaaagaaatagtattaaagaatattttatcttactcaaacatgaatttggaattagatggttaagaggtcgagactttaatgatcaagatagaaataggtttaatagagctatcaaatataaacctttgaatcttataggatataactaa

SEQ ID NO: 416068 - DNA, 1515 bp, Staphylococcus aureus
atgataactgaagagatgcttaaaaaaattgcaaatgtatttaacggggacgatgaaaatagtatttatgagtataaaacaggttcagatttagtgcgtttttttaatcagtactttaatagaaaggacacatacaaaaacccttttccatcaaggtggaggtatgttgttgatatattacagcagttgttacagacaaaaaaattagatgaattctttactgttattttaagtattcgttatatccaaacagaattacatcttagtgaagtagaggcagtgcaaaaatctaatgatgctttgttgtactttaataaattgttacaatatgacggttattatttagtatataaggatgataaatttatactaatggaaagggataaggatttaacatatttaacaagtggcggctacgctgatatttatctacagaaatcaactggtcttatcataaaaaagttaagaagtgagtattatagcgataaatcaatatgtagtaggtttaaaagagagtttgatattacaaagtccttatcatcaatggagttaattattgatgtatacgagtttgataatagtcgtctatcatattcaatggaaaaagccgatatgacattagagcattatattaataattatgaagtagatttagaaattaaaattaaaataattagactaatactttatacaatttctaatgtacatgaaaaaggtataattcatagagatttaagccctacaaatatatttttcactaatgggaatataaaggttgcagactttggcttaggtaaagatttaaatgttttgtattccaagcagacgctaaatactaatgcagtgggacaattattctattgtgcaccagagcaattacttgggctcaaagatagtagtaagagaagtgatgttttttctttgggaagaattattaattttatcatgactaggagccctaacaaagtttcacatatttttagaactgtgagtgaaaagtctacacacgagagttcagaatatcgacatgaaaatgctcaagatttattaaatcattttgaaaaggcattaaaatatcataatgataaaaataaaaatttagaaataaagaataagattaatcgaggtgtgtttgatgatgatgtagaatttttttatgcagctctttcagaaaacgaaatttgtcaggtgttattatcttcgacctctatggttaggaatacattaattgagttcatgaagaagaaggatagttatgcagaagtagcaatacaaaatattaatagtgaatataaaaaaatatgtaaaaattttgaagactatgatccattctcaaattttatgtatgaaatcctgaaggatagattttcatttagggtaaaagaaattgcagcgattattctcaatgagatagcatactcttttaacagatatcatgctcaaggattaattaaagatattatatcaattggaattgaaccaataatcgaagatattttaaaaggagataaataa

SEQ ID NO: 416069 - DNA, 150 bp, Staphylococcus aureus
atggacaataactttttagaaagactaaaagaaattttagaaccatatgacgatatagaatcaagtaaagatggttttgtatttggtggatatatagaatggcctactttagattattacaaagattttcaagttagtaagtatacctaa

SEQ ID NO: 416070 - DNA, 1872 bp, Staphylococcus aureus
atgaaattttgtccagagtgtggtaataaattaatagatggtgctaaattttgtccagaatgtggttataagatagctaatttaaataatgtttctaacatacgagatgtacatattgaagaaggatataaaaatagtgataactctattaaaataagttcagatgaatatatcaaaaaaattctaagagaatctgactttacaaatatagatataacaccaaacatctctgaaaaaaaattagtaaatgcttctgtaagcatagctcaaaatacggaccccaatacattaatagcactaattgatacaagcttattaacaaacggtaagtcaggtgttgtatttacaggctctgaattttttataaaaaataatttttcagattctttaagagtaccatttaaagatttgttaagtgcaaaacatagtatagatacaacatttaacaaaaaaggaatagcaatagaagaagagaaagtaattattgaatataaagatggagctactgtaaatttaaatgcaaacacttatgggaaagatataccgtacaaattattagctaattttttaaatgaatttgataaaaatgttgataaaatatcttcgaaaaatcaggttgttcaattaaatcaaatgaatgaaaaaataattaaattatacttccgaattattattgcttatttaaaagatgacgatggcataattgatagtaaagaatataaagaactaattatacttatgacaaaagttaaaatttctaagattgttgcaaaagagttaagagaatacagatttgagcataaagaaaatttaactatagatgaacttattgaggaactacagtatgagttgaatgaagctgatttatctgatacttctgtaatacaatctttaggtatggacatgatatctatgaacagtgataaattagatgatttaactaatgatgtagtattaatgagaaatttaaatagattgaatttcacagataaacaaattcagtttgctgttcataaaattaaagctgaaaagaaaatacttgaagaaataatgacggactctcaaattaaagagacagcaaaagagttagcagccattgcaagtggagctggagtatctttaggagctttagcaattactggagcagttggcggtctgggaatgggtgtgacaagtggcttattcgcattggcctttacactaagtacagggacattatttgtaggtttagcagctattacatctgcaggatttggtgtatataaaggagtgaaatatttctcaggtacgggtgaattagaaaaatatggtattagaatacaagctttacaagataatattaaacaaatgagaattgctaataattatataattgaggatattaattggttgtctgaaaagttatcccactttgctgaaaaattaaaacattctaatgaaatgagcaatgaattatatgaagaaataaaaatacttctttcacagaatcaattgttagcaagtgcaggaactttaattgaagaagaagaactaaattccgagtatgaattgttgaagactagtgttcctgcatctcttaatcttagtaaatataatgaattactggcaaaaaatacaaataaagtttatgcagatgaagtaataaaaaaagcatatgttgtgagtggagacttagacgaacaaaatgatctctccagtattgaattaaaagaagatgttactttagaagaattagaaacagttaaagctattttagaagaaattggatactttgatactaaagcagcaagtattgcacaaggtaaatcattagctaaaaaaggtttttcaaactttaaaaaatcattcctaggtggggaagattttgaataa

SEQ ID NO: 416071 - DNA, 1632 bp, Staphylococcus aureus
ttgaataagaaaacaagaaatgaaaacaaaaaaatgaagcatgcagctgaaaaaattattgttgataaagaattacgcgatagaggtagagataatctagaaaaagcatcatataatatagatactatgcttaataatgttgatcaacaaatagctatgaaaaaggagttacttagtcagctaagacaaagaagaaataactcacatcaatttaaaaagagagatttatatcacgataaaatattagaaaataagcttaattctgctcaagaaatttctaagaaaaatctaaatttaatagagttagataaagtaacaactattgatatagatcgagaagattttgattctattcagtataatagggagtttgcgcagctaaacagtataaacttagatagtccttttttaactttatatagcaaaacagaacaagttaaaatagcgaatcaagttgttcaacaatttgatttgctagaattagatgatatggattatctttttgctaccgctgcaggagtaattgcaggttttgttgacgttatgtatggcgggacaatagctaaaggtaaagatgcgaaaggcttacaaaaaattgttgataaaagtacagaagaattagtgaaaaaatatgctttacatgaaaaaatagcagagttgaataagcaaaagaagaatactaactcacaaaagtcaatagataacattaataaaaaaataaaagaaataaaaagaaataaaacaaatattaatctaaaaagtagtattaagtatttagaaaacaatcatctagttggatacgatactgcacattcgaaatatataacagaaatgattggaaagatgtcgcctgataatcatcatttattatcaatagcgcatgaacctagtttgttaggtttaattgtcggaataaaggatcaacttacaaacacttcaacttttatgactaaagaaggtaaaattataaatgtagtttcacaaaataaaaataacgaattaactggaaatatgtttgaacaaattatacaagcaacaaataattggtttggtcatattatgagtgatatatcaggctctagttcttctaaaggaagaggtagtggtttaccagtcccaggttggttctccttgcaaaaattacaatttggtaaaataccattaaatggaaaagatatgaccattgctcaagtttcagaatggatgtttaaaaatggttatgacataagagcgtttgcttcagaatcaatatctgttattatattcgaaacacttattagaatttactggttttataagcaatatttttattacggaaaaagtttaaaagaaagtattcctattgcaaacagtcgagaattgtctagattattacttataggctcagctacattttcatctatagatataggtcatggattaataaaaagtacttctaaaggtggagtgcacccaataggcattgctacctttataatgactgttaataagccaggcctactagatttaggttttagaagttatcaaaatgtgagatttgaattacaacatagaaaacatgtagaaaaaataattgaaacagatattttaatggagtatagaagaattaccatatcaaattctatattttag

SEQ ID NO: 416072 - DNA, 504 bp, Staphylococcus aureus
atgtcgaatataaaaacaacactagagacgtccgtaggactagaaaaagacaacgataagctatttgattatataactgaattagagattcaaaacacgcctgaaaaccgggaagcaaaagttgttattgaagaaaggttacataaagaatataaatatgaattagatcaaatgacaccagagtatggaatacaaaaaggcagtgttagaataggtcatgcagatgttgtaatatttcatgattctaaagataaatctcaagagaatattaaaataatagtagagtgtaaaagaaagaatcgcagggatggtattgaacaattaaaaacatatcttgcagggtgtgagtctgcagaatacggcgtttggtttaatggagaagatatagtatatataaaacgattgaaaaaagcaccacattggaaaacagtatttaatataccgagaaatggagagaacttaggactacctgaaaaaattcactatctccggctacagaattag

SEQ ID NO: 416073 - DNA, 543 bp, Staphylococcus aureus; identical to SEQ ID NO: 408990

SEQ ID NO: 416074 - DNA, 201 bp, Staphylococcus aureus
gtgacgcaatacttagtcacaacattcaaagattcaacaggacgtaaacatacacacataactaaagctaagagtaatcaaaggtttacagttgttgaggcagagagtaaagaagaagcgaaagagaagtacgaagtacaagttaaaagagatgcagttattaaattaggtcagtatagtatttgttttggacaattttag

SEQ ID NO: 416075 - DNA, 177 bp, Staphylococcus aureus
atgatgattaaaaaaatattaagactaatattcttactagcaatgtatgagctaggtaagtatgtaactgagcaagtatatattatgatgacggctaatgatgatgtagaggcgccgagcgattacgcaaagttgagtgatcagtcagatttgataagggtggaggtgtcagagtag

SEQ ID NO: 416076 - DNA, 735 bp, Staphylococcus aureus; identical to SEQ ID NO: 407375

SEQ ID NO: 416077 - DNA, 1524 bp, Staphylococcus aureus; identical to SEQ ID NO: 415387

SEQ ID NO: 416078 - DNA, 999 bp, Staphylococcus aureus; identical to SEQ ID NO: 415512

SEQ ID NO: 416079 - DNA, 702 bp, Staphylococcus aureus; identical to SEQ ID NO: 415515

SEQ ID NO: 416080 - DNA, 279 bp, Staphylococcus aureus; identical to SEQ ID NO: 415469

SEQ ID NO: 416081 - DNA, 357 bp, Staphylococcus aureus; identical to SEQ ID NO: 405124

SEQ ID NO: 416082 - DNA, 1230 bp, Staphylococcus aureus; identical to SEQ ID NO: 415474

SEQ ID NO: 416083 - DNA, 1563 bp, Staphylococcus aureus
ttgaaacaaatcacatggcacgacttacaacatatcattaaagatggtgatgtgattggtttaccagcattagctgtagccaacttacccgccgaagttctacgtgctgtgttagcgcaacatgacacatatcatacgcccaaagatttaacgtttatattagcgaatgatatccatagtttaggtgccgcaccggatttagatgattttatagaacgtcgcatgattaaacgtgtcattatgagcattttaacggcttcttccaaaacggcacaagcaatgaaaaataatgacattgaagcttattttttaccacaaggtatcattgcaactcattatcgtcagagtaatcaattattacctggagttattactaaaatcggattaaacacagctgttgatcctagatacggtggcggtaaagtaaatacacgaacaactgatgatttagtttcattagtaaccatcaacgatgaaacatacttacattacacattccctagcgttgatgtggcactactgagaggaacatacgcagatcaacaaggtaacatttatttaactcaagaagcgtacttgagcgagtgttatcatgtcgcattaaacgcgaaagccaatcatgggaaagttattgtacaagttaaagctttagttgacgactatcaactaaaaccgaatgaagttgttatcccaggaaatcttgtcgattatgtatacgtcacagaagatgaaaagaatcaccgccaagtaattcagagtcattatttaccagccttgtctggagaagaacgaattgatggaatacctgaacccgcattaccttttaatagtcgcaaattgattctccgacgtgctgctcagtttttaacttatggcgatacaattagcatcggttatggcatcaataatgaactctctaatttattgcacgaagaatgtgttgaacatgatgtgcaaccgattctagatgttggcattttcggtggattcgttgggagtcgtgaacattttggtatgaattacaatgcagatgtgcgcatgcctcatgatcgagcatgggattttatttataacaatggtgtatcagttgcctatcttagctttgctgaggttgatcaatacggcaatgtcaacgtgtcttacttcaatgaccgactaaatggatgtggtggctttatagacattacgcaatctgtaaataaaattatcttttcaggtacttttgtagctggcagtcatgtctcatgtcataatcaacgattaaacattgaaactgaaggacaaaaccagaaatttgtatcagatgtgagccatatcgactttaatgcacaatattcacaattactcgagcaagaagtctattttgttactgatcgtgcagtattcgagctcaccaatcaaggcttgaaactaattgaaattgcaccaggtcttgatttgcataaagatattttgaatcaaatggcttttaaaccaattattgctgatcatttaaaattaattgataccagcatttacaaagaaaaatggggacaacttaaacaatcaattcataaagtatga

SEQ ID NO: 416084 - DNA, 1815 bp, Staphylococcus aureus
atgaaaaagcaaataatttcgctaggcgcattagcagttgcatctagcttatttacatgggataacaaagcagatgcgatagtaacaaaggattatagtaaagaatcaagagtgaatgagaaaagtaaaaagggagctactgtttcagattattactattggaaaataattgatagtttagaggcacaatttactggagcaatagacttattggaagattataaatatggagatcctatctataaagaagcgaaagatagattgatgacaagagtattaggagaagaccagtatttattaaagaaaaagattgatgaatatgagctttataaaaagtggtataaaagttcaaataagaacactaatatgcttactttccataaatataatctttacaatttaacaatgaatgaatataacgatatttttaactctttgaaagatgcagtttatcaatttaataaagaagttaaagaaatagagcataaaaatgttgacttgaagcagtttgataaagatggagaagacaaggcaactaaagaagtttatgaccttgtttctgaaattgatacattagttgtaacttattatgctgataaggattatggggagcatgcgaaagagttacgagcaaaactggacttaatccttggagatacagacaatccacataaaattacaaatgagcgtataaaaaaagaaatgatcgatgacttaaattcaattatagatgatttctttatggagactaaacaaaatagaccgaattctataacaaaatatgatccaacaaaacacaattttaaagagaagagtgaaaataaacctaattttgataaattagttgaagaaacaaaaaaagcagttaaagaagcagacgaatcttggaaaaataaaactgtcaaaaaatacgaggaaactgtaacaaaatctcctgttgtaaaagaagagaagaaagttgaagaacctcaattacctaaagttggaaaccagcaagaggttaaaactacggctggtaaagctgaagaaacaacacaaccagtggcacagccattagtaaaaattccacaagaaacaatctatggtgaaactgtaaaaggtccagaatatccaacgatggaaaataaaacgttacaaggtgaaatcgttcaaggtcccgattttctaacaatggaacaaaacagaccatctttaagcgataattatactcaaccgacgacaccgaaccctattttagaaggtcttgaaggtagctcatctaaacttgaaataaaaccacaaggtactgaatcaacgttgaaaggtattcaaggagaatcaagtgatattgaagttaaacctcaagcaactgaaacaacagaagcttctcaatatggtccgagaccgcaatttaacaaaacacctaagtatgtgaaatatagagatgctggtacaggtatccgtgaatacaacgatggaacatttggatatgaagcgagaccaagattcaacaagccaagtgaaacaaatgcatacaacgtaacgacaaatcaagatggcacagtatcatacggagctcgcccaacacaaaacaagccaagtgaaacaaacgcatataacgtaacaacacatgcaaatggtcaagtatcatacggtgctcgcccaacacaaaaaaagccaagcaaaacaaatgcatacaacgtaacaacacatgcaaatggtcaagtatcatatggcgctcgcccgacacaaaaaaagccaagcgaaacaaacgcatataacgtaacaacacatgcagatggtactgcgacatatgggcctagagtaacaaaataa

SEQ ID NO: 416085 - DNA, 345 bp, Staphylococcus aureus; identical to SEQ ID NO: 405115

SEQ ID NO: 416086 - DNA, 756 bp, Staphylococcus aureus; identical to SEQ ID NO: 414317

SEQ ID NO: 416087 - DNA, 1380 bp, Staphylococcus aureus; identical to SEQ ID NO: 415536

SEQ ID NO: 416088 - DNA, 840 bp, Staphylococcus aureus; identical to SEQ ID NO: 415540

SEQ ID NO: 416089 - DNA, 723 bp, Staphylococcus aureus; identical to SEQ ID NO: 408079

SEQ ID NO: 416090 - DNA, 1719 bp, Staphylococcus aureus; identical to SEQ ID NO: 408077

SEQ ID NO: 416091 - DNA, 282 bp, Staphylococcus aureus; identical to SEQ ID NO: 405087

SEQ ID NO: 416092 - DNA, 1056 bp, Staphylococcus aureus; identical to SEQ ID NO: 415559

SEQ ID NO: 416093 - DNA, 2046 bp, Staphylococcus aureus; identical to SEQ ID NO: 413364

SEQ ID NO: 416094 - DNA, 765 bp, Staphylococcus aureus; identical to SEQ ID NO: 405075

SEQ ID NO: 416095 - DNA, 495 bp, Staphylococcus aureus
ttgacgaaacgacaaatgggtatattcatttatgctggaattatcggtggcttgttatctggaattgtaaaattaggttgggaggtcatgtttccacctcgcacaccagaacgtaatgcaacgaacccacctcaagagttattgcaacaattaggatttagtagtgagtttacgcatcaaacatatacattttcaaatatggaattgccttgggtaagctttattgtccactttagtttttctatcgtcattgcaattatttactgcatattagttaaaaaatacgcttacttagcaattggacaaggtgctgtttttggtattgctatttgggtattattccaccttatcattatgccaatcatgcatactgtacctgctgtgtgggatcaaccataccaagagcatctgtcagaattctttggccatatcgtctggatgatgacaattgaattagtgcgacaacattttgtctatcgctataaattaaattaa

SEQ ID NO: 416096 - DNA, 7176 bp, Staphylococcus aureus; identical to SEQ ID NO: 415568

SEQ ID NO: 416097 - DNA, 1026 bp, Staphylococcus aureus; identical to SEQ ID NO: 415570

SEQ ID NO: 416098 - DNA, 1206 bp, Staphylococcus aureus
atggttaagaaagtttttattatggatagcgtaaagacaataattggtacgttgcttatagctttaggattacaatttttagcttatccaattattaatcaacgagtaggtaatgaagcgtttggttctattttaacgatttatacaataataacaatcacgagtgttgtattaggcaatacgcttaacaatatacgattaattaatatgaatctatacaaatccaatcattactactggaaatttgtgtcgatacttttaatttcaattctgattgagagtatagctttaattattgtatttctttacttttttaatttgaacaccatcgatattatctttttaattctacttaatattttaatgtgtttaaggatttatctgaatgtattttttaggatgactttaaaatataatcagattttgtatattgctcttattcaatttttaggtttgctgataggactatttctatattatttaatccaaaactggattgtttgttttattaccagtgaattgtttgcaacgatatatacattggttaaattacggggattaactataggcgagtatcaaagtgaagataataatgtggtcaaagattatgtgatgctactgagtacaaatagccttaataatttgaatctctacttagatagattaatcttattaccaattataggtggaacagctgtaactatatcatttctttcaacatttattgggaaaatgttagctacatttctgtatccgattaataatgtagtactttcatatatttctgtaaatgaaagcgacaatataaagaagcaatatttgaaaactaatctatttgctatagctgcactatgtttagtcatgattatatgttatccaattacattaattattgtctctttactgtataacattgattcaagtttatattcgaagtttattattttaggtaatataggtgttttattcaatgcagtgagtattatgatccaaactttaaatacaaaacacgcatcaataacattacaagcgaattatatgacgcttcacacgattacatttatattcataactattttaatgacaattgcgtttggtctaaatggattcttttggacaacgctgttcagcaacattattaagtatgtgattttaaatattataggtttaaagtctaaattcattaataaaaaggacgtcgattag

SEQ ID NO: 416099 - DNA, 669 bp, Staphylococcus aureus; identical to SEQ ID NO: 415590

SEQ ID NO: 416100 - DNA, 2610 bp, Staphylococcus aureus; identical to SEQ ID NO: 411243

SEQ ID NO: 416101 - DNA, 1536 bp, Staphylococcus aureus; identical to SEQ ID NO: 415485

SEQ ID NO: 416102 - DNA, 2565 bp, Staphylococcus aureus
atggaaaatcaagtgaagattcataaagaagtgaataagtctcagaaagaacctttagatattgctgaaagattatttggagataaattatatttttctatcatttgtggaattattgcattagctattgtattagttgctaattatattaccaacgttttttacagcagtttttttcacaaaaagggaaacattcttgaaaaagcacagtattttccagaggcattaaaaagtataaagaatatttttatcattaacttttcaattttttggataccaggtttgattattttattattgttctccttgataggtcgaaaattgtatttagtttatagaaaatatcgtagattagattacggtcaatatggagattctgaatttgtttctttaaaagaattaaaaaaggaatataaaacagtatatcaacaagaagagttttacgagggagatcctggttttccaattacacatttcgataataaatatttaattgatactcaaacacataaccagttaattgttgggacgtctagatcaggtaaaggggaatcgattgtttttccagcaattgatattgactcaagagctgaaaaccaaccctcacttattattggagatcccaaaacagaactctacagtgggagtgctgatactttaatagaacgaggatatgaagttcataaactcgatttaagcagtccagatgatggaatgagttataatcctttagaacttattaaggaattttatgaaaagggtaatatctcgagagcagaaaaatacacgaacacattaacaacgatgatgtttcacgatcccaatgctagagacccattttggaataacagtggggcgaatttagtgaaagcaatcattctagcattaatagataaatgttatcacgatcatcaaccagaaaaagtaacgatgtataacgttgcaaacatgctaacagaattgggtggtaaaaccattcatgaaacagtatttcttgataatggtaaagaagaagttgttgaaaaaaatgctctagatagctactttgaaaatttaccacaaggacatatggcaaaaaatgcatatgcacaaagtaactttgcaaaagggaatacacgttccagtatttttagtgttgctgcagaaaaattaaatatatttactgaagaagaattagggaaaatgacttctcataacgaactcgatatgcgtaaagttggtttcaatcgaattatagatgtgcagtacgatacatcgatgaaatatctcaaaggtagttattattttacagacacagaaggtcaaactactaaaagcaaagatattgagcttgataatttagggaatgttcaaatcttctttgatgcagaaattcaagacggttatagtcttaaccttgaaatatacaaaaacgatgagacatacagtcaatctattttacacatgatgaatgttgaagatgctgaaaatagtcataccgtttcacttttagaagaaggagaacaacctgaaacagtagatatacattattctaaaaaacctgttgcaatctttttagtgattcctgattacgatacgtcgaatcatatcattgcaagttactttatttctcaactttatactttattagcagaaacagcctcctcgaaagaagttaagaattcaaaaacccaacgacgtgttatttttagacttgatgaattcgggaacttaccagcgattaacgatatggataacatcgtaaccgtatgtttaggaagaaacattatatttaacctctttgttcaatccttacaacaattagaaaatgtatacggtgagaatacagcaagaattatccaagggaactgtcaaaatttaacgtatattttgacactcgatcattctacagctaaaacaatttctgaacgttgtggttatcatacagtcacaacaagacaacagacaagcaatgacggtcattccacaatatcacggtcaagatcagcagagaaacagccattgatttctgagacagaattactgcaaatgaaattgggaaatacggttgttgttcgttcgacttctagaacgaaagtggaaaaaggaaaaaccaaaaaagttcatccacatcccatttataatactggaaaaacaagtatgccgttccgttatcaatttttagcaaatcgttttgatcctgactttacaccaaaacaaattgcaccttcgaaacatagagatctcgatctaaaatcgaacatcattgactgggaacgaattgttgataaaacaattactgacaaagaagaaaaagaaaactttgaacataataataaattgaatgaagtattaagcaaagagcagctttataaatttaaaagagtgttaagggatgaactcaaacttactaatgatcaggcaaatcttatattagaacagaaaataacacaagcgaaactatttcttgaaaatgataaaagatataaagataaaaatgaacattcaaaagaaatacaaaaactttttgatgattggattgattacaaaatgaaaggaggcgatcacaatgaatcagtgggttaa

SEQ ID NO: 416103 - DNA, 981 bp, Staphylococcus aureus
atgttattaaatttaattcacttaaatattaaagatgcgacacaatcaatgtatttaaaagatagaggaacactttattttactgatgaacaacaagcgacctacttagtgaatcaacatattgatataattaaatccattttgcagaaaatccaaaccaatccttatgttgaagtattcatagaacaaaatgtcgctaaagaaattaacaataatttatttttaatagataatatcgaaaatttaagagtatatgaaccttttaaagtcgatgaaaaaagtcaatcttacgatgatcatgtactcgaagaacatatgatagaaaaagataaagacgaagaaaaaacaactgataaacctgagataaataacgctgactatcaaaaatctaattcagaagaagctaagaatgagccaaaagaagaagtattaaacgaagaaactgaaaaagaaaataaaacagatgagcaagaagcacaaaaagaaacatcagatgctactaacaatgacaacttagaacaagaacctgaaagcgttgatgaaaatgatgagtctaaagaaacagttcaatcagatatgtcatatagtcaaatatacgaaatgatttcaagcttagatagttacgaaaataagaataacatccagcaagtgggagagatgttaagtgaacaatttatgattagaaacgccaacaataatgaatatttagctaaagctaagagagaaagtattcttaaaggactattattatatctctttaatcaaagacatattaaaggtgttgaaacagatatggcacacgctttcaacgaaattaatattaacgatattttaaaagaaacatttaaagaaaagcttaatgaatacttacaccaaatggatacacaagacattacgtattatatttttaataacttttatcgatcaatcaaagatctttctctaaaagagaacgatttgaaaatcgagaaaagaaattag

SEQ ID NO: 416104 - DNA, 2115 bp, Staphylococcus aureus
ttgctgacaggaaaaataattaatattacaaataaaagtaagattgatttccttaaaattaaatatcaaaaagaatactcgcttaacgaacttgatgggatcattcaaaaattactaaatctatgtattcaaaagaaaaaagatcaaaataaagatataaactttaaagttaaattgattgttttagatagcgaaaccaaagctataagattcgacatgaataaagatgagacgattaaaatcaacgcttctttatctgaagacacaaccttgagatcattgttagaagaagaaattgagttacaacgctatgatttaggcgaaggtcaagctaattttgataaagaaaaagaaaaattcttgaaagactatgatgaaagctataacggaaaggtaaccaaaaagttagatgaaaaagcaataggcaagccttctttatatacaaaggttaaaaatttattatttaaagataaatcgcaacaggactcacaaaagaacacggtacaggaagctaatttaactaaagctttcgacgatgacgaagaagaacaagaagagcaagaaagccttgttcgatcaaataatcaaaatagaaccacagaatcaacggaatctgaacaagaaagtgatgatagtgaaacagatgaaagtgttgatgcactttttaaagagaaagcagaagatggtgaatcaataaaagaagataaagctgaaaattctatttctgaaaatattgaaaatgggaatgacaaaccaggcgatgctgatttacctaataatattcatgaacatgaagatatatacggtttaacagaaaaaaaacctactatacccattgaagttcccaaatacacagaaaaagaaattactttaaaacattcagatgatccatttgaacaaaagcaaaatgaatatatttatgatcgcttgttaaataaagaggcacataaattggcactttatgaagaacttaaacataagttagagtatcaatttgttgtatatgtaaacgataaacgtaagcatatcgaaaaagtgaaaaacgataatgaaatgtctcaagaagagtttgatcatctctcaaacaacataagtcaacaagttcaaaaagatatagatcaaaacgttaaagaatacgtaaaaggacaggaaaataaacttaaaaactttactcagcagcaagaaaaagtgttagaagagtttaaaacgaaacaacatcaagaattaaatcaacaaaaagagattatggagaaagaaaagcaaaactatcttaaagatacagaagaagaaagggtcatgcgtgtttatagtgaacagatgcaaataatggacgaaaatgaacgaaaaatcaatgccattgtagctgaagaaaatcaatcgtatgactttaaaattcaagaagcacttaaccaagattgtaagcagttgattgatgaaatcgatgaaaaactatttaaattcgacgatgaaacatatcaacaattgctacataaacgtgaagcatggaaagaagaattaaataaggctaaacagttagaaattcaagaggaacaagccaaaaatgaacagctaaaaatacaacaaaatatcaaagaacaagaagcgattatagctcaacaacaacgagaggaacaagaaatcagacgtattagagaagagaaagaaaaattagctgagaaaaataaagagtcagaacttcaattagaattagctagaacgaaaaatgaaaaagaacgtttggctcaggaagacagacgtattagtgactctgaaaaacaaacgagtcttagagaacaagagcttgttcaagcaaagcagaaaagttcgaattttaatgaagtactaatggctcaagttatgaataataacaaaaaagaaacaccaacatctcaacttcctgaacctagtaaaagttcaaagaaaacaaatcaaactaatacgaatggaagtagcctcatgaaaacaataggaatatttttaatatctgctgttgttcttattggtatttttttaggtggtttctttgctgatcattactttcatttcttaaactgcttgccaatcacaacaaatcaccttcaattgattgagccaccgtttcaattgttgaaataa

SEQ ID NO: 416105 - DNA, 318 bp, Staphylococcus aureus
atggaacttatgcatattgctttatttcattacttgaatttagatggtctgttagatcagtttgttcagtatcttcaaatgcatgacatttggacaaacttaggaagaatgttcagaaaggtattaagaggactcaaaattatagcagtacctggggcattcattggcgttgctatcggtggtctttactatgttttcggtggtgaacaagggaagtatactgcgaaagtatggtggttaagttcattgattggtgttgttgtagtcatgggtgctgatgcgattgttaattgggtatcagacaatgcgaaattctaa

SEQ ID NO: 416106 - DNA, 243 bp, Staphylococcus aureus
atgcaacagatattcaaaaaaagtgagattaaaagagatattgagaatagaggtatcgacttcaagaaatggagtgaagaaattcttcaaacaaagcgactggctattatcgataaaaagaaaccatacttcgaccaatgggaactagatgtactcaatgatgcatacgtagaattattaagaaaatcagctaaaaatcagaaaggcgaactacaaaacgaagagaaaggaggtggaatttaa

SEQ ID NO: 416107 - DNA, 534 bp, Staphylococcus aureus
ttgaaaaaaagagttattacaacggtgttaggatgtagtttattattaggtgcttgccaaggaggacattcagaccctttagcaaaccataaatataaaattgaagacactgattacagcattgcattcgatggcaaagaccgtgcaacactgtcatggacagatggtgcgcctaataatatggtgaaggattctgcaccgtttaattatgaaatcaaaaaagataatgggaaacagtttttggttctagaaagatctgctgacgaattgccgtctggttataaagatgagttcaaattctatgaagacaagagtgttgactacgaccataataaaaattgtgaagtttatgaaataaaggacaagaataaagatgatctaactttagttcagaaagctgtagctatgccttataatgacaacattagtaaaaaggaattatccaaagttcctgatgataaattagataaagatttgtttaaacatcctgataaggctaaagatagtcaagaactaaagctaactgatgaatag

SEQ ID NO: 416108 - DNA, 399 bp, Staphylococcus aureus
atgtacaataagcgaacacagtctatgtcgatacttaactattatttagtgatagtgacgagtgggaaaacaccttgtctttcagacaaacattctttagttctcaaaagacattttgagaaggtggctaaatcattcggtattcatttgttgacatgggactatcatgactactacctggaaataagtttctctgttgacaaagggaatgcctcagtggttgatttcatcatggttttcaaatcaacgtcatcgtacaatatcaaaaggtattatcctgaacttgtcgtcgatgagttgaaagatacttctttttggaatcaagggtattttcttaaaactctaggtatgatggaaagcatgcatgatcaaacgaattggttggaaaatctaaaataa

SEQ ID NO: 416109 - DNA, 228 bp, Staphylococcus aureus
atggctaaaaataatacaaattcatataacgaatcaatgtactcagattatattaaccaaaagttagcgtttaatctttttggtgataaacgaattgtggctacagttaaagaggtacgtcgctatgagttactcattgaacgtaaagtgaaatacaagtctggagaacgaggtgaaattcaaacattattgcctaaaagtgcaatcatctatgcagacattatttaa

SEQ ID NO: 416110 - DNA, 792 bp, Staphylococcus aureus
atggtgagagttataacagtaaataactttaaaggtggcgtatcaaaaacatcaactactaacggtattgcttatacactatctgaaaaaatgaattttaaaacgttagtaatagatattgatccgcaagctgacgctactgatactttattaatgacatttaatgggaacgtaaaaaatagtttatatgaaacatttgaaaataatctaaatgttcaagattgtatagtgggattaagtaagaatttagatttaataccatcggattttaacatgataggctttcctcaattgctagatgatttgggatatagtaggacgaatggagctactattttgagtaaattaattaatgaaattaaatataattacgactatattttaatagatactcccccaacaataagtgattattctagtaatgcaatttatgcttgtgattatagtttaatagttatgcaaactcatagaagaagttttaaagcagtacaaaaatttgtggaatatttgactatatttaaggataataatcagttagattttgagattgctggtattttacctgttatgtttaaacgtaacggcaaagttgataaatctgtattagaagatgcaaaagaaaaatatggagaatatttattcaatagctatatatatcaaagagatagagttaaactttgggacgaaacaggcattactgatgatgattttcatgataaaagaacattaaaaatgtattatgatattactaataatttattagatgaaattaacgcatatgagagtgagtga

SEQ ID NO: 416111 - DNA, 297 bp, Staphylococcus aureus
atggcaaaagaatcattaatgagcaaaatggaaagtaatcttgataattcatttataaataaggaacaaaaacttaatagtgtacctcgtacaagtataagagtaaaaggtgtaacacacagtaaaattagcgtattaaaaaagttagaaatggtagattccatagatgagttattagatgaagctctaaatttatatatttcccaatttcctaaagaaaagcaaaataagatagaaaaaatgataatggaagaaaatgaattgaagataaaaaaagcaagaaaagttagtaagtaa

SEQ ID NO: 416112 - DNA, 216 bp, Staphylococcus aureus
atgatgtgtaatgaaaatgttcaacgtgaaatttatattgaatggatagaaatgatggtaggattaagcgacctagaaagagaacgtttagataatgatgatattagaaaagttagatttaaatataaaatggctcttcaagaaaaaaccgatgaattagatatagcgaaaagatgtaggaagtcatgtctagaaaacttttatttgaggacgtaa

SEQ ID NO: 416113 - DNA, 483 bp, Staphylococcus aureus
atgtctagaaaacttttatttgaggacgtaagcttagcacaatgtaatttagcaaataaaactcgggatcgattacttaaaaatttagagatgaatgattttgaaaataagtttgagtctaaagaaattaactatagagattttaataagtatgatgttatagactatctaatcacaaaagacgatgtcattagatactgtaagaaacaaacaacaactaatactcaacttcatataatatttgtgaaagaggcatatcataatactcgcacatcactaaaacaaaatacaaagagatatactcctttttgccattttcaacctgagaaatataagatgcagacacatctagatcaaatgcaatatcttcttgagagatgtgtttatcaatacgaattttttttagttgtttgcatatattttgagttagtatcttcggatagcttttcattactacgcaattcctttttatttttatcataa

SEQ ID NO: 416114 - DNA, 189 bp, Staphylococcus aureus
atgagtgaatatattcaatggtttgttgaagaaatattgaatcagaaatatatagaaagtgaatcactcaagttatggaaaatgaaaaaaaatacaaatgttattgaaaatgagtttaaagtacattatgaaaacattaaacaacacaaaactttagaaaaacaaattactatctatgatattatatag

SEQ ID NO: 416115 - DNA, 198 bp, Staphylococcus aureus
atgccactagttatagggtatatacttggtgctatattcggagtagtttatggtttaacaatacgtctagctacttggatatttgttaattcagttgtattcattagaaaggcgagtcaaagattagaagatgtactgatttaccttataagacagattattaatgagattaaaaacacaaatggtagtagaaaatga

SEQ ID NO: 416116 - DNA, 708 bp, Staphylococcus aureus
atgtttaaaatacattatgaaaaagtaaaatatgttattgaaaatagtagcgatgaacagctacgagatattggcatagaccaaaagacaatatcccgtatgagagatcattcaaattatagtaaggatttaaatctgtccaccgcatataaattataccataaatatttcagtgaatgggcaactgttataggaatagatatcggtactggaaactatcttagtgcatcggatgcatcaatggaaaggacatatacagatacatcagatgaacttgcgaggattattaaaaaatatcgagcgcgtttaaaacagaaaaagtttgataataatgaagccgaaaaaaagtttgctagagggataaagaagcacatcaataaagtggttaaggaaataatggaaatctatccgccgccacgtgtattagttgtaggaaaaggaagtggtgctggcgtatccgaatcaatgttcggaagaatatttgtttatactcataagagtcttctaaaatatagtgataaatttgatgatattgtcctcgtcgacgaagcatatacttctgtgaaatgccccgagtgcagctttgtccacaaaaaaaatagaaagtataacaatcattttaaatgtcgatcttgtggctacgaaaatgaggatgataacattgtagcttcgtacaatatagcgcaagaatttctaaaaataatataa

SEQ ID NO: 416117 - DNA, 165 bp, Staphylococcus aureus
atgcaaatcattatagcaatattttggttagttattctcatgttagttggtacgattatagttaaagaacagattaaacagagtagaatagctctgataaaaccaatggtagtagttattcccagttactcaatttggttgaaaaggaatttaagattaaaatga

SEQ ID NO: 416118 - DNA, 348 bp, Staphylococcus aureus
atgacaaaatcttataaagataaacttttaactttatttgattatttcgataaagaagtacttgaatatgctatttattattcttcaacttatggcaataatcctaaatctttattattagctatattagacaaatggaaaatggctaatattactaatgtagaagacgcaaagtcatacaaagtatcaaaaactaatattattaatttctctagagaaaaaacacctgaatggttaaaagaaagaaataataaagaaaaagttaacaatgctgaagaagaagatccacaattagaaaaggatagggaagcatttcttgctcaattaaaaaaggattgggcagaatga

SEQ ID NO: 416119 - DNA, 537 bp, Staphylococcus aureus
atgttatgggataggtttttaaaaattatagatattaaaaaaaactatagaaaatatgaaacattaataattttattttgtctgattttaggttttagcaacttgtttacaggttgggtcaataaatggtcattgacgcatccattctatcaagctgtggtaaaaaacataacacatgaacaatttacttataataattatctaatcgttttattactcatagatttgattgtaattttgagttggatcttaactttgttttggggaatagttgatgtgatatgtcaaagagatgctcaaagagaatataatgtagataaatatatgtcgttttctctttctgcattaatatatacatttatttttcagtttatatattttactatacttttaagagcgattttttttgaaaaaattagtatatcttgtcattttagtttttggtttttggttatcacttcaataatttcaatcgtatttactataattctattcattttacttttatacaatggaggagaagatattgttgaatga

SEQ ID NO: 416120 - DNA, 783 bp, Staphylococcus aureus
atggataagagtaattcattgataaaacgtctaattgttcttgcttcaagtgtgatacttttttatattttcttaaaaactaaatttttagttgataatactcaagatataacaagcgacgttattttaattctcatcgttgttgtggtttatatgatacttgttaaatacgtgaagaaggaaaatttaattacagaaaagtatataaacactgaaaatggtaactggttttggaagttaacactaatatttttgggacttttagttaatttatgtttagattctaactttaactcaaatactgaaaatcaaaagtttgtcgaaaaacaaaaccaacatttagatatgtacacccaattagttcatgaaagcctgaatgctagtattatagaagaaatttgttttagaggacttatattcatatttatattcatatttattttcactatgcttaatttcttctttaacgaaaagaaatataactatgactggctcagtctaggactatttgtattaatatcatcactcgcctttggttttgcgcatgtattacatggtgaagactggagtcacatatgggtatatgctttaagcggcgttacatttagtttgttatttattttttcaaaagatataaaaacatgtatgatatgccatgcactcacaaatgctttccctatttttaatcataatcatttaagcattattgaaccgacgatctatatagttttgctcattatatctgtttgctatttagtaataaatcaccgaaaatggctttaa

SEQ ID NO: 416121 - DNA, 549 bp, Staphylococcus aureus
atggctaaaattggttacgctcgtgtttcaacacaagatcaaagtttagatagccaaatcgatactttaaaaaactttggctgttcaaaaatatttaaagaaaaagtgagtggtcgaaaaacgaaaagatcagagttagacaaatgtctagagtatttacgtgaaggagatacattagttgtttataaacttgatcgtttaggtcgaacaacaaaacagttaatagaattggctcaatggttagaaaacaataacatcgaattacagattattgatatgaatatcaatactaaggatgcaatgggaaaaatgttttttacgatgatgagtgcttttgctgaacttgaagccaatcttttaagcgaacgtactaaaaaggggcttgcttctgcaagagcaagaggacgcgtcggtggacgtccacccatgcctgatcataaaaaaagagaaattaagtttttatatgatgaacaaaaaatgactggagaacaaatagccgaagctactggcgtaagtagatcaaccgtatatcgtgtaatcaaaaaatga

SEQ ID NO: 416122 - DNA, 324 bp, Staphylococcus aureus; identical to SEQ ID NO: 410216

SEQ ID NO: 416123 - DNA, 378 bp, Staphylococcus aureus; identical to SEQ ID NO: 412164

SEQ ID NO: 416124 - DNA, 360 bp, Staphylococcus aureus
ttgtacactgaaataaaggcgccactgaaggatgattcgtatattagtttaattgatcatttacatccaacacctgctttaggtggctatccaaaagaatttgcgatggattttattgaacagaaagaatttggtacacgaggattatatggtgcgccggttggctatatagatatatatgatgattgtgaatttattgttgcaattcgttcgatgcttattaagaaagcacaagcaactttatttgctgggtgtggcattgttaaagattctgatccagatagtgaattggcagaaacgaaccttaagttcacacctatgatgaatgcattaggagtcgatatgaatgggaaatcataa

SEQ ID NO: 416125 - DNA, 540 bp, Staphylococcus aureus
atggatttaagtgttgatatgttgactgttgcagctcaaaaatcagcaaatgtaaattggcttgaaggagatatgacatcttttgatttgcaacaacaatttgatatcatcactattttttgtgactctctaaattatttgcaagatgaaactgcagtgattgaaacattcatcaatgtttatcatcatctgactgattcaggtgtatttatttttgatgtacatactgtttataaaatgatgactttgtttaataatcaaagttatattgatgataaaggggacatttttttagcatgggatgctgtgcaaggagatttacctttaagtgtttatcatgatatgacatttttcattcgacatgaagatgaaacatattcaagatttgatgagtctcattttcagagaacatttgatgaaaagacatatttgtcttggttagctcaagtcggttttaaacatgttgaaacatttactgattttaatatagatgaacataatgaagatacagaaagattgtttttcattgcgaaaaaataa

SEQ ID NO: 416126 - DNA, 378 bp, Staphylococcus aureus; identical to SEQ ID NO: 414246

SEQ ID NO: 416127 - DNA, 1167 bp, Staphylococcus aureus
ttgcaacttgcatacaaagaattggaacaagctgttgctttaattcgtacaatgcctcaacgtcaacaaactagccgtcgatcaaacagaattcaaacgcgttctgttgagtctagagctgcagagcctagatcagtatcagactatcaaaatgcaaattcatcatattatgttgaaaatgctaatgatggttcaggatatcctgtaggtacatatatcaatgcttctagtaaaggggcgccatataatttaccaactacaccatggaatacattgaaggcctctgactcaaaggaaattgctcttatgacagcgaaacaaactggagatggctaccaatgggttattaagtttaataaaggacatgctccacatcaaaatatgattttctggtttgcattaccagcagaccaagtgccagtaggaagaactgactttgtaacagttaattcagatggaacaaatgtacaatggagtcatggagcaggagcaggtgcaaataaaccacttcaacaaatgtgggaatatggagtaaatgatcctgatcgttcacatgactttaaaataagaaatagaagtggccaagtaatatatagctggccaactgtccatgtttattctttagaagatttatctagagcgagtgattattttagtgaagctggagcgacacctgctactaaagcatttggtagacaaaattttgaatatattaatggtcaaaaacctgctgaatcaccgggtgttcctaaagtttatactttcatcggtcaaggtgatgcaagttatacaatttcatttaaaacacaaggtccaactgttaataaattgtattatgcagcaggtgggcgtgctttagagtacaatcaattatttatgtacagtcaactatacgtcgaatcaacgcaagaccatcaacaacgtcttaatggtttaagacaagtggttaatcgtacatatcgcataggtacaactaaacgtgtagaagtgagtcaaggaaatgtacaaacgaaaaaggtattagaaagtacaaacctaaatatagatgattttgttgatgatcctttaagttatgttaagacgccgagtaataaagtgttaggtttttacccaactaatgcaaatactaacgcttttagaccgggggggcgttcaagaattaaatga

SEQ ID NO: 416128 - DNA, 657 bp, Staphylococcus aureus
atgcgtgttaaagaaggttctgatgattaccgttacttcccagagcctgacattgtacctttatatattgatgatgcttggaaagagcgtgttcgtcagacaattcctgaattaccagatgagcgtaaggctaagtatgtaaatgaattaggtttacctgcatacgatgcacacgtattaacattgactaaagaaatgtcagatttctttgaatcaacaattgaacacggtgcagatgttaaattaacatctaactggttaatgggtggcgtaaacgaatatttaaataaaaatcaagtagaattattagatactaaattaacaccagaaaatttagcaggtatgattaaacttatcgaagacggaacaatgagcagtaaaattgcgaagaaagtcttcccagagttagcagctaaaggtggtaatgctaaacagattatggaagataatggcttagttcaaatttctgatgaagcaacacttctaaaatttgtaaatgaagcattagacaataacgaacaatcagttgaagattacaaaaatggtaaaggcaaagctatgggcttcttagttggtcaaattatgaaagcgtctaaaggtcaagctaatccacaattagtaaatcaactattaaaacaagaattagataaaagataa

SEQ ID NO: 416129 - DNA, 336 bp, Staphylococcus aureus; identical to SEQ ID NO: 414065

SEQ ID NO: 416130 - DNA, 744 bp, Staphylococcus aureus
atgttatatgatgcgcctgaccatcttaagtctttggtgaaccgttttgtagaattaaataatattacagagccgctagcagtaacgatccaaacgaatttaccaccatcacgtggattaggatcgagtgcagctgtcgcggttgcttttgttcgtgcaagttatgattttttagggaaatcattaacgaaagaagaactcattgaaaaggctaattgggcagagcaaattgcacatggtaaaccaagtggtattgatacgcaaacgattgtatcaggcaaaccagtttggttccaaaaaggtcatgctgaaacattgaaaacgttaagtttagacggctatatggttgttattgatactggtgtgaaaggttcaacaagacaagcggtagaagatgttcataaactttgtgaggatcctcagtacatgtcacatgtaaaacatatcggtaagttagttttacgtgcgagtgatgtgattgaacatcataactttgaagccctagcggatatttttaatgaatgtcatgcggatttaaaggcgttgacagttagtcatgataaaatagaacaattaatgaaaattggtaaagaaaatggtgcgattgctggaaaacttactggtgctggtcgtggtggaagtatgttattgcttgccaaagatttaccaacagcgaaaaatattgtgaaagctgtagaaaaagctggtgcagcacatacatggattgagaatttaggaggttaa

SEQ ID NO: 416131 - DNA, 243 bp, Staphylococcus aureus
atgccaaagcttaatgctgattttgcactttctactgcaatttctgcaagtccttgtgaatcaagttctggattgattgcacaatcaccaaagatgtattgttcatcacctttaatcataaagaagatacctgatgttcttgatacacctggtttcgttttgatgatttgtaaagctggacgcacagtgtctcctgttgaatgtgctgcaccactaactaaaccatctgctttaccagcataa

SEQ ID NO: 416132 - DNA, 864 bp, Staphylococcus aureus
atgtcaggtggcacacttattcttcaacgttactttaacggcgaagaattgaatgacatgattgcacaatatcaccctacatttattatcatgattccgacaatgtattatagtacgctacgtgctagtaattttaatcctgaaaattttagagctatggattatatcatccaaggtggttcacaaccattaccaagtatccaagcagcttttaaacaatatggcataaacattattaacggctatggtttaactgaagcacctcttgtacttgttaatacaccggaaaattcaaaacgtaagccaatgagtattggtaaagcagtcatgttcgttgatgcacgtatccttgatgataacggtgaggaagtacctactggtgagattggcgaacttgcaattaaggctaaaaatgtcacgccaggatattggaataaaccagcagagactgccaaagcatttcatggtcgttatttattaactggtgacttagcgaagatggacgacgatggcgatatatttattattgaccgcaaaaaagaattaatcataactggtggcgaaaatgtcttaccatctgaagtcgaaaatgctttagctgagcatccactagtagaccggtgtgtggtcgttggctatgatcatccaaaatatggtgaatcaattgctgcagccattatacttcgcgaagatgaacctcattacgctgaaattttagatcaacatatgcgaagtcgtttagcaggttataaagtcccaagaatgtatgtaccagtgacacatatgccgttaaacagtacgcagaaaccagataaacttgcgattcgacaaatgatgaatgacaaagtctcacaaacactttaa

SEQ ID NO: 416133 - DNA, 204 bp, Staphylococcus aureus
atgttcgtcccagctagattgcctattgcagaatctttatttgtagtaattaatacgatgtcagcacctactgattttgctttgtctgctaataatcttaaatgttccgtggaacctgaaccagagataattacaaatacatcattcgacttaatcgcaggtgtcgttgattctccaacaacatgtgcctgtttgccgagctga

SEQ ID NO: 416134 - DNA, 726 bp, Staphylococcus aureus
atgattgaggatagtgaaaatcctgaaattgttatttcagttggtggtgatggtacattactacaagcattccatcagtatagccacatgttatcaaaagtggcatttgttggagttcatacaggtcatttaggattttatgcggattggttacctcatgaagttgaaaaattaatcatcgaaattaataattcagagtttcaggtcattgaatatccattgcttgaaattattatgagatacaacgacaacggctatgaaacaaggtatttagcattaaatgaagcaacgatgaaaactgaaaatggctcaacacttgttgtggatgttaacttaagagggaaacactttgagcgatttagaggcgatggattatgtgtatcaacaccttcgggttcaacggcttataacaaagcgctaggtggcgcactgatacatccttcacttgaagcaatgcaaattacagaaattgcctcaataaataatcgtgtgtttagaacggtaggatcaccacttgtattaccaaagcatcatacatgtttaatatcaccagttaatcatgataccattagaatgacgatagatcatgttagtatcaaacataaaaatgttaattcaatacaataccgtgtagcaaatgaaaaagtgaggtttgcacgttttagaccattcccgttctggaaacgtgtacacgattctttcatatcaagtgatgaagaacgatga

SEQ ID NO: 416135 - DNA, 861 bp, Staphylococcus aureus
atgttagctttgtttgctattatcggcttaattgttgcgtttgttgcaccaatcatcatttcaaatatcaacaatttaattagtcagacacctgccctacaaaaagaagcagagcaaattattaaattcgcactagctcaaatggataaattacctgaagatgtaacaagtagaattacaaatatggttaaatcaatgggtgatggcgttactaatattttatctaattcattacagtacattacatcattaatttcaaccatcttcttattgattatggttccattcttcttaatttatatgttaaaagaccatgaaaaatttatcccagctgttgctaaatttttcaaaggtgaacgtaaagtatttttcgtagatttattaactgatttaaactttacattaaaatcttacattcaaggtcaagtaactgtcagtgttattttaggtatattcttatatatcggttattcaattattgacttaccatatattcctttattagttctatttgctggtgtcgcaaacttaattcctttcttaggttcatggttatcatttgcacctgcagcaatactcggtattatagatagtcctactacatttatatgggtttgtatcattacattaattgcacaccaacttgaaggtaatatcattacgccaaatgtaatgggtaaatctttaagtatccatcctttaacaattatcgttgttattttagcagcaggagatttaggtggctttacattagttctgattgcagtgccattatatgctgtacttaaaacggttgttagtaatattttcaaataccgccaacgcattattgataaagcaaacagtaatgttaaggactaa

SEQ ID NO: 416136 - DNA, 909 bp, Staphylococcus aureus
ttgcaaaatttgaaagcgcttggttttaaacataaaggatttaaagaaggtttatcaaaagactacatccaaccacgtatgactatgattacaccaattgataaaaatgatgatgagttattaaatagttttgaacgccgaaatcgttcaaaagtgcgcttggctttaaagcgaggtacgacagtagaacgatctgatagagaaggtttaaaaacatttgctgaattaatgaaaatcactggggaacgcgatggcttcttaacgcgtgatattagttactttgaaaatatttatgatgcgttgcatgaagatggagatgctgaactatttttagtaaagttggacccaaaagaaaatatagcgaaagtaaatcaagaattgaatgaacttcatgccgaaatagctaaatggcagcagaagatggaaacatctgaaaagcaagctaaaaaagcgcaaaatatgattaatgatgcgcaaaataaaattgctaaaaatgaagatttaaaacgagacctagaagctttagaaaaggaacatcctgaaggtatttatctttctggtgcactattaatgtttgctggctcaaaatcatattacttatatggtgcgtcttctaatgaatttagagattttttaccaaatcaccatatgcagtatacgatgatgaagtatgcacgtgaacatggtgcaacaacttacgatttcggtggtacagataatgatccagataaagactctgaacattatggcttatgggcatttaaaaaagtgtggggaacatacttaagtgaaaagattggtgaatttgattatatattgaatcagccattgtaccaattaattgagcaagttaaaccgcgtttaacaaaagctaaaattaaaatatctcgtaaattaaaacgaaaatag

SEQ ID NO: 416137 - DNA, 1425 bp, Staphylococcus aureus
atgttatcagttaaaaaagccacaaaatttgcagttgctaaccttattatcgtgtcaacagttttcagttctgtcacacctgcaattgcgcaatccgataaaagttctaaagatgaaagtttcgcagttggtaatactaaaaatccaaaaaatgttatctttttagttggcgatggcatgggtccatcatttaacacagcttatcgttattataaaaatgattcgcatgccaaagaaatgacccctactgcttttgattcatatttaaaaggcacaaatcgtacatattcaaatgacccaaaacagaatattactgattctgcagctggcggaacagcctttagttctggccataagacatataatggtgccatcggtgttgacagtaacaagcagaaagtaaagacagtgcttgaacgtgcaaaagaaaaaggtaagtcgactggtcttgtttcaacagctgaattaacagatgcaacaccagcagcatatgctgcacacgtgacttctagagatgataaaaacgaaatcgctaaacaattttataaagataaaatcaacggaaagcataaagttgatgttttattaggcggcggcgctaaatatttcggtaaaagtaatggcaatttagataaaaaattcaaaaaagatggttacgaccttgccacgaacagtaaggatttatcaaaatctgataaagataaagttcttggtttgtttgcagataaaaatatgccacttgcaatagatgcttctaaagacgaaccatcattagctgatatgcaacaaagtgcacttagtaagcttgagcgtaataaaaaaggtttctttttaatggtcgaaggtgcttctatagataaatcagcgcattccaacgatattacaggcgttatgtctgaaatggaaggttttgaaaaagcattcgatgacgccattcaatatgctaagaaacataaagatacacttgtcgttgcaacagcagatcactctactggtggtctaacaattggtaaagataaaggatacgaatggaatcctcaaccgattaaatcgatgaaacactctggatcatatatgacagaaaaaatggctaaaggtgaagaccctgaaaaagttattaatgaaggttatggctttgaattttcacaagatgatatgaaaaaggttaaaaaagagaataaaaagttgcaaaaattacttaaaaaagaaaaagacgaaaaatctgcagatgtagaaaaacaaacaaaagccttacaacacgcaattcagaagccagtaaatgataaatcttatacagggtggacttccgatggacatacaggcgaggatgttaatacctacgcttacggacctagatcagaatcatttagtggtaatatcgaaaatacagaaagcgcaaaaataatatttgatatattcaagtaa

SEQ ID NO: 416138 - DNA, 312 bp, Staphylococcus aureus
atgaagtcaattactacagatgaattaaaaaacaaactttttgaatctaaaccagttcaaattgttgatgttcgtactgacgaagaaacagcaatgggatatattcctaatgcaaagttgattccaatggataccattccggataatttaaattcatttaataaaaatgaaatatattatattgtatgtgctggtggagttcgaagcgctaaagttgtagaatatttagaggcaaatggcattgatgccgtaaatgtcgaaggcggcatgcacgcatggggcgatgaaggtttggaaataaaaagtatttaa

SEQ ID NO: 416139 - DNA, 324 bp, Staphylococcus aureus
atggcatttgtttcttctgcacttgaacttctcataccagctaataaaacaggaaatgatgcatttttaatcgcttcaatgacatcattaatatcttgttcactcggtactcctaaatttggtttttggcaaagtgatatagctttagattcaactggtgaagaaataacgtcttgcggaatactaataaaacttgcgccattttttcctgaagtagcaattcgaattgcatttgtcataacttctgataatgattcaggatcttgtacttcttcactgtattttgatgaatattttaatagcgcagcattatcaatactttga

SEQ ID NO: 416140 - DNA, 201 bp, Staphylococcus aureus; identical to SEQ ID NO: 405574

SEQ ID NO: 416141 - DNA, 1410 bp, Staphylococcus aureus
atggcaagaaaattgcatagagagttgaataacagacacatccaattgatagcaattgggggcgcaattggaactgggttattcctaggatcaggtcaaacaatatctttaactggtccatcactgttattcacatacatgattattggggttgtactattcgcttttatgcgcgcattaggcgaattgttgttgagcaatacaagatttaattcatttgttgatattgcaaatgaatatttaggcccttttggtggctttgtcattggctggacttactggttatgttggattgtatcaagtatgtcagacctaactgcgatgggacaatactttgcattttggtatccacaagtcccaaattggattaccgtgctatttattgttttaatcttgattagcttcaacttattaggtgccagattatttggtgaactggagttttggttctctattattaaagttgtcacaattattgcgatggttatcgttggtcttgtattaatctttttctcatttaaaacacattatggacatgcatcattcacaaacttaatcagtcacggcggcatgttccctggaggaacatttggtttcctaatgtcattccaaattgctgtatattcattcattggtattgaacttataggtgtaactgctggtgaaacgaaagatcctgaaaaaaccttaccgaaagcaattaataatgtacctatccgtattttattattctatatcggtggtctattagtaattatgtcagtcataccttggaatgatatcgatccaaatagtagccctttcgttaaactctttacattaatcggcgtgccatttgcagcaggcgtcgttaactttgtcgtgctaactgccgcggcctctgctacaaatagtggtatctattcgaatagtcgtatcttattcggactgtcacaacaagggttaggtcctaaagttttaaataaaacgaatagtcatggcgtgccttatttatcaatattagtttcatcaattgcattacttatagcagccttgttaaactacattttccctaatgcaattcaactattcatatacgttacaacgttatcaactgtgttgtttttagttgtttgggcaatgattattgtcgcttatctaatgtatttgaaaaagcatcctgaggcacataaaaacagtaaatttaagttgattggtggtaagcctattgcttacattattctagcgttcttcttctttgtattcattttattattctttagtgacgaaacaagagcagctatttatatttcaccattctggtttatatttttatttttcttttataaaaaatacaaaacgaatgctgaaaagctcgcgtatgaacaacgacaaaatgacagcggtcatttcagatatgacaatcaataa

SEQ ID NO: 416142 - DNA, 1908 bp, Staphylococcus aureus; identical to SEQ ID NO: 415892

SEQ ID NO: 416143 - DNA, 744 bp, Staphylococcus aureus
gtgttatataatttgccatcaaaaggtagtgatgttttggtatggcaagaacactgtaatggtaatgtcccgggaaatatgcaattgatgtgtaaaggtgatatgaaacgacattgtaatattattattccagataaaaacgaatatgaaacgatgctcaatatagcagacgcaaaggttcaatctcgtattttacaaggcggatatctatataactatcgtagtcgtaatagatatactaaagaaattgtaatattaactaactcggatcaacttcgtaacatcaaggtattggttgaaactttaccagattttaattttcacatcgctgctattacagagatgtctgataagctaatgcaacttgatcaatatgctaatgtgcacttatacccatctattaatattgacagggtaaatgaactataccagttatgtgatatttatcttgatatcaatgagggtaatgaaattttaaatgcggtggaacaagcgtttgactatgagttgttgattttaggttatcgtcaaaccgcacaccatgctaaagtaacattatcagagcacttatttgagcataatgatgagataacaatggaaagtaaagaccaattaatacaaatgttagaaagtttgaaagatcaacaacagtttcgagatgctttattagcacaaaaagcacatgcacacgaaatctcgcgtgaacaattcgagcaagtttttaaacaggcgctcgaaagctaa

SEQ ID NO: 416144 - DNA, 1662 bp, Staphylococcus aureus
atgagtgaaagtaaagaaatggtgcgtggaacctttttaattaccattagtatattaattaccaaggtattgggcgtactttttatcattccattcaactatttaattggtggacaagaaaatatggcgccgttcacatacgcttatgcaccatataatattgcaattgcagttgcgacagcaggtgtaccattagcagcttcgaaatatgttgcgaaatataatgctattggggcatataaagtaagtcagaaattttataaatcgagttttattgtaatgagtattaccggtgttttaggtttcttggtactgtatttcttagcaccttatatttctgaattaacattagctagaaacattcatgataaaaacggttggtcagtcgatgatattacttggattataagaatcattagtatggttgttatctttattcctgtattagcgacatggagagggatattccaaggttataaatctatggggccaacagcagtgtcagaagtaactgagcaaattgcacgcgtgattttcatattaatcggaagttatttagtactaaatgtctttgatggctctattttattagccaatggtattgctacttttgcagcagcagttggtgcgattattggtatattcacactctggtattactggagaaagcgtaagcataatattgatcgtatggtcgaatctgattacacagatatagatgtgtcatatggcaagatgtataaagaaattattgcttatagtataccgttcgttattgtaagtttgaattatccattatttaacttagtagatcaatttacacataacggtgctttatctttagttggtataccttcacagttacaagatatattctttaatatgctaaatatgtcaactaataaaattgtaatgattccgacatcattaagtgctggttttgcagtgagtttaattccttatattacaaaaacatttgcagaaggtcgcttacatgaaatgcatcatcaaattagaacatctattggtgtattaatgtttataactgttccagctagtattggaattatggccttggcacaaccattattcacagttttctatggttacgatccaattgttttaggtcatgaccctaaccatgatggtagtcgcttattattctattatgcgcctgtagcaatactaatttcactattaagtgtaacggcatcaatgttacaaggtatagataaacagaaattaacagtttatgttattttagcttctgtagttatcaagttagcgttaaactatccattaattatgttattccatacacctggtgcaattttaagtactagtatcgcattattatttgcaattggatgtaatttctatattcttaaaaaatatgcgaagtttaaattcagctatagttggattcattttgcaaaaatattcttgtattcatttattatgatgctaggtgtagaattagtatttttccttgcaaatctattcttagaacctactaaacttggttacttaatcattattattttaggtgttacagtaggtattctaatttacggtacaatcacaattaaaacgcgtcttgcggacgaattcttaggtgaaattcctgaaaaattaagacgtagagttaggtttttacgatga

SEQ ID NO: 416145 - DNA, 513 bp, Staphylococcus aureus
gtgactcagattccgatagcgattccgactcagatagcgactcagattcagacagcgattctgactcagacagcgattctgactcagacagtgactcagattccgatagcgattccgactcagacagcgattcagattccgatagcgattcagattccgacagtgactcagattccgatagtgactcggattcagcgagtgattcagattcagatagcgattcagaatcagatagtgactcagactcagacagtgattcagattcagatagtgactcagactcagacagcgattcagaatcagatagtgactccgattcagacagcgattcagaatcagatagtgactccgattcagatagcgattcggattcagcgagtgattcagactcaggtagtgactccgattcatcaagtgattcagattccgattcaacgagtgacacaggatcagacaacgactcagacagtgattcaaatagcgattccgagtcaggttctaacaataatgtag

SEQ ID NO: 416146 - DNA, 348 bp, Staphylococcus aureus
ttgactttattgtcaattgtaaactctgtatcatattcaatatctttaccgtcatgcgctgctgccacattatctttaccatcgccaactttgatcgtctgtttcgtaactgtaattaagtcatttacattatttgaagcaactgctgctggttgtgcaactgcaaaacgcattttcgcatttaatcgttttggtgcaacacttgttggagctgtagcaactggtttagttgaacgatctgtattgttatcatttctaactaattcttttaatttctcaggattatttttaagttcttcttttgacacatttactggttcttttggattagttgcatctgtaacttga

SEQ ID NO: 416147 - DNA, 627 bp, Staphylococcus aureus
gtgcctacaggtgttccacgtactgatgtactatttgatgaagcttatgcgacacagatcaaacaagagatggaagatgaattaccaattattaaaggtaagaaagtcattcttttcgcaccaacatttagaggtagtggtcatggtacagcacattacccatttttcaaaattgatttcgaacgtttagcaagatattgcgaaaaaaataacgcggttgtattatttaaaatgcatccatttgtgaaaaatagacttaatattgcagacaaacataaacaatattttgttgacgtttctgactttagagaagttaatgatatactgttcataacagatttattaattagtgactattcatctttaatatatgaatatgcagtatttaaaaagccaatgattttctatgcatttgatttagaagattatattacgacgcgtgatttttatgaaccatatgaatcatttgttccaggtaaaattgtgcaatcatttgacgcattaatggacgccttggacaatgaagattatgaaggagaaaaagtcattccattcttagataaacattttaaatatcaagatggccgatcaagtgagcgtttagtcagaaatttatttggtagctaa

SEQ ID NO: 416148 - DNA, 1722 bp, Staphylococcus aureus; identical to SEQ ID NO: 410056

SEQ ID NO: 416149 - DNA, 915 bp, Staphylococcus aureus; identical to SEQ ID NO: 415120

SEQ ID NO: 416150 - DNA, 1203 bp, Staphylococcus aureus; identical to SEQ ID NO: 412690

SEQ ID NO: 416151 - DNA, 600 bp, Staphylococcus aureus; identical to SEQ ID NO: 413348

SEQ ID NO: 416152 - DNA, 1125 bp, Staphylococcus aureus; identical to SEQ ID NO: 409118

SEQ ID NO: 416153 - DNA, 837 bp, Staphylococcus aureus
atggatttagcgagtaaatattttaatggcgtcaactggcgatatatcgaccattcttctggattagaacctatgcaatctttcgcattcgatgatacattttgcgaaagtgtgggcaaagatatatcagataatgttgtgcgtacttggattcatcaacatactgttattcttggtattcatgattcaagattgccgtttttaaaagatggcattgattatttaacgaatgagattggttataatgccattgttagaaattctggtggcttaggtgtcgttctagatcaaggtgtattaaatatatcgctgatgttcaaaggacaaacagaaacaacgattgatgaagcgtttactgtgatgtacctcttaattagcaaaatgttcgaagatgagaatgttgatattgatacgatggaaattgaacattcttattgcccaggaaaatttgacttaagtatcgatggtaagaaatttgcaggcatatcgcaacgaagagttagaggcggtattgctgtacaaatttatctttgtgttgaaggctctggttcagaacgtgcattgatgatgcaaacattttatgaacatgctttaaaaggtgaagtgactaaatttaaatatcctgaaattgaaccatcttgtatggcctcattagagacattgcttaacaaaacgattactgttcaagatgtaatgtttttactattatatgcaatcaaagatcttggcggtgtattaaatatgacgcccattactcaagaagaatggcaaagatacgatacgtattttgataaaatgattgaaagaaacaagaaaatgatagaccaaatgcaatag

SEQ ID NO: 416154 - DNA, 597 bp, Staphylococcus aureus
ttgcttgagactttcccagtacataataaagaagctgctttaagacaactcggtgtcattaaagaatctattgatccaaaatcagtgatgggttcaggatctttacaacaaattatccaggcatttaatgatgtgacgggacaagatacaaccgactggtccaagtcaacaagtcaaaagctggtagatgaacgtattcctgaaattaattgggtagaaggtgttaaagaagcacttatcgatttgaaagcaaaaggctatcaacttggtattgttacgagtgatactaaaaaaggtgtagaacaatttttagcacataccaatgctatctcgttgttcgatttgatcatttctaccgaagcggatgcctatgagaagccaaatcctaaagtattatcgcctttatttgagcaatataatgtagatcctcagaaagtagctatagtaggagacactgctaatgatatgaagacagcaagtaatgcaaatttaggtatggcaataggtgtattaacaggtattgcaacaaaagaagaattacatgaagctgatattattttaaatagtgcggcagatattttagaagctttaaattaa

SEQ ID NO: 416155 - DNA, 663 bp, Staphylococcus aureus; identical to SEQ ID NO: 414888

SEQ ID NO: 416156 - DNA, 234 bp, Staphylococcus aureus
gtgttaaaatctagaattgctaaacgtaaccgtagttttgagcatcaaatagaagatgaatatctgttaaagttaaaaaaagattatcgtgagtattatgagtccttacaaagtaatggttcaaatgtagttttaatcgatacaacttctattgattttcttaaaaatgaacaagattacgaagatatattacatattatattacctatgataggagatattaccaatgaataa

SEQ ID NO: 416157 - DNA, 1212 bp, Staphylococcus aureus; identical to SEQ ID NO: 415212

SEQ ID NO: 416158 - DNA, 1170 bp, Staphylococcus aureus; identical to SEQ ID NO: 415340

SEQ ID NO: 416159 - DNA, 762 bp, Staphylococcus aureus; identical to SEQ ID NO: 415417

SEQ ID NO: 416160 - DNA, 480 bp, Staphylococcus aureus
atggaaggactagctaaattgaatgttgatctggtaaatgttcatgctgctggtggcgtaaaaatgatgtctgaggccattaaaggattaagaaaacataatcaacatacaaaaattattgcagtaacacagcttacgtcaacaacagaagacatgttacgacacgaacaaaatatacaaacatcgattgaagaggccgttttaaattatgccaagttagcaaatgcagctggtttagatggcgttgtttgttcacctcttgaaagtcgtatgttgactgaaaagttaggtacatcatttttaaaagtaacaccaggtattagacctaaaggtgcatctcaagatgaccaacaccgtattacgacaccggaagaagcaagacagcttggttcgacgcatattgtagtcggtagaccgattacacaaagtgacaatccagtcgaaagttatcataaaattaaagaaagttggttagtataa

SEQ ID NO: 416161 - DNA, 948 bp, Staphylococcus aureus
atgaatggtgataaaaagacttcatttttaattggtgatggcacaggtatgggattgcctgaaagtgattatttcgcttttgaggcatgtgaatatagacgtcactttttaagttataaacctgattacgcaattatgacaaatattgatttcgatcatcctgattattttaaagatattaatgatgtttttgatgcattccaagaaatggcacataatgttaaaaaaggtattattgcttggggtgatgatgaacatctacgtaaaattgaagcagatgttccaatttattattatggatttaaagattcggatgacatttatgctcaaaatattcaaattacggataaaggtactgcttttgatgtgtatgtggatggtgagttttatgatcacttcctgtctccacaatatggtgaccatacagttttaaatgcattagctgtaattgcgattagttatttagagaagctagatgttacaaatattaaagaagcattagaaacgtttggtggtgttaaacgtcgtttcaatgaaactacaattgcaaatcaagttattgtagatgattatgcacaccatccaagagaaattagtgctacaattgaaacagcacgaaagaaatatccacataaagaagttgttgcagtatttcaaccacacactttctctagaacacaagcatttttaaatgaatttgcagaaagtttaagtaaagcagatcgtgtattcttatgtgaaatttttggatcaattagagaaaatactggcgcattaacgatacaagatttaattgataaaattgaaggtgcatcgttaattaatgaagattctattaatgtattagaacaatttgataatgctgttgttttatttatgggtgcaggtgatattcaaaaattacaaaatgcatatttagataaattaggcatgaaaaatgcgttttaa

SEQ ID NO: 416162 - DNA, 474 bp, Staphylococcus aureus; identical to SEQ ID NO: 413346

SEQ ID NO: 416163 - DNA, 690 bp, Staphylococcus aureus
atgattgaaacagatgcacgtactgctgaaatgagtaagctaatggaaaacacatatagagacgtgaatattgctttagctaatgaattaacaaaaatttgcaataacttaaatattaatgtattagatgtgattgaaatggcaaacaaacatccgcgtgttaatatccatcaacctggtccaggtgtaggcggtcattgtttagctgttgatccgtactttattattgctaaagaccctgaaaatgcaaagttaattcaaactggacgtgaaattaataattcaatgccggcctatgttgttgatacaacgaagcaaatcatcaaagcgttgagcgggaataaagtcacagtatttggtttaacttataaaggtgatgttgatgatataagagaatcgccagcatttgatatttatgagctattaaatcaagaaccagacatagaagtatgtgcttatgatccacatgttgaattagattttgtggaacatgatatgtcacatgctgtcaaagacgcatcgctagtattgattttaagtgaccactcagaatttaaaaatttatcggacagtcattttgataaaatgaagcataaagtgatttttgatacaaaaaatgttgtgaaatcatcatttgaagatgtatcgtattataattatggcaatatatttaattttatcgacaaataa

SEQ ID NO: 416164 - DNA, 657 bp, Staphylococcus aureus; identical to SEQ ID NO: 416128

SEQ ID NO: 416165 - DNA, 774 bp, Staphylococcus aureus
atgttaatcgatacacatgtccatttaaatgatgagcaatacgatgatgatttgagtgaagtgattacacgtgctagagaagcaggtgttgatcgtatgtttgtagttggttttaacaaatcgacaattgaacgcgcgatgaaattaatcgatgagtatgattttttatatggcattatcggttggcatccagttgacgcaattgattttacagaagaacacctggaatggattgaatctttagctcagcatccaaaagtgattggtattggtgaaatgggattagattatcactgggataaatctcctgcagatgttcaaaaggaagtttttagaaagcaaattgctttagctaagcgtttgaagttaccaattatcattcataaccgtgaagcaactcaagactgtatcgatatcttattggaggagcatgctgaagaggtaggcgggattatgcatagctttagtggttctccagaaattgcagatattgtaactaataagctgaatttttatatttcattaggtggacctgtgacatttaaaaatgctaaacagcctaaagaagttgctaagcatgtgtcaatggagcgtttgctagttgaaaccgatgcaccgtatctctcgccacatccgtatagagggaagcgaaatgaaccggcgagagtaactttagtagctgaacaaattgctgaattaaaaggcttatcttatgaagaagtgtgcgaacaaacaactaaaaatgcagagaaattgtttaatttaaattcataa

SEQ ID NO: 416166 - DNA, 702 bp, Staphylococcus aureus
gtgtcagaagctatagttgcaaaggcaccacacaacataagtgctaatgaagcggttagtctaccgctaactggtattacggcatatgaaacgttttttgatacatttaaaatttcacataatccttctgaaaatgtaggtaaatccgtgttaatcattaatggtgccggtggtgtaggcagtatagccactcaaattgctaaacggtatggtttaactgtcattacaacagcatcacgacaagaaacaacagagtggtgtgaaaagatgggcgcagatatcgtattgaatcataaagaggatttagtgcgtcaatttaaagaaaaagaaattccattagtagattatatattttgcacttataatacagacttgtattacaatactatgattgaactgataaaaccattagggcatattacgactatcgtagcttttaatgaagatcaagatttaaatgcattaaaattaaaaagtataacatttacacatgaatttatgtttgcgcgtccaattcatcgaacgcctgatatgattaaacaacatgagtatttagaagatattacgaaaaatatagaattagggcattaccaaccaacaacgacacaagtttttgaaggtttatcacctgaaaacttatatcaagcacatcaattgttggaaaaacaatcaatgattgggaaattagtaattaatatatag

SEQ ID NO: 416167 - DNA, 777 bp, Staphylococcus aureus
atggcaatggatgaagcgttattaaattttgtctctagaggtgaaattgatccagttatacgtttttacacatggaatcctgcaacattatcaatagggtatttccaaaggctacaaaaagaaattgatattgataaggttaaagagaaaggttttggtctcgtaaggcgtcaaactggtggccgtggggtgctacatgataaagagttaacttacagtgtgattgtgcctgaatcgcatccgaatatgccttctacagttacagaagcgtacagagtgatttcacaaggattattagaaggatttaaaaacttaggatttgatacttattttgcggtacctaaaacgcctgaagagcgtcaaaaattaaaacaacctcgaagttcagtgtgttttgatgcaccaagttggtatgagctagttgttgaaggccgtaagattgctgggagtgctcaaacgagacaaaagggcgtaatcctccaacacggttcgattttacaagatattgatattgatgaactgtttgatatgtttatttataaaaatgaaagattaaaattaaaaatgaaagaggcattcgttgaaaaagcagttgccatcaatgatatttcagatgaacacattactattagtcaaatggaagaagctttcgagaaaggttttaagaaaggtttaaatatagaattaaagccacttgaattaacagaagctcaattggcagaagtggaagaattaactgaaaaatatcgttcagatgaatggatgtttagaaagtag

SEQ ID NO: 416168 - DNA, 723 bp, Staphylococcus aureus
gtgctacaccctattcacgagttaggaaatgccatcaatcaatttaatagtaatatttattttgtagttgacggcgtaagttgcattggtgctgttgatgttgacattaacaaagataaaattgatgtacttgtttctggtagtcaaaaagcaattatgttacctccaggattagcttttgtagcttatagccaccgtgcaaaagaacgtttcaaagaagtaactacgccaaaattttatctagacttaaataaatacatttcgtcacaagctgacaattctacaccgttcacaccaaatgtgtctttatttagaggtgtaaatgcatacgttgaaaccgtaaaagcagaaggtttcaatcacgtaatagcacgacactatgcaattagaaatgcattaagaagcgccttaaaagcattagatttaactttattagtcaatgataaagatgcatctccaacggttacagcattcaaacctaatacaaatgaagtgaaaataatcaaagatgaacttaaaaatcgctttaaaataacaattgctggtggtcaaggccatcttaaaggtcaaattttaagaattggtcatatggggaaaattagtcctttcgatattttatcggtagtatctgctttagaaattattttaactgaacaccgtaaagttaactatatcggtaaaggtatatcaaaatatatggaggttattcatgaagcaatttaa

SEQ ID NO: 416169 - DNA, 399 bp, Staphylococcus aureus
atgggtgcagtacaacaatatattgacgaacagcaccttggtgttatcagcagcacaaattacatcaatgcagatgacaatttgaaagcaaattatgataatgcaattgcgaatgcagcacatgagttagataaagtgcaaggtaatgcaattgcaaaagctgaagcagagcaattgaaacaaaatattatcgatgctcaaaatgcattaaatggagaccaaaaccttgcaaatgccaaagataaagcaaatgcgtttgttaattcgttaaatggattaaatcaacagcaacaagatcttgcacataaagcaattaacaatgccgatactgtatcagatgtaacagatattgttaataatcaaattgacttaaatgatgcaatggaaacatttagttga

SEQ ID NO: 416170 - DNA, 204 bp, Staphylococcus aureus
atgcatcaaaaaatagacgtaaaaggggaacatcaattacctttatttagatatttgactgcggcacaacacggattctttaatgagaaaatcaaatggaatttcactaagtttttagtggatcgcgaaggtaacgttgttaaacgatttgcacctcaaaaaaaacctgttcaaatcgaaagagaaatagaaaaattattataa

SEQ ID NO: 416171 - DNA, 321 bp, Staphylococcus aureus
gtggcttttgctgctggtttaactgcttttgtttccttaggggctttaacttctttaacttctttagcttcttttgtttcagaagtaggggcctcaacttctttattagatactgagacagcattagctactggtttagtttctggagctttttcagatgttgttgttggacttgcaactgcttcagtttttggttgtgcttctgtatttgtaccacctgtttcttcagctgctgcttgtgcttcgccatttgacattaataataaaagtgtactaatcgctacagatgcaacgcctagtgatgactttctaattgaataa

SEQ ID NO: 416172 - DNA, 204 bp, Staphylococcus aureus
atgtttgctaaagcgcatcatattaatcgctataatttttatggcattactggtgatttttcagagtcagcagaagactatggcgtacaacaattcaaaaaaggatttaacgcacacgtagaagaatatattggtgattttattaaaccaatcaaacctatgctttacaaattacaaacatacttaaaacataaacgccgttaa

SEQ ID NO: 416173 - DNA, 786 bp, Staphylococcus aureus
atgaagtctataaaaaggattggattgtgcataagtctgttgattttaatcatttttgcaacatcttgtggtagtaataagattactggagactcaaaagaagaaaaaatcaaaaagagttttgcgaaaacgttagatatgtatccaattaagaatctcgaggaactatatgacaaagaaggctatcgagatggcgaatttgaaaaaggtgacaaagggatgtggacgatatatacagatttcgccaaaagtaataaaccgggtgaactaagtaatgaaggcatggtcttgtacttagatagaaacacacgcacagctaaggggtactactttgtcaggacgttttatcgcaaggataaattacctgatagaaaaaattataaagttgaaatgaaaaataataaaattatcttattagacaaggtagaagatccaaatctaaaaaagagaatagaaaactttaaatttttcggacaatatgcaaatcttaaagaattgaaaaactacagcaatggtgatgtctcaattaatgagaatgttccaagttatgacgtgaaatataaaatgagtaataaagatgaaaatgttaagcaattaagaagtcgttataatattcctactgataaatcaccggtattaaaaatgcatattgatggtaatttgaaaggaagttccgttggagataggaagttagaaattgatttttcgaaacgtgaaaatagccatttatcagtaatagattctttggattaccagccagcgaaggtggatgaagatgaaagataa

SEQ ID NO: 416174 - DNA, 330 bp, Staphylococcus aureus
gtgatttcttctttcgattcacctttactaataatttctccagttaatggattttttagtgttggcgtcgttattgtcttctcacctttttgtccttctcttgttactttttctgtccctggtgctaaatcaggattaaatttacgttctttcttgaatggaatttcttctttttctacaatcgagtctccttttacaggtccatattttgttacactatcgaccggtggtctaactacgtctcctgtttctggattcttaattcctggtttacctggaacttcttctttctctcctgttggtaacttcggatcaaattcgtctcgatga

SEQ ID NO: 416175 - DNA, 291 bp, Staphylococcus aureus
ttgttttgcgtaataaatctatttacttctgggcctttagcaacaaaatgcttatcaacttgttgtgaagctggattgtttgttgctacattcacgcgattattgatttctttgtactctggtacaatgtttcctaactttgattctggtacggcaaagtttttatctacaattttactagctgccgatgaatctacaatcttattcaatttgtcttcagaaactacaaagtttttattgtcagttaaattactaacatttacttttggcgaattcttaaattcatcgtaa

SEQ ID NO: 416176 - DNA, 228 bp, Staphylococcus aureus; identical to SEQ ID NO: 405787

SEQ ID NO: 416177 - DNA, 174 bp, Staphylococcus aureus
atgacacgtgaacatttattacaaacagtatggggctatgattactttggcgatgtacgtacggtcgatgtaacgattcgtcgtttacgtgaaaagattgaagatgatccgtcacatcctgaatatattgtgacgcgtagaggcgttggatatttcctccaacaacatgagtag

SEQ ID NO: 416178 - DNA, 633 bp, Staphylococcus aureus
ttgacaaaagaccctaaatatttaattggtcgtattatcgcacgtccatatgttggtgaaccaggaaactttacacgtacatctaatcgacatgactatgcgttaaaaccatttggtaaaactgtcttagatcatttgaaagacggtggttatgatgttattgccatcggtaaaattaatgacatttatgatggtgaaggtgtaacagaagcggttcgtacgaagagtaacatggacggtatggatcaattgatgaaaattgttaagaaagatttcacaggtattagcttcttaaacttagtagactttgatgcattatacggtcatcgtcgtgataaaccaggttatgcacaagcaattaaagatttcgatgatcgcttgccagaactgtttagcaacttaaaagaagacgatttagtaattattacagcagaccatggtaatgacccgacagcgccaggtacggaccatacgagagaatatatcccagtaattatgtacagtccgaaatttaaaggtggtcatgcactagaaagtgatactacattcagttctatcggtgcaactatagcagataatttcaacgtaacattaccagagttcggtaaaagttatttaaaggaattgaaatag

SEQ ID NO: 416179 - DNA, 303 bp, Staphylococcus aureus
atgacaaaagtaacacgtgaagaagttgagcatatcgcgaatcttgcaagacttcaaatttctcctgaagaaacggaagaaatggccaacacattagaaagcattttagattttgcaaaacaaaatgatagcgctgatacagaaggcgttgaacctacatatcacgttttagatttacaaaacgttttacgtgaagataaagcaattaaaggtattccgcaagaattagctttgaaaaatgccaaagaaacagaagatggacaatttaaagtgcctacaatcatgaatgaggaggacgcgtaa

SEQ ID NO: 416180 - DNA, 1458 bp, Staphylococcus aureus
atgagcattcgctacgaatcggttgagaatttattaactttaataaaagacaaaaaaatcaaaccatctgatgttgttaaagatatatatgatgcaattgaagagactgatccaacaattaagtcttttctagcgctggataaagaaaatgcaatcaaaaaagcgcaagaattggatgaattacaagcaaaagatcaaatggatggcaaattatttggtattccaatgggtataaaagataacattattacaaacggattagaaacaacatgtgcaagtaaaatgttagaaggttttgtgccaatttacgaatctactgtaatggaaaaactacataaagagaatgccgttttaatcggtaaattaaatatggatgagtttgcaatgggtggttcaacagaaacatcttatttcaaaaaaacagttaacccatttgaccataaagcagtaccaggtggttcatcaggtggatctgcagcagcagttgcagctggcttagtaccatttagcttaggttcagacacaggtggttcaattagacaaccggctgcatattgtggcgttgtcggtatgaaaccaacatacggtcgtgtatctcgatttggattagttgcttttgcatcttcattagaccaaattggtccattgactcgaaatgtaaaagataatgcaatcgtattagaagctatttctggtgcagatgttaatgactctacaagtgcaccagttgatgatgtagactttacatctgaaattggtaaagatattaaaggattaaaagttgcattacctaaagaatacttaggtgaaggtgtagctgatgacgtaaaagaagcagttcaaaacgctgtagaaactttaaaatctttaggtgctgtcgttgaggaagtatcattgccaaatactaaatttggtattccatcatattacgtgattgcatcatcagaagcttcgtcaaacctttctcgttttgacggaattcgttatggttatcattctaaagaagctcattcattagaagaattatataaaatgtcaagatctgaaggtttcggtaaagaagtaaaacgtcgtattttcttaggtacatttgcattaagttcaggttactacgatgcttactataaaaaatctcaaaaagttagaacattgattaaaaatgactttgataaagtattcgaaaattatgatgtagtagttggtccaacagcgcctacaactgcgtttaatttaggtgaagaaattgatgatccattaacaatgtatgccaatgatttattaacaacaccagtaaacttagctggattacctggtatttctgttccttgtggacaatcaaatggccgaccaatcggtttacagttcattggtaaaccattcgatgaaaaaacgttatatcgtgtcgcttatcaatatgaaacacaatacaatttacatgacgtttatgaaaaattataa

SEQ ID NO: 416181 - DNA, 1428 bp, Staphylococcus aureus
atgcattttgaaacagttataggacttgaagttcacgtagagttaaaaacggactcaaaaatgttttctccatcaccagcgcattttggagcagaacctaactcaaatacaaatgttatcgacttagcatatccaggtgtcttaccagttgttaataagcgtgcagtagactgggcaatgcgtgctgcaatggcactaaatatggaaatcgcaacagaatctaagtttgaccgtaagaactatttctatccagataatccaaaagcatatcaaatttctcaatttgatcaaccaattggtgaaaatggatatatcgatatcgaagtcgacggtgaaacaaaacgaatcggtattactcgtcttcacatggaagaagatgctggtaagtcaacacataaaggtgagtattcattagttgacttgaaccgtcaaggtacaccgctaattgaaatcgtatctgaaccagatattcgttcacctaaagaagcatatgcatatttagaaaaattacgttcaattattcaatacactggtgtatcagacgttaagatggaagagggatctttacgttgtgatgctaacatctctttgcgtccatatggtcaagaaaaatttggtactaaagccgaattgaaaaacttaaactcatttaactatgtacgtaaaggtttagaatatgaagaaaaacgccaagaagaagaattgttaaatggtggagaaatcggacaagaaacacgtcgatttgatgaatctacaggtaaaacaattttaatgcgtgttaaagaaggttctgatgattaccgttacttcccagagcctgacattgtacctttatatattgatgatgcttggaaagagcgtgttcgtcagacaattcctgaattaccagatgagcgtaaggctaagtatgtaaatgaattaggtttacctgcatacgatgcacacgtattaacattgactaaagaaatgtcagatttctttgaatcaacaattgaacacggtgcagatgttaaattaacatctaactggttaatgggtggcgtaaacgaatatttaaataaaaatcaagtagaattattagatactaaattaacaccagaaaatttagcaggtatgattaaacttatcgaagacggaacaatgagcagtaaaattgcgaagaaagtcttcccagagttagcagctaaaggtggtaatgctaaacagattatggaagataatggcttagttcaaatttctgatgaagcaacacttctaaaatttgtaaatgaagcattagacaataacgaacaatcagttgaagattacaaaaatggtaaaggcaaagctatgggcttcttagttggtcaaattatgaaagcgtctaaaggtcaagctaatccacaattagtaaatcaactattaaaacaagaattagataaaagataa

SEQ ID NO: 416182 - DNA, 591 bp, Staphylococcus aureus
atggtattatatagatttgtcgtttttagtgatcaattcgaaaggtttggttctttaacatttttcgatgcatttttagtaggattagttgaagaaactggaaaagcactcattattgtttatttcgtcaataaattgaaaacaaataagattttgaatggattattaatcggtgctgctattggtgcagggttcgcagtttttgaatcagcaggttatattttgaatttcgctttaggggaaaatgtcccattattagatattgtcttcacacgtgcgtggactgcgattggtggtcatttagtttggtcagcgattgttggtgctgcaatagttattgcgaaagaacagcatggctttgaattcaaagatatttttgataaacgctttttaatattctttttatcagccgttggtttacatggcatttgggatacatctttaactgtacttggcagtgatacgttgaaaatatttattttaatcgttattgtgtggatacttgtattcattttaatgggggcaggtttaaaacaagtgaatttactgcagaaagaatttaaagaacaacagaaaaaagtagacgaataa

SEQ ID NO: 416183 - DNA, 921 bp, Staphylococcus aureus; identical to SEQ ID NO: 415465

SEQ ID NO: 416184 - DNA, 333 bp, Staphylococcus aureus
atgattgaacaacagcgtcgtctaaacaaagacttattagatgaagtggcggggaatcaaaataatattaaccttgtgaataaaaataatgaaattcatatacaacagtatgattatttgttaaaacgttatcttttaaacattgaaagagaaaacgacatcagtatgaagcaatttagagaaattcaagaaacactccatccaatgggaggattacaagaaagaatatggaatccacttcaaattttgaatgattttgggacagatgtgttcaagccctccacctatccaccactttcttacacttttgatcatattattataaaaccttaa

SEQ ID NO: 416185 - DNA, 258 bp, Staphylococcus aureus; identical to SEQ ID NO: 414774

SEQ ID NO: 416186 - DNA, 243 bp, Staphylococcus aureus
atgacagataacgcacgcaaagaatacttaagccgatttttcggctctaagagatatctgtatcaggataacgagcgagtggctcatatccatgtagtaaacggcacttattactttcatgggcatatcgtaccaggttggcaaggcgtgaaaaagacatttgatacagcggaagagctcgaaatatatataaagcaacatggtttggaatatgaggaacagaagcaactaactttattttaa

SEQ ID NO: 416187 - DNA, 228 bp, Staphylococcus aureus
gtgcgttcaacaaactcgccacctttaaataaaatgccattttcagcagcgcgaccagtacctaccataatagaagttggtgtagcaagtcctaatgcgcatggacaagcaatgacaagaacggaaatactcgcaacaagtgcaggttcaaatgtacctggtgtaactaaagtaatccacacgataaatattaatagtgcgataccaacaacgataggaacgaaataa

SEQ ID NO: 416188 - DNA, 1188 bp, Staphylococcus aureus
atggtagatactatgaaagaacgtattcaggcgacgatggcaacaacatataaagaccaagcacgcccattaatgtctaaaacattttcatcaaaaatgtcgatatttaataatcaaaaagtatctgatcaccatgcaattattcctacagaagtgagacctgtcatgtcagacttaagtaatagagaattaaagttatacgatatgattgtcgagcgttttttagaagctttaatgcctccgcacgagtatgacgcgataactgtaactttagaggttgcagggcacacatttgttttgaaagagaatgtaacaactgttttaggttttaaatctattagacaaggtgaatctattacagagatgcaacagcctttttcagaaggcgatgaagtgaagatttcaaaaacaaacattagagaacatgaaacaacacctccagaatattttaatgaaggttcgttattaaaagcgatggagaaccctcagaactttattcaattgaaggataaaaaatatgcgcaaactttaaaacaaacaggtggtatcggcacagttgcaacaagggccgacattatcgataaattatttaatatgaatgccattgaatcaagagacggtaaaattaaagtaacgtcaaaaggtaaacaaatattagaattagcaccagaagaattaacgtcgccacttttaactgcacaatgggaagaaaaattacttttaattgaacgtggtaaatatcaggcgaaaacatttattaatgaaatgaaagattttacgaaagatgttgtaaatgggattaaaaatagtgatcgtaaatataaacacgataatttaacaaccacagaatgcccaacgtgtggtaaattcatgattaaagttaaaactaaaaatggtcagatgcttgtgtgccaagatccatcttgtaagacgaaaaagaatgtacagcgcaaaacaaatgcaagatgtccaaactgtaaaaagaaattaacgttgtttggtaaagggaaagaagcggtatatcgttgtgtttgtggacattctgaaacgcaagcacatatggatcagcgtatgaagtctaaatcctctggtaaagtatctcgtaaagaaatgaaaaagtatatgaataaaaatgaaggtttagacaataatccgtttaaagatgcattaaagaacttgaatttatag

SEQ ID NO: 416189 - DNA, 855 bp, Staphylococcus aureus
atgaaaaagttaacaacgctattattagcatcaacgttattaattgctgcatgtgggaacgacgatagtaagaaggatgattcaaagacatcgaaaaaagatgatggtgttaaagcagaattaaaacaagcaacaaaagcatatgataaatatactgatgaacagttaaatgaatttttaaaaggtacagaaaaatttgttaaagcgattgaaaataatgatatggcccaagcaaaagcgttatatccaaaagttcgtatgtattatgaacgctctgaaccagttgcagaagcatttggagatttagatcctaaaattgatgcacgtcttgcagatatgaaagaagagaaaaaggaaaaagaatggtcaggatatcataagattgaaaaagcattatacgaagataagaaaattgatgatgtgactaaaaaagatgcacaacaattattgaaagatgcaaaagaattgcatgccaaagctgatacattagatatcacaccaaaattaatgttacaaggttctgttgacctattaaatgaagttgcaacttctaaaatcacaggtgaagaagaaatttattcacatacagatttatatgattttaaagcgaacgttgaaggcgcacaaaaaatttatgacttatttaaacctattttagagaaaaaagataaaaaattaagtgatgatattcaaatgaacttcgataaagtgaatcaattattggataaatataaagataacaacggcggttatgagtcatttgaaaaagtatcgaagaaagaccgtaaagcatttgcggatgctgttaatgcattaggagagccactaagtaaaatggctgtgattactgaatga

SEQ ID NO: 416190 - DNA, 321 bp, Staphylococcus aureus
atgacaaataaaataatagctaatacttttaaaataactaaaatgttttccatacgtgctgcttctgacataccacgtgatagtaataatgcagttaataaaataacgatagcagcaataatatcgataaaaccgccattcgtaccaaatggatttgataatgctgcaggtaattcgatgccaattggtttcacaagtccgcgtaaattcgctgagaatcctgatgcaacaaaggctacggcgataaaatattcagctaatagagcccaaccggcaacccatccaaaaaattcaccaaataatacattgacccaagaatag

SEQ ID NO: 416191 - DNA, 213 bp, Staphylococcus aureus
atgactaaacatagtgcagctatagcaaatagattagttttcaaatattgcttctttatattgtcgctttcatttacagaaatatatgaaagtactacattattaatcggatacagaaatgtagctaacattttcccaataaatgttgaaagaaatgatatagttacagctgttccacctataattggtaataagattaatctatctaagtag

SEQ ID NO: 416192 - DNA, 276 bp, Staphylococcus aureus; identical to SEQ ID NO: 409072

SEQ ID NO: 416193 - DNA, 507 bp, Staphylococcus aureus
atgagatttttatcagtaatggctttagatattttattaataccgccaatcatgctattcaaaccgccaatagctttattagcaacatttttacctaaatcagccgcagctcttcccatgtctttaccaatatctctaatccaatcatatgttttggatagccattttctaaaaccattaaatactgatttagcgttagaccatgccgaacttgaaattgcatcaaaacgatcgtgggctcttgaatacatatccccagtccaatcttttaaagatttgtatgagttactaaaccatttcgatgttcctttccaaacggattttgcattcgaccaagctgtactagaaatattatcccatttcgcgcgagatttattagccatatccgttagccagccctttgcacttttatatgcattgctaaaccattttgatgtgcctctccaaatagattttgaatgcgcccaagctttatctgaagcatctgaatacttttgcttagtttga

SEQ ID NO: 416194 - DNA, 774 bp, Staphylococcus aureus
atgtcaatgaaagctaagtattttcaaatgaaaagaaaatcaaaaagtaaaggtgaaatatttatttatggtgatattgtaagtgataaatggtttgaaagtgatgtaactgctacagatttcaaaaataaactagatgaactaggagacatcagtgaaatagatgttcatataaattcatctggaggcagtgtatttgaagggcatgcaatatacaatatgctaaaaatgcatcctgcaaaaattaatatctatgtcgatgccttagcggcatcaattgctagtgttatcgctatgagtggtgacactatttttatgcacaaaaatagttttttaatgattcataattcatgggttatgactgtaggtaatgcagaagaattaagaaagacagcggatttacttgaaaaaacagatgctgttagtaattcagcttatttagataaagcaaaagatttagatcaagaacacttaaaacagatgttagatgcagaaacttggcttactgcagaagaagccttgtctttcggcttgatagatgaaattttaggagctaatgaaatagctgctagtatctctaaagagcaatataagcgtttcgagaacgtcccagaagatttaaagaaagatgtagacaaaatcactaaaattgatgatgtagatacatctgaattggttgaaacacctaaagaaagtatgtcactagaagaaaaagaaaaaagagaaaaaattaaacgcgaatgcgaaattttaaaaatgacaatgaattattag

SEQ ID NO: 416195 - DNA, 1239 bp, Staphylococcus aureus
gtgaatgttatcgcaaaagagaatattgtcacacgcataaagaaaaaattgatagacaattggattgatcagtcaacttctaagctttatgactttagcccatggaaaaatagatctttttggggtgtaattaataatacgcttgaaactaatgaaacgatattttcagctattacaaagttatctaattcgatggctagtttgcccttgaaaatgtatgaagattataaagtagttaatacagaagtatctgatttacttacagtgtcaccgaataattctctgagcagttttgattttattaatcaaattgaaacaatcagaaatgaaaaaggtaatgcatatgtgctaattgaacgagacatctatcatcaaccatcaaagcttttcttattaaatccagatgttgttgaaatgttaattgaaaaccaatcacgtgaactttattattccattcatgctgcaactggaaataaattgattgttcataatatggacatgttgcattttaaacacatcgtggcatctaatatggtgcaaggcattagtccgattgatgtgttgaagaatacaactgattttgataatgcagtaagaacctttaatcttacagaaatgcaaaaacctgattctttcatgcttaaatatggttccaatgtaggtaaagaaaaaaggcagcaagtgttagaagatttcaaacagtactatgaagaaaacggtggagtattattccaagagcctggtgttgaaatcgaaccgttacctaaaaaatatgtctctgaagatatagtggcaagcgagaatttaacaagagaaagagtagctaacgtttttcaattgccctcagtattcttaaatgcaagatcaaatacaaatttcgcgaaaaatgaagagttaaacagattttacttgcagcataccttattgccaatcgtcaaacagtatgaagaagaatttaatcggaaactacttactaaaacagacagagaaaaaaataggtattttaaatttaacgttaaatcttatttaagggctgatagtgcaacacaagcagaagtgtactttaaagcagttcgtagtggttactacactataaatgacattagagagtgggaagatttaccaccagttgaaggtggagataagccgctaataagcggtgatttatacccaattgacacgccacttgaattaagaaaatctttgaaaggtggtgataaaaatgtcaatgaaagctaa

SEQ ID NO: 416196 - DNA, 279 bp, Staphylococcus aureus
atgtatggtcaatacggcggaaaccttacaagtacgtcaatgacattcgtgtctaaaactgcttatgaaaatggtatcaatcgtgcattaaatttaaaacgcatggtgcgtccagttaaaaatattagacaattatctaaagcagatatgaaaaataacagtgcaacacctaaattagacgttgatccacaaacatatgaagtatatgtagatggagaaaacattacaagtaatgcagcaactgagttaccattaactcaaagatacttcttattctag

SEQ ID NO: 416197 - DNA, 885 bp, Staphylococcus aureus
atggaatatgttttaaaagatgctgaaattgttcaagtgattattccatcttcatacatagagtattatgctgatgtaatggcagagcatgtaactgataatcagttgatattcttcaacatggctgcagcaatggggtcaattcgttttatgaatgttttagaagatagacatattgaaacaaaaccacaactagcggaagctaatacgttgacgtatggtacgcgtgtcgattttgaaaatgcagcagttgatttatctctaaatgtacgtcgtatcttcttttcaacatatgatagaagctgtctaaatgattgttatgacaaagtttcaagtatttatgatcatttagtaaaagaggaaagcttaattaaaacaaatcttgaaaatggtaatcctgaagtgcatccaggaccaacattattgaatgtcggtcgcattgattatgctggcgagttcgctttatataaagaaggaattactaaacatacagttagattacttcatgcaatcgaattagaacgtttaaatttaggccgtagattaggttttgaattatcaacagctaaagaatcacgtattgaacgtggttatttagaacgtgataaagaagatgaaccattaaatcgtttgtttaatacaagcccagtattttcacaaattccaggaccaaatcatgtagaaagcagatatttaactgaagatattgcatatggtttagtactatggtcaagcttaggtcgtgttattgatgtaccgacaccaaatatagatgcagtaattgtaattgcatcaaccattttagagagagacttctttgaggaaggcttaacagttgaagaaattggtttagataagcttgatttagaaaaatatttaaaataa

SEQ ID NO: 416198 - DNA, 1593 bp, Staphylococcus aureus
atgacactacttactgtaaatccattcgataatgttggattatcagccttagttgcagcagtacctattattttatttttattatgcttaaccgtttttaaaatgaaaggcatttatgcagcattgacaactttggttgttacattgattgtggctttatttgtatttgaattaccagcgcgtgtatcagcaggtgcgattacagaaggcgttgttgccggtattttcccaataggatatatcgttttaatggcagtttggttatataaagtttctattaaaacaggacaattttctattattcaagatagtattgcaagtatttcagaggaccaaagaatccaactattattaattggattttgtttcaacgcatttttagaaggtgcagcaggatttggtgtgccaattgcgatttgtgcagtattattaattcaacttggatttgaaccattaaaagcagcgatgttatgtttaattgctaatggtgcggcgggtgcctttggtgcaattggtttaccagttagtattattgatacgtttaacttaagtggaggcgttacaacattagatgttgcgagatactcagcattaacacttccaattttaaactttattattccatttgttttagtattcattgtagatggtatgaaaggtattaaagaaattttacctgtcattttaacagtgagtggtacatatactggattacaattattattaacaatattccatggtccagaactagcagacattattccatcactagcaacaatggtggtgttagcatttgtttgtcgtaaatttaaaccgaaaaacattttcagattggaagcgtctgaacataaaattcaaaaacgaacgcctaaagaaattgtctttgcttggagtccgttcgtaattttaactgcctttgtattagtatggagtgcaccattcttcaaaaaattattccaacctggaggtgcacttgaaagtttagtaataaaattgccaattccaaatactgtgagtgatttatcgcctaaaggaattgcgttgcgtctcgatttaattggtgcaactgggacagcgattttattaacagtaattattacaattttaattacgaagttaaaatggaaaagtgcaggtgctttattggtcgaagcaattaaagaattatggttaccgatccttacaatttcagctatcctagctattgctaaagttatgacatacggtggtttgactgtagcaattggacaaggtattgctaaagcgggagcaattttcccattattctctccagtattaggttggattggtgtgtttatgactggttcagttgtaaataacaatactttattcgcacctattcaagcgacagtggcacaacaaatttcaacaagcggttcattacttgtggcagctaacactgcaggtggtgtagcagcgaaacttatttcaccacaatcaattgccattgcgactgcagctgttaaaaaagttggtgaagaatctgcattattaaaaatgacgttaaaatacagtattatatttgttgcctttatttgtgtttggacgtttatactaacgttaatattctaa

SEQ ID NO: 416199 - DNA, 474 bp, Staphylococcus aureus
atgtctaaaatcaggtcttttacaatattaagtctacttatttacttagctatgatgtgctatacagtagtgacctattcaaaattaccaaccaaagtacctattcactataatttagcaggggatgctgataactttgctgataaatgggtactgcttttgataaatagcgcatttatagtgatttggcttatatttttcattgcaggtagatactatgaacgatttgccaaatggtcacattataatcatacaccacgtgaaattcgagcgattaaattatttttaagtacgttaaatttagagattatgagctatatgtctatcttcacagtattagaaatttggcaaatacaacaccatcatcaattaaatttactatggtttaatatgatatttatcattatcattggtttaacgcttgtcatattttgtttacttcctacaattcacaaaatgagagattctcaataa

SEQ ID NO: 416200 - DNA, 873 bp, Staphylococcus aureus; identical to SEQ ID NO: 405514

SEQ ID NO: 416201 - DNA, 1776 bp, Staphylococcus aureus
atgtattacagttatggaaattatgaagcatttgcgcgccctaaaaaacctgaaaatgtagaaaacaaatctgcttacttaatcgggtctgggttagcttcacttgcggcagcttgtttcttaattagggatggtcaaatggaaggttcgaagattcatattttagaagagttacctaaagcaggtggtagtcttgatggtgaaaatatgcctttaaaaggctatgttgtccgcggtggtcgtgaaatggagaaccactttgaatgtttgtgggacttattcagatctatcccttcattagaaatcgataacgcgtctgtattagatgagttctattggctaaacaaagaagaccctaactattctcgctgtcgtgttattgagaaacagggtcaacgtttagtcacagacggagacttcactttgactaaaacggcgattaaagaaattttagatttatgcttaacgaatgaagaagatttagatgatgtcaaaataacagatgtattttccgatgacttctttaattcaaacttttggatttactggaaaacgatgtttgcatttgaaccgtggcattctgctatggaaatgcgtcgttatctaatgcgattcgttcatcatattggtggtctcgcagacttttcagctttaaaattcactaaatataatcaatatgaatctttagtattacctatggttgaatatttaaaatcgcatggggttcaatttgaatacgatgtaaaagtagaagatattaaagtagatgttacgacaagtcaaaaaattgcccgagaaatattaattcaccgacatggcaaagcagagtcaattaaactgactgtagatgatcttgtctttgtgacaaacggtagtattacggaaagctctacgtatggtgataatgatacaccagcaccaccaactgacgaattaggtggtagttggacactatggaaaaatttagcgcgacaaagtcctgaatttggtaatcctgataagttttgccaaaatattcctaaaaaaagttggtttgtttcagcaacttctacaacaaacaataaagagattatcgatacaatagaaagtatttgtaaacgtgacccacttgcaggcaaaacagttacaggcggtattattacaatcaatgattctgcatggcaaatgagttttacaatcaatcgtcagcaacagtttaaagaccaacctgaaaatgaaatatctacatggatttatgccttatattcagatgtaaacggcgattatattaaaaagccaattacagaatgtagtggtaatgaaatatgccaagaatggctgtatcacttaggtgtatcaactgacaaaattgaagacttagcaaaacatgtatctaatacgattcctgtttatatgccatatatcacctcttatttcatgacgcgtgctatcggcgacagacctttagtcgtcccgcatcaatcacaaaatttatcatttattggtaactttgcagaaacagagcgagatactgtatttacaacagaatattcggttcgtactgccatggaagctgtttatcaattactaaatatagatcgtggtattccagaggtcatcaatagtacatttgatcttcgcgtcttaatggatgccgtatacgaactgaatgaccatcaagatttgcgcgagattactaaagattcgaaaatgcagaaactcgcattagcaggattccttaaaaagataaaaggtacgtacattgagacattattaaaagaacacaaattgttataa

SEQ ID NO: 416202 - DNA, 588 bp, Staphylococcus aureus
atgaaagagattgttattgcatcgaataatcaagggaaaataaatgactttaaagtaatatttccagattaccacgtaataggtatttcagaactaataccagattttgatgtggaagaaacaggatcaacatttgaagaaaatgctatattaaaatcagaagctgctgcaaaagcattgaataaaactgtcatagctgatgacagtggactagaagtttttgcattaaatggtgagccaggtatatactctgcacgttatgctggtgaaaataaaagcgatgaagcaaatattgaaaaattattaaataagcttggtaatacaactgatcgtcgtgcgcaatttgtttgtgtcataagtatgagtggccctgatatggaaacaaaagtatttaaaggtactgtttcaggtgaaattgcagatggaaaatatggcgaaaatggtttcggatatgatccgatattttatgtaccgaaattagataaaaccatggctcaactttcaaaagaacaaaaagggcaaattagtcatagacgaaatgcgattaatttacttcaagcttttcttgaaggtgaaaaaaatgtctaa

SEQ ID NO: 416203 - DNA, 201 bp, Staphylococcus aureus; identical to SEQ ID NO: 406357

SEQ ID NO: 416204 - DNA, 1539 bp, Staphylococcus aureus
atgtcgcaaactgaagagaaaaaaggaattggtcgtcgcgttcaagcattcggatcatttttgagtagtatgattatgccaaacattggtgcattcatcgcttggggtttcatcgcggccatttttatagataatggatggttacctaacaaagatttagctactttagcaggaccaatgattacttatttaatcccattattgatcgcatttagtggtggtcgtttaatttatgatttacgtggtggtatcatcgcagcaacagcaactatgggggtcatcgttgcattacctgatacaccaatgttacttggtgcaatgattatgggtccacttgttggttggttaatgaagaagaccgaccaattgattcaacctagaacgccacaaggttttgaaatgttatttaataacttttctgctggtattttaggatttatcatgacgattgcaggatttaaaattttagcaccacttatgaaatttattatgcatattttatcagtggcagttgaagcattagtacatgcacacctacttccacttgtaagtattttagtagagcctgcaaaaattgtatttttaaacaatgcgattaaccatggtgtattcacaccgcttggtgcagatcaagctgcaaaagctggtcaatcaattttatacacaattgaatctaaccctggaccaggtttaggtatcttacttgcttatatgatttttggaaaaggcactgcaaaagcaacgtcatatggtgctggaattatccacttcttaggtggtattcatgaaatttatttcccatatgtattaatgcgtcctttattatttatcgctgttattttaggtggaatgactggtgttgcaacttatcaagcaacaggatttggatttaaaagtcccgcgtcaccaggttcatttatagtttactgtttaaatgcacctagaggtgaattcttgcacatgttgctcggtgtcttccttgctgcacttgtatcattcgttgtagctgctttaattatgaagttcactagagaaccaaagcaggatttagaagctgcgacagctcaaatggaaaatactaaagggaaaaaatcaagcgttgcttctaagttagtatcttctgataaaaatgttaatacagaagaaaatgctagtggtaatgttagtgaaacatcttcatcagatgatgatcctgaagcgctattggataattacaacactgaagatgttgatgcacacaattacaataatataaatcatgttatttttgcctgcgatgcgggtatgggttctagtgcaatgggtgcaagcatgttacgtaataaatttaaaaaggcgggcattaatgatattacagttacaaatactgcgattaatcaattgccaaaagatgctcaattagttatcactcagaaaaaactaactgatcgtgctattaaacaaacaccaaatgccatccatatttcagtggataatttccttaattcaccaagatatgaagaacttttaaataatctaaaaaaagatgatcaagcataa

SEQ ID NO: 416205 - DNA, 243 bp, Staphylococcus aureus; identical to SEQ ID NO: 412684

SEQ ID NO: 416206 - DNA, 279 bp, Staphylococcus aureus
gtgctcattgaactacttacagacattgatttactgtctgatgcagataatgacccacttgtactgatagagtcacttactatctctgaagtactcatcgagtctgatgtacttgttgagacactttgtgatgctgctatgcttagtgatccagaaacagaaccacttgtgctcgtcgaatcgctcaatgattctgatgtactcatcgattttgaatcacttgtacttaatgatattgatgtactttgtgaatctgatttgcttgttgacgcactttga

SEQ ID NO: 416207 - DNA, 774 bp, Staphylococcus aureus
atgggtcaatttgaacgtacattaatcattgctgatgaaggtgcttctgtacattacgtagaaggttgtactgcaccagtttatacaactagttctttacactctgctgttgtggaaatcattgtgcataaagatgcgcacgttcgttatactacgattcaaaactgggcgaacaatgtatacaatttagttacaaaacgtacttttgtttatgaaaacggaaatatggaatgggtagatggtaacttaggttctaagttaacgatgaaatatccaaactgtgttcttttaggtgaaggtgcaaaaggtagtacattatctattgcatttgctggtaaaggacaagttcaagatgccggtgctaaaatgattcataaagcgccaaatacatcttcaacgattgtttctaaatctatttctaaaaatggtggtaaagttatttatcgcggtattgttcattttggacgtaaagcaaaaggtgctcgttcaaatattgaatgtgatacattaatcttagataacgaatcaacatcagatacaattccatataacgaagtattcaacgatcaaatatcattagaacatgaagccaaggtttcaaaagtttctgaagaacaattattttatctaatgagtcgtggtatttctgaagaagaagcgacagaaatgattgttatgggattcatcgaaccatttacaaaagaacttccaatggaatacgcggtcgaaatgaaccgtttaatcaagttcgaaatggaaggtagtattggatag

SEQ ID NO: 416208 - DNA, 774 bp, Staphylococcus aureus
gtgacattttatgatcctaaccatatcgatacagcaaacaaatttgctggcatcagttttcaacatctactaggtactgaccatttaggtagagatattttaactaggttaatttatgcgattagaccaagtttgttatatgtctttgttgcgctatttgtttctgtacttattggatctattttaggattcttatcaggatatttccaagggtttgttgacgccttaatcatgcgtgcgtgtgatgttatgttggcattcccaagttatgttgtaacgttagcattaattgcattgtttggaatgggtgccgaaaatattatcatggcatttattttgacgcgttgggcatggttctgtcgtgttatacgtacaagtgttatgcagtacactgcttctgaccatgtcagatttgctaaaacaatcggtatgaatgatatgaaaattattcacaaacatattatgccgttaacattagcagatattgctatcatctctagtagttcgatgtgttcaatgatcttgcaaatatctggcttttcatttttaggattaggtgtcaaagcgcctactgcagagtggggcatgatgcttaacgaagctagaaaagtgatgtttacacatcctgaaatgatgtttgcgccaggtattgccatagtgattatagtgatggcatttaacttcttatccgatgctttacaaattgctattgatccccgcatctcttctaaagataaacttcgttctgtgaaaaaaggagtggtgcaatcatga

SEQ ID NO: 416209 - DNA, 843 bp, Staphylococcus aureus
atgaaaagattgattgggttagttatcgtagcacttgtattattagcagcgtgtggtagtaacaatgataaaaaagtaacaattggtgtcgcatcaaatgacactaaggcttgggagaaggttaaagaattagctaaaaaagatgatattgatgtggagattaagcacttctccgattacaatttaccgaataaagcattaaacgatggtgatattgatatgaatgcattccaacattttgcatttttagatcagtataagaaggcacataaaggaacaaagatttcagcattgagtacaacagttttagcaccgttgggcatttactcagataaaattaaagatgtcaaaaaggttaaagatggtgctaaagttgtcattccaaatgatgtatcaaaccaagcacgtgcacttaaactattagaagcagctggtttaataaaactgaaaaaagatttcggattagcaggtacagtgaaagatataacgtcaaatccaaaacatttaaaaattactgcagtagatgcacaacaaactgcgcgtgctttatctgatgtcgatattgcagttattaataatggtgtagcaactaaagcgggtaaagatcctaaaaatgatccgatatttttagaaaaatcaaattcagatgctgtaaagccatatattaatattgttgcagttaatgacaaagacttggataacaaaacatatgctaaaatcgtagaattgtatcattcaaaagaagctcaaaaagcgttgcaggaagatgtcaaagatggagagaaacctgttaatttatctaaagatgagattaaggcaatagaaacgtcattagcaaaataa

SEQ ID NO: 416210 - DNA, 630 bp, Staphylococcus aureus
atgcatgatagcttaacgcctataggtggattaggaccaatggtattaatgatgctaaatgttgtatttggtggcgaaggcgtaggactcatgaatttattgatatttgtcttactgacggtgtttatatgcagtttggtggttggtaaaacaccagaatatttaaatatgccaattggcgcccgtgaaatgaaatgtattgtcttagtctttctcatacacccaattttaattttagtattttcagcacttgcttttatgattcctggagcaagtgaaagtataacgaatccgtcttttcatggtatttcacaagttatgtatgaaatgacatcagctgctgcgaacaatggatcagggtttgaaggactgaaagatgatacaacattctggaatatctctacaggaatcattatgttgctttctcgttatataccaattattttgcaattaatgattgcatcaagtttagtgaataaaaaatcataccatcaagataaatatacaatagcgattgataaaccttattttggcgtatcactaatcgtatttatcgttttactaagtggtttgacatttattccagtactattacttggtcctattggtgaatttttaactttaaaataa

SEQ ID NO: 416211 - DNA, 384 bp, Staphylococcus aureus
atggtgaataataaaatagtacctattgatccaattaatgataaaggtgtaaaaaaagaaatagaaaattttaagtttttctcacaatatggtgattttaaagaattaaaaaattataaaaatggagaggtttcatacaattctgaagcccctatctactcagcaaaatatcaactgaaaaataatgattataatgtaaagcaattacgtaaaagatatgatatatcaacagaaaaggctcccaaattgttgttgaaaggtactggagatttaaaaggttcatcaatcggacataaggacattgagtttacattcgtggagaatcaagaagagaatatattttttactgatagtttggagtttacctcaagtgagaactattag

SEQ ID NO: 416212 - DNA, 1191 bp, Staphylococcus aureus
atgtcagattcggctttagactctattttggatcaatacagtgaagatgcaaagaaaacacaaaaagattatgcatctcaatctaaaaaagacaaaaatgaaaaatctaatacaaagaatccacagttaccaacacaagatgaattgaaacataaatctaaacctgctcaatcattcaataacgatgttaatcaaaaggatacacgtgcaacatcattattcgaaacagatcctagtatatctaacaatgatgatagcggacaatttaacgttgttgactcaaaagatacacgtcaatttgtcaaatcaattgctaaagatgcacatcgcattggtcaagataacgatatttatgcgtctgtcatgattgcccaagcaatcttagaatctgactcaggtcgtagtgctttagctaagtcaccaaaccataatttattcggtatcaaaggtgcttttgaagggaattctgttccttttaacacattagaagctgatggtaataaattgtatagtattaatgctggattccgaaaatatccaagcacgaaagaatcactaaaagattactctgaccttattaaaaatggtattgatggcaatcgaacaatttataaaccaacatggaaatcggaagccgattcttataaagatgcaacatcacacttatctaaaacatatgctacagatccaaactatgctaagaaattaaacagtattattaaacactatcaattaactcagtttgacgatgaacgcatgccagatttagataaatatgaacgttctatcaaggattatgatgattcatcagatgaattcaaacctttccgcgaggtatctgatagtatgccatatccacatggccaatgtacttggtacgtatataaccgtatgaaacaatttggtacatctatctcaggtgatttaggtgatgcacataattggaataatcgagctcaataccgtgattatcaagtaagtcatacaccaaaacgtcatgctgctgttgtatttgaggctggacaatttggtgcagatcaacattacggtcatgtagcatttgttgaaaaagttaacagtgatggttctatcgttatttcagaatccaatgttaaaggattaggtatcatttctcatagaactatcaatgcagctgccgctgaagaattatcatatattacaggtaaataa

SEQ ID NO: 416213 - DNA, 645 bp, Staphylococcus aureus
ttggatgctattgatgatacgctatttcaatcaatcaataatcgtaatattaaagcgactacgattttagaacaaattgattacgcgacgtctattggtttgaatgtaaaagtaaatgttgttatacaaaaaggtattaacgatgatcaaatcataccaatgcttgaatattttaaagataaacatatagagattcgatttatagaatttatggatgttggtaatgataatggatgggatttcagtaaagttgtaactaaagatgaaatgcttacaatgatagagcagcactttgaaatcgatcctgtagaaccaaaatattttggggaagtagcaaaatattatcgccataaggataatggtgttcaatttggtttgattacaagtgtttcacaatcattttgttctacatgtacacgcgcaaggctgtcatcagatgggaagttttacggatgtttatttgcaactgtcgatggatttaacgttaaagcgtttattcgttctggcgtgaccgacgaagaattaaaagaacaatttaaagctttatggcaaataagagatgatcgatattcagatgagagaactgctcaaacagttgccaatcgtcaacgtaaaaagataaacatgaattatattggtggttaa

SEQ ID NO: 416214 - DNA, 849 bp, Staphylococcus aureus
atgataaacatcggattaacaggttggggtgatcactattcattatatgaagatttagaacgccaaaccgataaacttaaaacatatgctggacattttccggttgtcgaattagatgcgacatactatgcgatacaaccggaaagaaatatattgaaatggataaaagaaacgcctgatacatttgaatttgtggtcaaaattcatcaagcactcacattgcatgcagactacaaaacatttgcagatacaaggcaagaactatttgatcaatttaagaatatgttagagcccttacatacacagaaaaaattagcaatggtattggttcaatttccgccatggtttgactgcaatgcacaaaatatcaaatatattttgtatgtaagacagcaattacaagcatttccaatgtgtgtagaatttaggcatcaatcatggtttagtgatgcatttaaagaacaaacattggcatttttaacagaacatcaaatcattcatgcagtagttgatgaaccacaagtgaaagatggcagtgtacctttagtcaatcgaatcacaaatgaaattgcgtttgtacgttatcatggacgtaatcattacggttggactaagaaagatatgtcagatcaagaatggcgagatgtacgctatttatatgattataatgagcaagaattaatagacttggcacaaaaggcacaaatattagcacaaaaagctaagaaagtttacgtcatatttaacaataattctggtggtcatgcagcaaataatgccaaaacatatcagcgattattgaatatagaatatgaagggttagcaccacaacaattaaaattattttaa

SEQ ID NO: 416215 - DNA, 315 bp, Staphylococcus aureus
atgttcccattcgcatttttagcacaattaatttcagcaggtacacttgttgcatttatgttcgtttcattagcaatgtatcgtttgagaaagcgtgaaggtaaagatctaccaattcctgcatttaaattacctttatatcctgtgttaccagcaattacatttgttttagtattgctagtattctggggattaggattcgaagcgaaattatacactttaatttggtttattgttggtatcattctatatttaagttatggacttagacattctaagaaaaatgatgtagctgaataccacccaccaaaataa

SEQ ID NO: 416216 - DNA, 873 bp, Staphylococcus aureus
atgcgcaaacattatggtccgttattgaatggtttttatcatattccgtttccagataaatatcgtggtatgtacgagcagccacaagctaattcagtagaagaatatttagcacccttaaaagaaatgtttgcgaaatatgtacctgctgacgaagtagcatgtattgttattgaaacgatacaaggcgatggtggacttttagaaccagttccagggtattttgaagcgttagaaaagatttgtcgtgaacatggtattttaatcgctgtcgatgatattcaacaaggttttgggcgaacaggtacatggagttcagtctcgcattttaattttacgcctgatttaatcactttcggaaaatccttagcaggtggtatgcccatgtcagcaattgttggacgcaaagagattatgaattgtttagaagcaccagcacatttatttacaacaggtgctaatccagttagttgtgaagctgcattagccacaattcaaatgattgaagatcagtcgcttcttcaggctagtgcggaaaaaggggaatatgttaggaaacgaatggatcaatgggtatctaaatacaatagtgtaggcgatgttagaggtaaaggtctgagcattggtattgatattgtttccgacaaaaaactcaaaacacgtgatgccagtgcggcacttaaaatttgtaattactgctttgagcatggcgtagttattatagctgtagcaggaaatatgttgcgattccaaccgccattggtgataacatatgagcaattagacacggcgttaaacactatagaagatgcactgactgctttggaagcaggtaacttagatcaatatgacatatctggacaaggttggtaa

SEQ ID NO: 416217 - DNA, 936 bp, Staphylococcus aureus; identical to SEQ ID NO: 408543

SEQ ID NO: 416218 - DNA, 645 bp, Staphylococcus aureus
atgtatccgattaaaaatctagaggatttatacgataaagaaggctatcgtgatgatcaatttgataaaaacgataaaggcacatggattattaattctgaaatggttgttcaacctaaaggggaacgtatgaaatcaaaaggtatggttctatatatgaatagaaacactaagactacaaccgggaagtatatagtgagtgaaacacttcatgatgaagatggtagacctaagagtaaagataaagaatatccggttaaaatggtagacaataaaatcattccaactaaaggtatcaaagacgaaaatataaaaaaagaaatcgagaattttaagttcttcgcgcaatatggcagctttaaagatttgtcgaagtacaaagacggcgatatatcatataatccagaggtaccgagttattcagcaaaatatcaattaactaatgatgactataatgtaaaacaattacgaaaaagatataaaataccaacgaataaagcaccaaagttattgttgaaaggttcgggagacttaaaaggttcatcagttggatataaagacattgaatttacttttgtggagaaaaaaggtgaaaatactttttttactgatagtctacatcttgaaccaagtgaggataaataa

SEQ ID NO: 416219 - DNA, 288 bp, Staphylococcus aureus; identical to SEQ ID NO: 409126

SEQ ID NO: 416220 - DNA, 237 bp, Staphylococcus aureus
gtgccaagttattcagctaaatatcaattaactaatgatgattacaatgtaaagcaattacgtaaaagatatgacataccaacaaataaagcaccgaagttgttgttgaagggtacagggaatttaaaaggttcatcagttggatataaagacattgaatttacgtttgtagagaaaaaagaagagaacatttactttagtgatgggttaatttttaaaccaagtgaggataaataa

SEQ ID NO: 416221 - DNA, 468 bp, Staphylococcus aureus
atggaaatcatgggtcctaaaggtgaattatcaagaactttaaatgaaagaatgacattcaaacaagaagaaaacacaattgaagttgtaagaccatctgattctaaagaagatagaacaaaccatggtacaactcgtgctttattaaacaatatggtacaaggtgtttctcaaggatacgtaaaagtacttgaacttgttggtgtaggttaccgtgctcaaatgcaaggtaaagacttaatccttaacgttggttattctcacccagtagaaattaaagctgaagaaaacattactttctcagttgagaaaaacacagtcgttaaagttgaaggtatttcaaaagaacaagttggagcattagcatctaacatccgttcagtaagacctccagagccttacaaaggtaaaggtattcgttaccaaggtgaatacgttcgccgtaaagaaggtaaaactggtaaataa

SEQ ID NO: 416222 - DNA, 267 bp, Staphylococcus aureus
atggaacattactctcattatggctctgcttacttcatacatgaagatgttaaccaaaaactaatcgattcagtttatgaaaccattagttcttatagcaatacattcgattgtcgtgttgctatttctcaattgcctacacatggctttgcagttagaatttttgcttatcgcacacaaattatagagaaaatacttggaaccatccaaagctatatcgcagaaaatatttatgatcgtaaacttgattttctaagaaaatattaa

SEQ ID NO: 416223 - DNA, 330 bp, Staphylococcus aureus
gtgatttcttctttcgattcacctttactaataatttctccagttaatggattttttagtgttggtgtcgttattgtcttctcacctttttgtccttctcttgttactttttctgttcctggtgctaaatcaggattaaatttacgttctttcttgaatggaatttcttctttttctacaatcgagtctccttttacaggtccatattttgttacactatcgaccggtggtctaactacgtctcctgtttctggattcttaattcctggtttacctggaacttcttctttctctcctgttggtaacttcggatcaaattcgtctcgatga

SEQ ID NO: 416224 - DNA, 330 bp, Staphylococcus aureus; identical to SEQ ID NO: 413374

SEQ ID NO: 416225 - DNA, 1467 bp, Staphylococcus aureus
atgagtaatttagagaaatctgtagctataaatttagaaaatacagcgcattatgaaaatatttcaaatctagatataacttttagaacaggagagagtgattcttctgttcttctttttaatatcattaaaaataatcaaccgttattactgagtgaagaaaatatcaaagcacgaatagcgattcgaggtaaaggagtaatggtagttgctccactagaaatattagatccatttaaaggtattttaaaatttcaattacctaatgatgtaattaaaagagatggaagttatcaagctcaagtttcggttgcagaattaggtaattcagacgtggtagttgtagagagaactatcacatttaacgttgaaaaaagtttgtttagcaagattccctctgaaacaaaactacactatattgttgagtttcaagaattagaaaaaactattatggatcgcgcgaaagcaatggacgaggctataaaaaatggtgaggattatgcgagtctgattgaaaaagctaaagaaaaaggtctatcagatattcaaatagcaaaatcttcaagtattgatgaattaaagcaacttgctaatagccgtatatctgatttggaaaataaagcgcaagcatattcaagaacattcgatgagcaaaagcgatatatggatgagaaacatgaagccttcaagcagtcagtgaatagtggtggtttagtcacaagtggttctacttcaaattggcaaaaagctaagattactaaagatgatggtaagataatgcagattactggatttgattttaataatccagaacaaagaataggtgattcaacccaatttatttatgtttcgcaagctataaattatccaagagatgttagtactaacggtactgtcgaatatttagtagtaacttcagattacaagcgtatgacttatcgaccgaacggtacaaataaagtgtttgttaaaagaaaagaagcgggttcatggtctgagtggtcagaattagctattaatgattacaatacaccttttgaaactgttcaaagtgcccaatcaaaagctaatatggccgaaagtaacgctaaattatacgcagatgacaagtttaataaaaggtattcggttatttttgatggaacagcaaatggtgtgggctctacattgtacttaaatgagagtttagaccaatttattttattaattttttatgggacttttccaggtggtgactttacagagtttggcagtccttttggaggaggaaagatttcattgaatccctcaaatcttccagatggtgatggaaatggtggaggtgtttatgagtttggattaactaaatctagtcgtacatctttaactatatcaaacgatgtctatttcgacttaggaagtcaaagaggctctggtgcgaacgcaaatagagggacaattaacaaaattataggagtgagaaaataa

SEQ ID NO: 416226 - DNA, 1911 bp, Staphylococcus aureus
atggaaaatttgtatttaataaaggatttgggagctttagcaggtcgagattatagagctaaggaaatacaaaacttacaaagaatagagcaatttgcgcttggcttgacaacagagtttaagttgcatcagaaagctaaaacaattcaacacttcgctgagcaaatttattataatggtagatcgcaagcagcagtaaacaaatctttacaaagtcaaattaacgcacttgttgtggcaccacgtaataacagtgctaatgagattgttcaagctcgagttaatgtaaacggcgaaacctttgacacattaaaagaacatttagacgattgggaaaccaaaactcaaattaataaagaggaaactataagagaattaaataagaccaaacaagaaattcttgatatcgagtatcgttttgaacctgataagcaagaatttttatttgtgacagaacttgcacctcttacaaatgcagtaatgcaatccttctggtttgataatagaacaggcatagtatacatgacacaagctagaaataatggctatatgctaagtcgtctaagacctaatggtcaatttatagacagctcattgattgtaggtgggggtcatggtacacataacggttatagatatattgatgatgagttatggatttatagttttatcttaaatggtaataatgagaatacattagttcgtttcaagtatacgcctaatgtggaaattagctatggcaagtatggtatgcaagatgtatttacaggacacccagaaaaaccctacatcacccctgtcataaatgaaaaagaaaataaaattctatacagaattgagagacctagaagtcagtgggaacttgaaaactcaatgaattatatagagataagaagtttagatgatgttgataaaaatattgataaagttttgcataaaatcagtatccctatgagactaacaaacgaaacccaaccaatgcagggtgtgacttttgatgaaaaatacttgtattggtatacaggagacagtaatccaaataatagaaactatttaacagctttcgatttagaaacaggagaagaagcgtatcaggttaatgctgactatggtggaacactagattcatttcctggcgaatttgcggaagcagaaggtttgcaaatatactatgacaaagatagtggtaaaaaagctttgatgctaggtgttactgtcggtggtgatggaaatagaacacatcgtattttcatgattgggcaaagaggtattttagaaatacttcactcaagaggcgttccttttatcatgagtgacacaggtggtagagttaaacctttaccaatgaggcctgataaacttaagaatcttgggatgttaacagagccaggtctttactatttatacactgatcatacagttcaaatcgatgatttcccattaccaagagaatggcgtgatgcaggttggttcttggaagttaagccaccacaaactggcggtgatgtaattcagatattgacgcgtaatagttatgcaaggaatatgatgacttttgaaagggttctttctggaagaactggagacatttcggactggaattatgtgcctaaaaatagtggtaaatgggagagagtaccttcattcatcacaaaaatgtcagatattaacatagtaggtatgtcgttttatttaactacggatgatacaaaacgttttacagattttccaactgaacgtaaaggggtagctggttggaacttatatgtagaagcttctaacacaggtggttttgttcataggctagttcgtaatagtgttacagcatcttgtgaaatattattgaagaactatgatagtaaaacaagttcagggccatggactttacacgaagggagaattataagttaa

SEQ ID NO: 416227 - DNA, 291 bp, Staphylococcus aureus
atggcaacagaagaagttaaaatcaaagcgctacttgaaaacgataaacagtactttccagctacacattggaaagctataaatgggataccttatgcaggcagtagtgatattgatggattgcctcaagacggtatcatttcggtagatgataaaaataaattagataatttaaaaataggcgaagcaggaattattcaaaatagcattgtacagaaatccccaaacggtaaattgtggaaaataacagttgacgatagtgggaaacttggtacagtgctattttattag

SEQ ID NO: 416228 - DNA, 1584 bp, Staphylococcus aureus
atggattatcatgatcatttatcagtaatggattttaatgaattgatttgtgaaaatttactagatgtagattatggttcttttaaagaatattatgaactgaatgaagctaggtacatcacttttacagtttatagaactactcataatagttttgtttttgatttattgatttgtgaaaacttcataatttatcatggtgaaaaatatacaattaagcagacagcgccaaaggttgaaggtgataaagtttttattgaagttacggcatatcacataatgtatgaatttcaaaatcactcagtggaatcaaataagcttgatgacgacagtagcgaaactggtaaaacgccagaatactctttagatgagtacttaagatatggatttgcaaatcaaaaaacttcggtcaaaatgacctataaaataattggagattttaagcgaaaagtaccgattgacgaattaggtaacaaaaacggcttagaatactgtaaagaagcggtagacctgtttggctgtataatttacccaaatgatacagagattggtttttattctcctgaaacattttatcaaagaagcgagaaagtgattcgatatcaatataatactgatactgtatctgcaactgtcagtacattggaattaagaacagctataaaagtttttggaaaaaagtatacagctgaggaaaagaaaaattataatcctattagaacaactgacattaaatattcaaatggttttataaaagaaggtacttatcgtaccgaaacaattgggtctaaagctactattaactttgattgcaagtatggtaatgaaacagttagatttacaataaaaaagggctctcaaggtggaatatataagttgattttagacggcaagcaaattaagcaaatttcttgttttgctaagtcggttcagtctgaaacaatagatttaataaaaaatattgataaaggcaagcacgttttagaaatgatatttttaggagaagaccccaaaaatagaattgatatatcttcaaataaaaaagctaagccttgtatgtatgttggaactgaaaaatcaacagtcttaaatttaattgctgataattcaggtcgcaatcaatacaaagcaattgtcgactacgtcgcagatagtgcaaagcagtttgggattcgatatgctaatacgcaaacaaatgaagatatcgaaacacaggataagctgttagaatttgcaaaaaagcaaataaatgatactcctaagactgaattagatgttaattatataggttatgaaaaaatagagccaagagatagcgtattttttgttcatgaattaatgggatataacactgaattaaaggttgttaaacttgataggtcacatccatttgtaaacgcaatagatgaagtgtctttcagcaatgaaataaaggatatggtacaaattcaacaagcgcttaacagacgaattattgcacaagataatagatataactatcaagcaaatcgtataaatcatttatacactagtactttgaattctcctttcgagacaatggatatagggagtgtattaatataa

SEQ ID NO: 416229 - DNA, 825 bp, Staphylococcus aureus
atgcaatcttttgtaaaaatcatagatggttacaaggaagaagtaataacagattttaatcagcttatatttttagatgcaagggctgaaagtccaaacaccaatgataacagtgtaactattaacggagtagatggtattttaccgggcgcaattagttttgcgcctttttcattagtattaaggtttggctatgatggtatagatgttatagatttaaatttatttgagcattggtttagatctgtgtttaatcgcagacatccttattatgttattacttctcaaatgcctggtgttaaatatgcagtgaatacagctaatgttacatctaatttaaaagatggttcttcaactgaaattgaagtaagtttaaatgtttataaagggtattctgaatcagttaattggaccgatagcgagttcttattcgactctaattggatgtttgaaaatggaattcctcttgatttcacacctaaatatactcatacatcaaatcaatttactatttggaacggttctactgatacgataaatccacgattcaagcacgatttgaaaatattaattaatttaaatgcgagtggaggatttgaactggttaactatacaacaggtgatatttttaagtacaacaaaagtatagataaaaacactgattttgttttagatggtgtgtatgcatatcgagatataaatagagtgggaattgatacaaatagaggcattataacattagcgccaggtaaaaatgaatttaagattaaaggagacatcagtgatattaaaactacatttaagtttccttttatttataggtag

SEQ ID NO: 416230 - DNA, 6201 bp, Staphylococcus aureus
atgaatgaaaaagtagaaggcatgaccttggagctgaaattagaccatttaggtgtccaagaaggcatgaagggtttaaagcgacaattaggtgttgttaatagtgaaatgaaagctaatctgtcatcatttgataagtctgaaaaatcaatggaaaagtatcaggcgagaattaaggggttaaatgataagcttaaagttcaaaaaaagatgtattctcaagtagaagatgagcttaaacaagttaacgctaattatcaaaaagctaaatctagtgtaaaagatgttgagaaagcatatttaaagctagtagaagctaataaaaaagaaaaattagctcttgataaatctaaagaagccttaaaatcttcgaatacagaacttaaaaaagctgaaaatcaatataaacgtacaaatcaacgtaaacaagatgcatatcaaaaacttaaacagttgagagatgcagaacaaaagcttaagaatagtaaccaagctactactgcacaactaaaaagagcaagtgacgcagtacagaagcagtccgctaagcataaagcacttgttgaacaatataaacaagaaggcaatcaagttcaaaaactaaaagtacaaaatgataatctttcaaaatcaaacgaaaaaatagaaaattcttacgctaaaactaatactaaattaaagcaaacagaaaaagaatttaatgatttaaataatactattaagaatcatagcgctaatgtcgcaaaagctgaaacagctgttaacaaagaaaaagctgctttaaataatttagagcgttcaatagataaagcttcatccgaaatgaagacttttaacaaagaacaaatgatagctcaaagtcatttcggcaaacttgctagtcaagcggatgtcatgtcaaagaaatttagttctattggagataaaatgacttccctaggacgtacgatgacgatgggcgtatctacaccgattactttagggttaggtgcagcattaaaaacaagtgcagacttcgaagggcaaatgtctcgagttggagcgattgcacaagcaagcagtaaagacttaaaaagcatgtctaatcaagcggttgacttaggcgctaaaacaagtaaaagtgctaacgaagttgctaaaggtatggaagaattggcagctttaggctttaatgccaaacaaacaatggaggctatgccgggtgttatcagtgcagcagaagcaagcggtgcagaaatggctacaactgcaactgtaatggcatcagcaattaattctttcggtttaaaagcatctgatgcaaaccatgttgctgatttacttgcgagatcagctaatgatagtgctgcagatattcaatacatgggagatgcattaaaatatgcaggtactccagcaaaagcattaggagtttcaatagaggacacttctgcagcaattgaagttttatctaactcagggttagaggggtctcaagcaggtactgcattaagagcttcgtttattaggctagctaatccaagtaaaagtacagctaaggaaatgaaaaaattaggtattcatttgtctgatgctaaaggtcaatttgttggcatgggtgaattgattagacagttccaagacaacatgaaaggcatgacgagagaacaaaaactagcaacagtggctacaatagttggcactgaagcagcaagtggatttttagccttgattgaagcgggtccagataaaattaatagctatagcaaatcattgaagaactctaatggtgaaagtaaaaaagcagctgatttgatgaaagacaacctcaaaggtgctctggaacaattaggtggcgcttttgaatcgttagcaattgaagttggtaaagatttaacgcctatgattagagcaggtgcggaaggattaacaaaattagttgatggatttacacatcttcctggttggtttagaaaggcttcggtaggtttagcgatttttggtgcatctattggccctgctgttcttgctggtggcttattaatacgtgcagttggaagcgcggctaaaggctatgcatcattaaatagacgcattgctgaaaatacaatactgtctaataccaattcaaaagcaatgaaatctttaggtcttcaaaccttatttcttggttctacaacaggaaaaacgtcaaaaggctttaaaggattagccggagctatgttgtttaatttaaaacctataaatgttttgaaaaattctgcaaagctagcaattttaccgttcaaacttttgaaaaacggtttaggattagccgcaaaatccttatttgcagtaagtggaggcgcaagatttgctggtgtagccttaaagtttttaacaggacctataggtgctacaataactgctattacaattgcatataaagtttttaaaaccgcatatgatcgtgtggaatggttcagaaacggtattaacggtttaggagaaactataaagttttttggtggcaaaattattggcggtgctgttaggaagctaggagagtttaaaaattatcttggaagtataggcaaaagcttcaaagaaaagttttcaaaggatatgaaagatggttataaatctttgagtgacgatgaccttctgaaagtaggagtcaacaagtttaaaggatttatgcaaaccatgggcacagcttctaaaaaagcatctgatactgtaaaagtgttggggaaaggtgtttcaaaagaaacagaaaaagctttagaaaaatacgtacactattctgaagagaacaacagaatcatggaaaaagtacgtttaaactcgggtcaaataacagaagacaaagcaaaaaaacttttgaaaattgaagcggatttatctaataaccttatagctgaaatagaaaaaagaaataaaaaggaactcgaaaaaactcaagaacttattgataagtatagtgcgttcgatgaacaagaaaagcaaaacattttaactagaactaaagaaaaaaatgacttgcgaattaaaaaagagcaagaactcaatcagaaaatcaaagaattgaaagaaaaagctttaagtgatggtcagatttcagaaaatgaaagaaaagaaattgaaaagcttgaaaatcaaagacgtgacatcactgttaaagaattgagtaagactgaaaaagagcaagagcgtattttagtaagaatgcaaagaaacagaaatgcttattcaatagacgaagcgagcaaagcaattaaagaagcagaaaaagcaagaaaagcaagaaaaaaagaagtggacaagcaatatgaagatgatgtcattgctataaaaaataacgtcaacctttctaagtctgaaaaagataaattattagctattgctgatcaaagacataaggatgaagtaagaaaggcaaaatctaaaaaagatgctgtagtagacgttgttaaaaagcaaaataaagatattgataaagagatggatttatccagtggtcgtgtatataaaaatactgaaaagtggtggaatggccttaaaagttggtggtctaacttcagagaagaccaaaagaagaaaagtgataagtacgctaaagaacaagaagaaacagctcgtagaaacagagaaaatataaagaaatggtttggaaatgcttgggacggcgtaaaaactaaaactggcgaagcttttagtaaaatgggcagaaatgctaatcattttggcggcgaaatgaaaaaaatgtggagtggaatcaaaggaattccaagcaaattaagttcaggttggagctcagccaaaagttctgtaggatatcacactaaggctatagctaatagtactggtaaatggtttggaaaagcttggcaatctgttaaatcgactacaggaagtatttacaatcaaactaagcaaaagtattcagatgcctcagataaagcttgggcgcattcaaaatctatttggaaagggacatcaaaatggtttagcaatgcatataaaagtgcaaagggctggctaacggatatggctaataaatcgcgctcgaaatgggataatatttctagtacagcatggtcgaatgcaaaatccgtttggaaaggaacatcgaaatggtttagtaactcatacaaatctttaaaaggttggactggagatatgtattcaagagcccacgatcgttttgatgcaatttcaagttcggcatggtctaacgctaaatcagtatttaatggttttagaaaatggctatcaagaacatatgaatggattagagatattggtaaagacatgggaagagctgcggctgatttaggtaaaaatgttgctaataaagctattggcggtttaaatagcatgattggcggtattaataaaatatctaaagccattactgataaaaatctcatcaagccaatacctacattgtctactggtactttagcaggaaagggtgtagctaccgataattcgggagcattaacgcaaccgacatttgctgtattaaatgatagaggttctggaaacgccccaggtggtggagttcaagaagtaattcacagggctgacggaacattccatgcaccccaaggacgagatgtggttgttccactaggagttggagatagtgtaataaatgccaatgacactctgaagttacagcggatgggtgttttgccaaaattccatggtggtacgaaaaagaaagattggctagaccaacttaaaggtaatataggtaaaaaagcaggagaatttggagctacagctaaaaacacagcgcataatatcaaaaaaggtgcagaagaaatggttgaagcagcaggcgataaaatcaaagatggtgcatcttggttaggcgataaaatcggcgatgtgtgggattacgtacaacatccagggaaactagtaaataaagtaatgtcaggtttaaatattaattttggaggcggagctaacgctacagtaaaaatagctaaaggcgcatactcattgctcaaaaagaaattagtagacaaagtaaaatcgtggtttgaagatttcggtggtggaggcgatggaagctatctatttgaatatccaatctggcaaagatttggacgctacacaggtggacttaactttaatggcggtcgtcactatggtatagactttggtatgccttctggaacaaacgtttatgccgttaaaggtggtatagcagataaggtatggactgattacggtggcggtaattctatacaaattaagaccggtgctaacgaatggaactggtatatgcatttatctaagcaattagcaagacaaggccaacgtattaaagctggtcaactgatagggaaatcaggtgctacaggtaatttcgttagaggagcacacttacatttccaattgatgcaagggtcgcatccagggaatgatacagctaaagatccagaaaaatggttgaagtcacttaaaggtagtggcgttcgaagtggttcaggtgttaataaggctgcatctgcttgggcaggcgatatacgtcgtgcagcaaaacgaatgggtgttaatgttacttcgggtgatgtaggaaatatcattagcttgattcaacacgaatcaggaggaaatgcaggtataactcaatctagttcgcttagagacatcaacgttttacagggcaatccagcaaaaggattgcttcaatatatcccacaaacatttagacattatgctgttagaggtcacaacaatatatatagtggttacgatcagttattagcgttctttaacaacagatattggcgctcacagtttaacccaagaggtggttggtctccaagtggtccaagaagatatgcgaatggtggtttgattacaaagcatcaacttgctgaagtgggtgaaggagataaacaggagatggttatccctttaactagacgtaaacgagcaattcaattaactgaacaggttatgcgcatcatcggtatggatggcaagccaaataacatcactgtaaataatgatacttctacagttgaaaaattgttgaaacaaattgttatgttaagtgataaaggaaataaattaacagatgcattgattcaaactgtttcttctcaggataataacttaggttctaatgatgcaattagaggtttagaaaaaatattgtcaaaacaaagtgggcatagagcaaatgcaaataattatatgggaggtttgactaattaa

SEQ ID NO: 416231 - DNA, 159 bp, Staphylococcus aureus; identical to SEQ ID NO: 406375

SEQ ID NO: 416232 - DNA, 351 bp, Staphylococcus aureus
atgattaaatttgaaattaaagaccgtaaaacaggaaaaacagagagctatacaaaagaagatgtgacaatgggcgaagcagaaaaatgctatgagtatttagaattagtaaatcaagagaataaaaaagaagtacctaacgcaacaaaaatgagacaaaaagagcgacagttattagtagatttatttaaagatgaaggattgactgaagaagatgttttgaacaagatgagcactaaaacttatacaaaagccttgaaagatatatttcgagaaatcaatggtgaagatgaagaagattcagaaactgaaccagaagagatgggaaagacagaagaacaatctcaataa

SEQ ID NO: 416233 - DNA, 456 bp, Staphylococcus aureus
atgactaaaactttaaaggtttataaaggagacgacgtcgtagcttctgaacaaggtgaaggcaaagtgtcagtaactttatctaatttagaagcggatacaacttatccaaaaggtacttaccaagtggcatgggaagaaaatggtaaagaatctagtaaagttgatgtacctcaattcaaaaccaatccaattctagtctcaggcgtatcatttacacccgaaactaaatcaatcacggtaaatgctgatgacaatgttgaaccaaacattgcaccaagtacagcaacgaataaaacgttgaaatatacaagtgaacatccagagtttgttactgttgatgagagaacaggagcaattcacggtgtagctgagggaacttcagttatcactgctacgtctactgacggaagtgacaagtctggacaaattacagtaacagtaacaaatggataa

SEQ ID NO: 416234 - DNA, 642 bp, Staphylococcus aureus
atggcagaaggacaaggttcttataaagtaggttttaaaagattatacgttggagtttttaacccagaagcaacaaaagtagttaaacgcatgacatgggaagatgaaaaaggtggtacagttgatctaaatatcacaggtttagcaccagatttagtagatatgtttgcatctaacaaacgtgtttggatgaaaaaacaaggtactaatgaagttaagtctgacatgagtatttttaatattccaagtgaagatctaaatacagttattggtcgttctaaagataaaaatggtacatcttgggtaggagagaatacaagagcaccatacgtaacagttattggagaatctgaagatggtttaacaggtcaaccagtgtacgttgcgctacttaaaggtacttttagcttggattcaattgaatttaaaacacgaggagaaaaagcagaagcaccagagccaacaaaattaactggtgactggatgaacagaaaagttgatgttgatggtactccacaaggtattgtatacgggtatcatgaaggtaaagaaggagaagcagaattcttcaaaaaagtattcgttggatacacggacagtgaagatcattcagaggattctgcaagttcgttacccagctaa

SEQ ID NO: 416235 - DNA, 396 bp, Staphylococcus aureus
atgaatatattaaacaccataaaagaaattttattatctgatgcagagctccaaacatatataaattctagaatatactattataaagtcactgaaaatgctgaaacttccaaaccttttgttgttattacacctatttatgatttaccttcagacttcatgtctgataaatatcttagtgaagaatacttaattcaaatagatgtagaatcttcaaataatcagaaaacaattgatataacaaaacgaataagatatctgttatatcaacaaaatttaagtcaagcatctagtcagttagatgcttattttgaagaaactaaacgttatgtgatgtcgagacgttatcaaggcataccaaaaaatatatattataaaaatcagcgcatcgaatag

SEQ ID NO: 416236 - DNA, 402 bp, Staphylococcus aureus
atgagtgtagaaattaaagggatacctgaagtgttgaagaaattagaatcggtatacggtaaacaatcaatgcaagctaagagtgatagagctttaaatgaagcatctgaattttttataaaggctttaaagaaagaattcgagagttttaaagatacgggtgctagcatagaagaaatgactaaatctaagccttatacaaaagtaggaagtcaagaaagagctgttttaattgaatgggtaggccctatgaatcgcaaaaacattattcacttgaatgaacatggttatacaagagatggaaaaaaatatacaccaagaggttttggagttattgcaaaaacattagctgctaatgaacggaagtatagagaaattataaaaaaggagttggccagataa

SEQ ID NO: 416237 - DNA, 333 bp, Staphylococcus aureus
atggaatttaatgaatttaaagatcgcgcatatttttttcaatatgtaaataaagggccgtatccagatgaagaggaaaaaatgaagttgtatagttgcttttgtaaaatatataatccttctatgaaagatagagaaattttaaaagcgactgaatcaaagtcaggactaaccataattatgaggtcttctaaaattgaatatctaccacaaacaaatcacttagttaaaattgacagaggcttatattccgataaattattcaacattaaagaaataagaattgatacaccagatattggctataatacagtggttttatcagaaaaatga

SEQ ID NO: 416238 - DNA, 279 bp, Staphylococcus aureus
atgagtttagaagaaattaaattgtggttgagaattgactataatttcgaaaatgatttaattgaaggtctcattcaatcggctaagtctgaattactattaagtggggttccagattatgacaaagatgacttggaatacccgcttttttgtacagcgattagatatatcattgcaagagattatgaaagtcgtgggtactcaaatgaccaatctagaagcaaggtttttaatgaaaagggattgcaaaaaatgattctgaaattaaaaaagtggtag

SEQ ID NO: 416239 - DNA, 1164 bp, Staphylococcus aureus
atgccgacattatatgaattaaaacaatccttaggtatgattggacaacaattaaaaaataaaaatgatgaattgagtcagaaagcaacagacccaaatattgatatggaagacatcaaacaactagaaacagaaaaagcaggcttacaacaaagatttaacattgttgaaagacaagtaaaagacattgaagaaaaagaaaaagcgaaagttaaagacacaggagaagcttatcaatctttaaatgatcatgagaagatggttaaagctaaggcagagttttatcgtcacgcgattttaccaaatgaatttgaaaaaccttcaatggaggcacaacgtttattacacgctttaccaacaggtaatgattcaggtggtgataagctcttaccaaaaacactttctaaagaaattgtttcagaaccatttgctaaaaaccaattacgtgaaaaagctcgtctaactaacattaaaggtttagagattccaagagtttcatatactttagacgatgatgacttcattacagatgtagaaacagcaaaagaattaaaattaaaaggtgatacagttaaattcactactaataaattcaaagtatttgctgcaatttcagatactgtaattcatggatcagatgtagatttagtaaactgggttgaaaacgcactacaatcaggtctagcagctaaagaacgtaaagatgccttagcagtaagtcctaaatctggattagatcacatgtcattttacaatggatctgttaaagaagttgagggagcagacatgtatgatgctattattaacgctttagcagatttacatgaagattaccgtgataacgcaacaatttatatgcgatatgcggattatgtcaaaattattagtgttctttcaaatggaacaacaaatttctttgacacaccagcagaaaaagtatttggcaaaccagtagtatttacagatgcagcagttaaacctattgtgggagatttcaattattttggaattaactatgatggaacaacttatgacactgataaagatgttaaaaaaggcgaatatttgtttgtattaactgcatggtatgatcagcaacgtacattagacagtgcattcagaattgcaaaagcaaaagaaaatacaggttcattacccagctaa

SEQ ID NO: 416240 - DNA, 774 bp, Staphylococcus aureus
atgtcaaagaaagctaagtattttcaaatgaaaagaaaatcaaaaagtaaaggcgaaatatttatttatggtgatattgtaagtgataaatggtttgaaaatgatgtgactgctacagatttcaaaaataaactagatgatctaggagacatcagtgaaatagatgttcatataaattcatctggaggcagtgtatttgaagggcatgcaatatacaatatgctaaaaatgcatcctgcaaaaattaatatctatgtcgatgccttagcggcatcaattgcaagtgttatcgctatgagtggtgatgctatttttatgcacaaaaatagttttttaatgattcacaactcatgggttatgactgtaggtaatgcagaagaattaagaaagacagcggatttacttgataaaacagatgctgttagtaattcagcgtatttggataaagcaaaaaacttagatcaagaacaattaaagcagatgttagatgcagaaacatggcttactgctgaagaagccttatcttttggcttaatagatgaagttttaggagctaatgaaatagctgctagtatctctaaagagcagtataagcgtttcgagaacgtcccggaagatttaaagaaagatgtagacaaaatcacaaaaattgatgatgtagatacatctgaattggttgaaacacctaaagaaagtatgtcactagaagaaaaagaaaaaagagaaaaaattaaacgcgaatgcgaaattttaaaaatgacaatgagttattag

SEQ ID NO: 416241 - DNA, 1239 bp, Staphylococcus aureus
gtgaatgttatcgcaaaagagaatattgtcacacgcataaagaaaaaattgatagacaattggattgatcagtcaacttctaagctttatgactttagcccatggaaaaatagatctttttggggtgtaattaataatacgcttgaaactaatgaaacgatattttcagctattacaaagttatctaattcgatggctagtttgcccttgaaaatgtatgaagattataaagtagttaatacagaagtatctgatttacttacagtgtcaccgaataattctctgagcagttttgattttattaatcaaattgaaacaatcagaaatgaaaaaggtaatgcatatgtgctaattgaacgagacatctatcatcaaccatcaaagcttttcttattaaatccagatgttgttgaaatgttaattgaaaaccaatcacgtgaactttattattccattcatgctgcaactggaaataaattgattgttcataatatggacatgttgcattttaaacacatcgtggcatctaatatggtgcaaggcattagtccgattgatgtgttgaagaatacaactgattttgataatgcagtaagaacctttaatcttacagaaatgcaaaaacctgattctttcatgcttaaatacggttccaatgtaagtacagaaaaaaggcaacaagtattagaagattttaaacaatactacaaagaaaatggtggaatattattccaagagccgggtgttgaaatcgaaccgctacctaaaaaatatgtctctgaagatatagtagcaagtgaaaatttaacaagagaaagagtagctaacgtttttcaattgccctcagtatttttaaacgcaaaatcaaacacaaattttgcgaaaaatgaagagttaaacagattttacttacagcataccttattgccaatcgtcaaacagtatgaagaagaatttaatcgaaaactacttactaaaacagatagagaaaaaaataggtattttaaatttaacgttaaatcttatttaagggctgatagtgcaacacaagcagaagtgtactttaaagcagttcgtagtggctattacactataaatgacattagagagtgggaggatttaccaccagttgaaggtggagacaagccactaataagcggagacctgtatccgattgacacgccacttgaattaagaaaatctttgaaaggtggtgataaaaatgtcaaagaaagctaa

SEQ ID NO: 416242 - DNA, 1692 bp, Staphylococcus aureus
gtgactattaaagttttaaatgaaccttcaccaaaactattaacaacatggtatgcagagcaagtcactcaagggaaaataaaaacaagcaaatatgttagaaaagaatgtgagagacatcttagatatctagaaaatggaggtaaatgggtatttgatgaagaattagcgcatcgtcctattcgatttatagaaaagttttgtaaaccttccaaaggatctaaacgtcaacttgtattacagccatggcaacattttattatcggcagtttgtttggttgggttcataaagaaacaaaactgcgcaggtttaaagaagctttgatatttatggggcgaaaaaatggtaaaacaaccactatttctggggttgctaactatgctgtatcacaagatggagaaaatggtgcagaaattcatttgttagcaaacgtaatgaaacaagctaggattctatttgatgaatctaaggcgatgattaaagctagcccaaagcttgataaaaatttcagaacattaagagatgaaatccattatgacgcaacgatatcaaaaattatgccccaagcatcagatagcgataagttagatggattgaatacacacatggggatttttgatgaaattcatgaatttaaagactataaattgatttcagttataaaaaactcaagagctgcaaggttacaacctcttctcatctacattacgacagcagggtatcaattagatggtccacttgttgatatggtagaagcgggaagagacaccttagatcaaatcatagaagacgaaagaactttttattatttagcatctttggatgatgacgatgatattaatgattcgtcgaactggataaaagcaaatcccaacttaggtgtctctataaatttagatgagatgaaagaagagtgggaaaaagctaagagaacaccagctgaacgtggagattttataaccaaaaggtttaatatctttgctaataatgacgagatgagttttattgattacccaacactccaaaaaaataatgaaattgtttctttagaagagctggaaggcagaccgtgcacgattggttatgatttatcagaaacagaggactttacagccgcgtgtgctacttttgcgttagataatggtaaagttgcagttttatcgcattcatggattcctaagcacaaagttgaatattctaacgaaaaaataccctatagagaatgggaagaagatggcttattaacagtgcaagataagccttatattgactaccaagatgttttaaattggataattaagatgaatgagcattatgtagtagaaaaaattacttatgatagagcgaacgcattcaaactaaatcaagagttaaaaaattacgggtttgaaacggaagaaacaagacaaggagctttgaccttgagccctgcattgaaggatttaaaagaaatgtttttagatgggaaaataatatttaataataatcctttaatgaaatggtatatcaataatgttcagttgaaactagacagaaacggaaactggttgccgtctaagcaaagcagatatcgtaaaatagatggctttgcagcatttttaaacacatatacagatattatgaataaagttgtttctgatagtggtgaaggaaacatagagtttattagtattaaagacataatgcgttaa

SEQ ID NO: 416243 - DNA, 306 bp, Staphylococcus aureus
atgaagttaacaaaaaaacagctaaaagaatatatagaagattacaaaaaatctgatgacatattaattaatttgtatatagaaacatatgaattttattgtcggttaagagatgaacttaaaaatagtgatttaatgatagagcatacaaacaaggctggtgcgagcaatattattaagaatccattaagcatagaactgacaaaaacagttcaaacactaaataacttactcaagtctatgggtttaactgcagcacaaagaaaaaagatagttcaagaagaaggtggattcggtgactattaa

SEQ ID NO: 416244 - DNA, 315 bp, Staphylococcus aureus
atgaccaagcataataacatttataagcatggtcgtaagtcatatcaatacgattggttctatcattcaaaagcatggaagaagttaagagagatagcattagatagagataattatctttgtcaaatgtgtttacgcgaagatattgtaacagatgcaaacattgtacatcacattatttatgttgatgaagattttaacaaagctttagacttagataatctaatgtcagtttgttatagctgtcataacaaaattcatgcaaatgataatgacaaaagtaatcttaagaaaattagagttctaaaaatttaa

SEQ ID NO: 416245 - DNA, 438 bp, Staphylococcus aureus
atggggaacacaatatatgatatcaagccaggaacatttaaatatattgaatcagaaatatataatttaaatgagaacaagaaagaaataaaaagattgaggttggaaatacttaatccaacgaaggaacaagattccaatattgtatatggaccattacaaaaaggcgaaccagttagaacaactgaactaatggcaactagattattaactaataagatgttacgaaaccttgaagaaatggtcgaagcagttgagagtgaatacttaaagttgcctgaagatcataagaaagtaataaggctcaagtattggaataaagaaaagaagttaaagatggaacagataggacatgaatgccatatgcatcgtaatactgttactactatacgaaagaactttgttaaagcggtagcgtatcatgcaggtatcaaataa

SEQ ID NO: 416246 - DNA, 1359 bp, Staphylococcus aureus
ttggcgattgacttcaaaccacatagctatcaaaagtatgcaatagataaagttattgataatgagaaatacggtctatttttagatatgggactagggaaaacagtgtcaacacttacagcatttagtgaattgcagttgttagacactaaaaaaatgttagtcatagcaccaaaacaagttgctaaagatacatgggttgatgaagttgataagtggaaccatttaaatcatctgaaagtgtctttaatcttaggaacacctaaagaaagaaatgatgcattaaacacagaggctgatatctatgtaaccaataaagaaaatactaaatggttatgtgatcaatataaaaaagaatggccatttgacatggttgtaattgatgaactgtctacatttaaaagtcctaagagtcaaaggtttaaatctattaaaaagaaattaccactcattaatagatttataggattaacaggaacacctagtccaaatagtttacaggatttatgggctcaagtttatttgatagacagaggcgaaagacttgagtcttcattcagtcgttatcgagaaaggtactttaaaccaacacatcaagttagcgaacatgtttttaactgggagctaagagacggatctgaagaaaagatatatgaacgaatagaagatatatgtttaagcatgaaagcgaaagattatctggatatgcctgacagagttgatactaaacaaacagtagtcttatctgaaaaagaaagaaaagtatatgaagaattagaaaaaaactatattttagaatcggaagaagaaggaacagttgtagctcagaatggggcatcattaagtcaaaaactacttcaactagctaacggtgcagtttatacagatgatgaagatgtaagacttatacatgataagaagttagataagttagaggaaattatagaggagtctcaaggccaaccaatattattgttttataacttcaaacatgataaagaaagaatacttcaaaggtttaaggaagcaaccacattagaggattcaaactataaagaacgttggaatagtggagacattaagctgcttatagcacatccagcaagtgcagggcatggattaaacttacaacaaggtgggcacattattgtttggtttggacttacatggtcattggaattataccaacaagcaaatgcaagattatatagacaaggacaaaatcatacgactattattcatcacatcatgaccgataacacaatagatcaaagagtatataaagctttacaaaataaagaactaacgcaagaagaattaatgaaagctattaaagcaagaatagctaagcataagtaa

SEQ ID NO: 416247 - DNA, 291 bp, Staphylococcus aureus
atgaaagagtcgacattagaaaaatatttagttaaagagataacaaagctaaacggtttatgtttaaaatgggttgcacctggaacaagaggtgtaccagatagaattattattatgccagaaggaaaaacattttttgtagaaatgaagcaagaaaagggaaagttgcatcctttacaaaaatatgtgcatagacaatttgaaaacagagatcatacagtatatgtgttatggaataaagaacaagtaaatacttttataagaatggtaggtggaacatttggcgattga

SEQ ID NO: 416248 - DNA, 2448 bp, Staphylococcus aureus
atgttagacaaagtcactcaaatagaaacaattaaatatgatcgtgatgtctcatattcttatgctgctagtcgtttatccacacattggactaatcacaacatggcttggtctgactttatgcagaagctagcacaaactgttagaactaaagaagatttaactgagtacaataaaatgtctaagtctgaacaagccgatataaaagatgttggcggatttgtcggcggatatttaaaagaagggaaacggcgtgctggtcaagtcatgaatcgttcaatgttaacacttgatatcgattatgctgctcaagatatgacggacatattatctatgttttatgattttgcatattgtttatattcaacacataagcatagagagataagtccaagactgcgtttagtgattcctttaaaacgaaatgtaaatgcagatgagtatgaagctattgggcgtaaagtcgcagatatcgttggcatggattacttcgatgatacaacttatcaaccacataggttaatgtattggccttcaactagtaacgatgcggaatttttctttacctatgaagatttacctttgttagacccagataaaatattaaatgaatatgttgattggactgacacattagaatggccaacgtcttcaagggaagagagtaagactaaaagattagcagataagcaaggcgacccagaagaaaagccgggaattgttggtgcattttgtagagcctatacgatagaagaagctatagaaacttttattcctgatttatacgaaaaacattctactaaccgttatacctatcatgaaggttcaactgcaggtggattggtgttatacgaaaataacaagtttgcctattctcatcataatacggatcccgtaagcggtatgcttgtgaacagttttgatttagtacgcatacacttatatggtgctcaagatgaagaaactaaaacagatactccggttaatcgactacctagttataaagcaatgcagcaaagagcgcaaaatgatgaggttgttaaaaagcaattaattaatgacaaaatgtctgatgcaatgcaggatttcgatgaaatagaaaatagcgatgatgcatggtctgaaacgttagaaattacttcgaaaggtactttcaaagctagtatcccaaatatagaaattatattgcgtaatgatccaaatttaaaaggaaaaatagcctttaacgaatttacgaaacaaattgaatgtttagggaaagtgccatggaatactaattttaagacacgtcaatggcaagacggtgatgatagcagtttaagaagttatatcgaaaagatttatgacatacaccattcaggcaaaacaaaagatgccattataagcgtagcaatgcaaaatgcctatcatccagtaagagattatctaaataaaatatcgtgggatggacataaacgtcttgaaaagttatttatcaaatacttaggtgttgaagacactgaagtgaatagaacaactaccaaaaaggcattgactgctggaatcgctcgagtaatggagccaggatgtaaatttgactatatgcttacactttatggtcctcaaggtgtaggtaaatctgctttgctaaaaaaattaggtggtgcatggttttctgacagtttagtttctgttacaggtaaagaagcttatgaggccttacaaggcgtttggctaatggaaatggcagaacttgcagctacaagaaaagctgaagttgaagctattaagcatttcatatctaaacaagttgaccgatttcgtgttgcttatgggcattatattgaagattttccaaggcaatgtattttcattggtacaactaataaagttgatttcttaagagatgaaactggtggaagacgtttttggccaatgactgtaaatccagagagagttgaagtgaactggtctaaactaaccaaagatgagattgaccaaatatgggcagaagctaaatactattatgaacaaggagaagagttgttccttaaccctgaactagaagaagaaatgcgttcaatccaaagtaaacatactgaggaatctccatatacaggtattattgatgaatatcttaacacgccaatcccaagcaattgggaagacttgagcatctttgaaagaagacgattttatcaaggtgatgttgatatgttaccaacaggaaatgtagattacgttgaaagaaataaggtctgtgcgcttgaagtgtttgttgaatgttttggtaaggataagggagatagtagaggatctatggaaattagaaagatttcaaacatcttaagacaattagacaattggtctgtatatgatggtaataaaagtgggaaaattcgattcggaaaagattatggtgtacagatagcgtatgtaagagatgaaagtttagaggatttaatataa

SEQ ID NO: 416249 - DNA, 201 bp, Staphylococcus aureus
atgtggattgtcatttcaattgttttatctatatttttattgatcttgttaagtagcgtttctcataagatgaaaaccatagaagcattggagtatatgaatgcttatcttttcaagcagttagtaaaaaataatggtgttgaaggtttagaagattatgaaaatgaagttgaacgaattagaaaaagattcaaaagctaa

SEQ ID NO: 416250 - DNA, 531 bp, Staphylococcus aureus; identical to SEQ ID NO: 412724

SEQ ID NO: 416251 - DNA, 504 bp, Staphylococcus aureus
atgaactatgaaacagggttccaactaggtgtaatggaagctaggttgaagaagatgagaaaacaacgtgatgagtacaagaagcaacgagatgagcttattggggatatgacggaagttaagagaaaagcaaaagcatttgatgagatagataatctgatttatgaagtattcgaaatgatgaattgctttaaattcagttttatcaatgaaaataaagagcttatcctcgatagcgaatcaaatattttcttttcactaaaagattgcgctaacaaattagatttagttgttaaatttattcattgggttagcagatgttgtattgaaaatatatctcctgaaagaacacaggtttttttacaaacaggtttcgaactttatattggcaaacatttaacaaataatgattacgaatacatgtataaatgctttggtaacggattaaatagtgatggcgcatatagttatgccagaagattattaaatatttcggagggttaa

SEQ ID NO: 416252 - DNA, 405 bp, Staphylococcus aureus
atgaaaatcaaagttaaaaaagaaatgagattagatgaattaattaaatgggcgcgagaaaatccggatctatcacaaggaaaaatgtttttttcaacaggatttagtgatggattcgttcgttttcatccaaatacaaataagtgttcgacgtcaagttttattccaattgatatccccttcatagttgatattgaaaaagaagtaacggaagagactaagtttgataggttgttagaggtatatgagattcaagaaggagtctataaatccgcattacacaaaggtatcagtttgaacgaacgttttgaagacgacaatatttttcctactaaagcattctatatcttaaacgatgacatgacgatgacattgatttggaaagatggggagttgatagaatga

SEQ ID NO: 416253 - DNA, 207 bp, Staphylococcus aureus; identical to SEQ ID NO: 409870

SEQ ID NO: 416254 - DNA, 243 bp, Staphylococcus aureus; identical to SEQ ID NO: 412726

SEQ ID NO: 416255 - DNA, 402 bp, Staphylococcus aureus
atggctagaagaaaagttataagagtgcgtatcaaaggaaaactaatgacattgagagaagtttcagaaaaatatcatatatctccagaacttcttagatacagatacaaacataaaatgcgcggcgatgaattattgtgtggaagaaaagactcaaaatctaaagatgaagttgaatatatgaagagtcaaataaaagatgaagaaaaagagagagaaaaaatcagaaaaaaagcgattttgaacctataccaacgaaatgtgagagcggaatatgaagaagaaagaaagagaagattgagaccatggctttatgatggaacgcctcaaaaacattcacgtgatccgtactggttcgatgtcacttataaccaaatgttcaagaaatggagtgaagcataa

SEQ ID NO: 416256 - DNA, 186 bp, Staphylococcus aureus
atgcaacatcaagcttatatcaatgcttctgttgacattagaattcctacagaagtcgaaagtgttaattacaatcagattgataaagaaaaagagaatttggcggactatttatttaataacccaggtgaactattaaaatataacgttataaatatcaaggttttagatttagaggtggaatga

SEQ ID NO: 416257 - DNA, 1962 bp, Staphylococcus aureus
ttgagatttatgaatatagatattgaaacatatagcagtaatgatatttcgaaatgtggtgcctataaatacacagaagctgaagatttcgaaattttaattatagcttattcaatagatggtggagcgattagtgcgattgacatgactaaagtagataatgagcctttccacgctgattttgagacgtttaaaattgctctttttgatcctgctgtaaaaaagtatgcattcaatgctaatttcgaaagaacttgtcttgctaaacattttaataaacagatgccacctgaagaatggatttgcacaatggttaattcaatgcgtattggcttacctgcttcgcttgataaagttggagaagttttaagactacaaaaccaaaaagataaagcaggtaaaaatttaattcgttatttctctataccttgtaaaccaacaaaagttaatggaggaagaacaagaaacttgcctgaacatgatcttgaaaaatggcaacaatttatagattactgtattcgagatgtagaagtagaaatgacgattgctcataaaattaaagactttccagtaactgcaattgaacaagcatattgggtttttgaccaacatataaacgacagaggtattaagctttctaaatcattgatgttaggagctaatgtgctcgataagcagagtaaagaagaattgcttaatcaagctaaacatataacaggtttagaaaatcctaatagtcctacacaattattggcttggttaaaggatgaccaaggattagatatacctaatttacaaaagaaaacggttcaggagtacttaaaagaagcaacaggaaaagctaaaaaaatgctagaaattagattgcaaatgtctaaaaccagtgtgaaaaaatacaacaaaatgcatgacatgatgtgcagtgatgaacgggtaagaggtctgtttcaattttacggtgccggtactggaagatgggcaggtagaggtgtacaacttcagaatttaacaaagcattatatttcagatactgaattagaaatagcaagagatcttattaaagaacaacgttttgacgatttagatttattactcaatgttcatcctcaagacttattaagtcaattagttaggacgacatttactgctgaagaaggtaatgaactagcagtaagtgatttttctgcaatagaggcaagagtcatagcatggtatgcaaaagaacaatggcgtttagatgtgttcaacacacacggaaagatatatgaagcatcggcttctcaaatgtttaatgtcccggtagaaagcataactaaaggcgaccctctcagacaaaagggaaaagtgtccgaattagctttaggttatcaaggtggcgctggagctttaaaagcgatgggtgcattggaaatgggcattgaagaaaatgaattacaaggtttagttgatagttggcgtaacgcaaatcctaacatagttaatttttggaaggcttgccaagagactgcaattaatactgtgaaatcccgaaagacgcatcatacgcatggacttagattttatatgaaaaaaggttttctaatgattgaactgcctagtggaagagctttagcttatccaaaagcttcagttggtgaaaatagttggggtagtcaagttgttgaatttatgggcttagatcttaaccgtaaatggtcaaagttaaaaacgtatggtgggaagttagtcgagaatattgttcaagcaactgcaagggatttacttgcgatttctatagctaggcttgaagcatcaggttttaaaatagttggacatgtccatgatgaagtaattgtagaaatacctagaggttcaaatggacttaaggaaatcgaaactatcatgaataagcctgtcgattgggcaaaaggattgaatttgaatagtgacggatttacttctccgttttatatgaaggattag

SEQ ID NO: 416258 - DNA, 558 bp, Staphylococcus aureus
atgaaagcaaaagtattaaataaaactaaagtgattacaggaaaagtaagagcatcatatgcacatatttttgaacctcacagtatgcaagaagggcaagaagcaaagtattcaatcagtttaatcattcctaaatcagatacaagtacgataaaagccattgaacaagctatagaagctgctaaagaagaaggaaaagttagtaagtttggaggcaaagttcctgcaaatctgaaacttccattacgtgatggagatactgaaagagaagatgatgtgaattatcaagacgcttattttattaacgcatcaagcaaacaagcacctggtattattgaccaaaacaaaattagattaacggattctggaactattgtaagtggtgactatattagagcttcaattaatctatttcctttcaacacaaatggtaataagggtatcgcagttggattgaacaacattcaacttgtagaaaaaggcgaacctcttggcggtgcaagtgcagcagaagatgatttcgatgaattagacactgatgatgaggatttcttataa

SEQ ID NO: 416259 - DNA, 1167 bp, Staphylococcus aureus
atgaagctagatcactcaaatagagctcatgcaaagctaagtgcaagtggtgcgaaacaatggctaaactgcccaccgagtattaaggcaagtgaaggtattgcagataaaagttcagtttttgctgaagaaggtacattcgcccatgaattaagtgagttatatttcagtcttaaatatgaaggcctaacacagtttgagtttaataaagcttttcaaaattataagcgaaatcaatattacagtgaagagttgcgtgaatatgttgaagagtatgtagctaatgtagaagaaaaatataacgaagctttgagtagggataatgatgtaatagctttatttgaaacaaaattggatttaggtaaatacgtccctgaatcttttggtactggtgatgtcattatattttcaggtggtgtacttgaaattattgaccttaaatacggtaaaggcattgaagtttcagctatagataatcctcaacttagattatatggcttgggcgcatatgaactgcttagtttaatgtatgacattcatacagttcgcatgactatcatacaaccacgaatagataacttttctactgaagagttaccaatatcaagattacttcaatggggaaccgattttgttaaaccattagccagacttgcttataacggtgaaggtgagtttaaagcaggtagtcattgtagattctgtaagataaagcattcatgtagaacacgtgcagaatacatgcaaaatgtgcctcaaaagccaccacatttgttaagtgatgaagagattgcagaacttttatataaactgcctgatatcaaaaaatgggctgatgaagtagaacattatgcgctagatcaagcgaaagaaaatgataaaaactatcctggttggaagcttgtagaaggtcgttcgcgaagaatgataactgatacaaaagcaacgcttgaaaagttagttgaagcgggttataaacctgaagatattacagaaaccaagttacttagcattacgaaattagaaaaattaattggtaaaaaagcattttctaaaattacagagggctttatagaaaagccacaaggtaaattaacacttgctaccgagtctgataaacgaccagctataaagcaatctgctgaagatgattttgacaaactataa

SEQ ID NO: 416260 - DNA, 363 bp, Staphylococcus aureus; identical to SEQ ID NO: 414844

SEQ ID NO: 416261 - DNA, 324 bp, Staphylococcus aureus
atgaccttacaacaaaaaatactatcacattttgcaacatatgacaatttcaatcctgatgatgtagttgaagtttttggagtatcgaaaacacatgcaaaatccacactttcgagacttaagaaaaaaggaaaggttgaaatggaaagttggggaaaatggcgtgttatcgaagcacaattacatttaactgtcgtcgaacgtaaaaaagaaattttagaagagcaatttgaattgttagcaagattgaatgaacaaagtgatgaccctagagaaatagaagatcgtatcaagttaatgattcgtctagctaaccaattttaa

SEQ ID NO: 416262 - DNA, 216 bp, Staphylococcus aureus; identical to SEQ ID NO: 408001

SEQ ID NO: 416263 - DNA, 366 bp, Staphylococcus aureus
atgcccttgatatctgatgaatttgatacacttactaaagaccaacaatatatcttgtccgtactctacaaagattatttagaatgtgtaaagttaggttcggttaaattaacctgcaataattttggaagtgctaaagatatacatacaaagtattttcaaaaactacatttcgaagatgtaaaatacgatttaaataaacttaaaaactctgggttcctaaacggcgtgtatgctagtaacactatttatcatgtaacaatttcagacaagactgttgtttactttgaaaatgagtttaaaaacaatttaaaaagtatcattgatagcatttctaaaattgcttcaataattcctggtctctag

SEQ ID NO: 416264 - DNA, 246 bp, Staphylococcus aureus; identical to SEQ ID NO: 408003

SEQ ID NO: 416265 - DNA, 210 bp, Staphylococcus aureus; identical to SEQ ID NO: 410726

SEQ ID NO: 416266 - DNA, 144 bp, Staphylococcus aureus; identical to SEQ ID NO: 408815

SEQ ID NO: 416267 - DNA, 777 bp, Staphylococcus aureus; identical to SEQ ID NO: 410801

SEQ ID NO: 416268 - DNA, 237 bp, Staphylococcus aureus
atgcctatagatgctaaacttttgaaatctaaaatggctttgaaagaacataacatcaaaaccctttctgaagaaattggtgttaatagagatactttatctaatatgattcacgggagaacgaaaccgtcgtacccggtaataaatggtatttattttgcgttagaattgacacctcaagaaggaagagatattttttttaacgaagacttacgcaaaaagaaagttttaacttaa

SEQ ID NO: 416269 - DNA, 315 bp, Staphylococcus aureus
atgtgcttttcaaaaagaatgaaacaatcaagagaaaaacaaggtatgactttggccgaactaggaagaaaaattggtaaaactgaagctactgtacagcgttatgaaagcggaaatatcaaaaatttaaaaaacgatactatagaaagtatagctactgcattaaatgttaatcctgcatatttaatggggtgggttgaagaaaacgatgatgaagtacaacatcgtgcagctcatttagaaggagaattaactgatgacgagtggcaaagagttttagattatgcagattatataagaagtaaacgtaagtaa

SEQ ID NO: 416270 - DNA, 462 bp, Staphylococcus aureus
atgggattatatgaagaaactttaatacaacatgattatattgaagtaagagaggctgatgtacttccagataatttagacggggtatggttaggagatttaattttaataaaacgtggtttatcagatagagaaaaggcaggaattctcttcgaagaattagcgcataataaacttacatacggtgatatagccgattactcgaaattcaacaatcgcaagttcgaaaattacgcacgtagacacggctttatttcagcagtcccgttacgcgaaattgtagaagcatacaattatggcgtacgtaatttgtacgagctgtcagagtatctgcagttgagtgaatcatacatactagaagcaatagaacaatataaaaagatatatggtattgggactcactacggcgaatactcaattacatttgagccattgagagtttttaaatataaagaaatataa

SEQ ID NO: 416271 - DNA, 1206 bp, Staphylococcus aureus
atgtggattgaaaaatttaaaaacaaaaataacgaaactaaatacagatattacgagaagtacaaagatccatacacagataaatggaagcgcgtaagtgttgtgttgaacaagaatacaaaacaatctcaaaaagaagcaatgtttcgtttagaagaaaaaataaaagaaaaactgaacaacaagtcgtcaagcgaattaaaaactttgacttttcacgcgctattagatgaatggcttgaatatcatataaaaacatcaggttcaaagttgactactcttaataatataaaaataagaattaaaaacattaaacgatactgctctgagaacttgcttttaaacaaacttgatacaaaatatatgcagatatttattaataaattatcagatatctattctcaaaatcaagtaacccgtcaactcggagatatgaaaggagctattaaatatgcagttaaattttacaattatccaaatgaatatttgttaactaatgtcaaaattcctaaaagaagaaaaacaatagaggatatcgaaaaagatgaatctaaaatgtacaactatttagaaatgaaccaagtcctacagatacgtgatcatatactaaatgataataagttacacaagcgaaatcgcattttaattgccagcatcttagaagtacaggctttaactggtatgcgcataggagaactacaagcactgcaggaaaaagatatagatttattaaacaaaactatcaatataacaggtacaattcaccgcattaaatacgaggaaggattcggatacaaagacactacaaagactataagttcaaaaagaagtatcagcatcaattctagaaccgtagaaatttttaaaaagataatactggaaaacaaaatgttgaaaagatggaattcgagctatgttgacagagggttcatattcacaacaaaaaaagggaatcctttatgtaataatcaaatcgccggtgtgcttaagaaaactacaaaagctttaaatatgaataagaaagttaccacgcacacatttagacatacacacataactttattagtagaaatgaatgtttctttaaaagcaattatgaaaagggtaggacatgtagatgaaaaaacaaccattcgcatatatactcatgtaactgaaaaaatggatagagaactaactcaaaaactcgaaaacattccaagttag

SEQ ID NO: 416272 - DNA, 606 bp, Staphylococcus aureus
atgactaaaacattacctgaagattttatttttggtggagcaacagcagcatatcaagcagaaggtgcgacaaatacagatggtaaaggtcgtgttgcatgggatacgtatttggaagaaaactattggtacactgcagaaccagcgagtgatttttataacagatatccagtggatttagaattaagtgaaaaattcggtgttaatggtatccgtatttcaattgcatggtcacgtatcttcccaaatggatatggcgaagttaaccctaaaggtgttgagtattaccataagttatttgcagagtgtcataaacgtcatgttgaaccatttgtaacattgcatcattttgatacaccagaagtgttacacaaagatggcgattttctaaatcgtaaaacgattgactactttgtagattatgctgaatattgttttaaagaattcccagaagtaaaatattggactacattcaatgaaattggacctattggtgatggtcaatatttagtaggtaaattccctccaggtattaaatatgattttgaaaaagttttccaatcacatcacaatatgatgatatgtttatttcaagaaaagctttaa

SEQ ID NO: 416273 - DNA, 933 bp, Staphylococcus aureus; identical to SEQ ID NO: 413297

SEQ ID NO: 416274 - DNA, 741 bp, Staphylococcus aureus; identical to SEQ ID NO: 413299

SEQ ID NO: 416275 - DNA, 855 bp, Staphylococcus aureus; identical to SEQ ID NO: 413301

SEQ ID NO: 416276 - DNA, 816 bp, Staphylococcus aureus; identical to SEQ ID NO: 415251

SEQ ID NO: 416277 - DNA, 705 bp, Staphylococcus aureus; identical to SEQ ID NO: 406213

SEQ ID NO: 416278 - DNA, 1017 bp, Staphylococcus aureus; identical to SEQ ID NO: 408069

SEQ ID NO: 416279 - DNA, 948 bp, Staphylococcus aureus; identical to SEQ ID NO: 408066

SEQ ID NO: 416280 - DNA, 399 bp, Staphylococcus aureus; identical to SEQ ID NO: 406220

SEQ ID NO: 416281 - DNA, 438 bp, Staphylococcus aureus; identical to SEQ ID NO: 413305

SEQ ID NO: 416282 - DNA, 804 bp, Staphylococcus aureus; identical to SEQ ID NO: 413306

SEQ ID NO: 416283 - DNA, 810 bp, Staphylococcus aureus
gtggaggataagaattcagttattgtatttaaaaatgtttcatttcaatatcaaagtgatgcatccttcacattgaaagatgtttcttttaatatacctaaaggtcagtggacatctattgttggtcataacggttctggaaaatctacaattgccaagttaatgattggcatagagaaagttaaatctggagaaattttttataataatcaagctataactgatgataattttgaaaagttaagaaaagacataggaattgtatttcagaatccggataatcaatttgttggttcaattgtaaaatacgatgtggcatttggactcgaaaatcatgcggttccacatgacgaaatgcatagaagagtcagcgaagcacttaaacaagttgatatgttagaacgtgcagattatgaacctaatgcattatcggggggacagaagcagcgtgtggctatagcaagtgtattagcacttaacccctctgtcattatattagatgaggcgacttctatgttagatcctgatgcacgtcaaaatttattggatttagtgagaaaagttaaatcagaacataatattacaatcatttctattacgcatgatttatctgaggcgatggaagcagatcatgttatcgttatgaataaagggactgtctataaagaaggcacagcgactgaaattttcgaccatgcagaagagttaacaagaataggtctagatttgccattcccaatcaaaataaatcaaatgctgggacaccaaacatcattcttaacttatgaagggctggtggatcaactatga

SEQ ID NO: 416284 - DNA, 369 bp, Staphylococcus aureus; identical to SEQ ID NO: 406226

SEQ ID NO: 416285 - DNA, 390 bp, Staphylococcus aureus; identical to SEQ ID NO: 406228

SEQ ID NO: 416286 - DNA, 648 bp, Staphylococcus aureus; identical to SEQ ID NO: 406231

SEQ ID NO: 416287 - DNA, 441 bp, Staphylococcus aureus; identical to SEQ ID NO: 415239

SEQ ID NO: 416288 - DNA, 180 bp, Staphylococcus aureus; identical to SEQ ID NO: 406234

SEQ ID NO: 416289 - DNA, 501 bp, Staphylococcus aureus; identical to SEQ ID NO: 406235

SEQ ID NO: 416290 - DNA, 537 bp, Staphylococcus aureus; identical to SEQ ID NO: 406237

SEQ ID NO: 416291 - DNA, 186 bp, Staphylococcus aureus; identical to SEQ ID NO: 406239

SEQ ID NO: 416292 - DNA, 540 bp, Staphylococcus aureus; identical to SEQ ID NO: 406240

SEQ ID NO: 416293 - DNA, 369 bp, Staphylococcus aureus; identical to SEQ ID NO: 406242

SEQ ID NO: 416294 - DNA, 210 bp, Staphylococcus aureus; identical to SEQ ID NO: 406244

SEQ ID NO: 416295 - DNA, 435 bp, Staphylococcus aureus; identical to SEQ ID NO: 406245

SEQ ID NO: 416296 - DNA, 354 bp, Staphylococcus aureus; identical to SEQ ID NO: 406247

SEQ ID NO: 416297 - DNA, 276 bp, Staphylococcus aureus; identical to SEQ ID NO: 406250

SEQ ID NO: 416298 - DNA, 624 bp, Staphylococcus aureus; identical to SEQ ID NO: 406251

SEQ ID NO: 416299 - DNA, 663 bp, Staphylococcus aureus; identical to SEQ ID NO: 406252

SEQ ID NO: 416300 - DNA, 390 bp, Staphylococcus aureus; identical to SEQ ID NO: 415223

SEQ ID NO: 416301 - DNA, 864 bp, Staphylococcus aureus
ttgcaatttcttgatttcttaatcgcacttttacctgctttattctggggaagtgtcgttcttattaatgtgttcgtcggcggtggaccttacaaccaaattcgtggtacgacgctaggcgcactcattgttggattaggtttacttattactggtttcgcaaaattcaataatcctactgtaattattgtcggtcttatttctggtgcattatgggcgtttggacaagcgaatcagcttaaatctattagtttaatcggtgtatcaaatactatgccagtttctacaggtatgcaattagttggtacaacattattcagcgttatctttttaggcgaatggtcttcaatgactcaaattatctttggtttaatcgccatgatattattagttactggtgtagcacttacttcacttaaagccaaaaatgaacgtcaatcagataatcctgaatttaaaaaagcaatgggtattttaattgtatctacagttggatatgtaggtttcgttgtacttggtgacatctttggtgttggtggaactgatgcattgttcttccaatctgtcggtatggcaattggtggctttatcctatccatgaatcataaaacatcacttaaatcaacagcacttaatctattgccaggtgtgatttggggaattggtaacttgttcatgttctattctcaaccaaaagttggtgtagctacaagtttctcattatcacagttacttgttatcgtttcaacattaggtggtattttcattttaggagaaagaaaagatcgtcgtcagatgacgggtatttgggcaggtattattattatcgtgatagctgctataattctaggtaatttgaaatag

SEQ ID NO: 416302 - DNA, 909 bp, Staphylococcus aureus; identical to SEQ ID NO: 415218

SEQ ID NO: 416303 - DNA, 441 bp, Staphylococcus aureus; identical to SEQ ID NO: 409580

SEQ ID NO: 416304 - DNA, 1023 bp, Staphylococcus aureus; identical to SEQ ID NO: 415314

SEQ ID NO: 416305 - DNA, 495 bp, Staphylococcus aureus; identical to SEQ ID NO: 415206

SEQ ID NO: 416306 - DNA, 606 bp, Staphylococcus aureus; identical to SEQ ID NO: 415203

SEQ ID NO: 416307 - DNA, 771 bp, Staphylococcus aureus; identical to SEQ ID NO: 413324

SEQ ID NO: 416308 - DNA, 909 bp, Staphylococcus aureus; identical to SEQ ID NO: 415197

SEQ ID NO: 416309 - DNA, 906 bp, Staphylococcus aureus
ttgaagataatagatgtgcttttgaaaaatatatctcaggttgtgttaattagtaataaatggacaggattatttatcttaataggattatttgtagccgattggacaattggattagcggctattgtaggtagcatcatcgcctatacttttgcgcgttttataaattatagtgaggcagaggttaatgatgggttagccggatttaatccagtgttaactgccattgcgttaacaatctttttagataagtcaggattagatattgttataacaatgatagcaactttattaacgttaccagttgctgctgcagtgagagaagttttaagaccatataaagttccgatgctgacgatgccttttgtcattgtgacttggtttacaattttactttcaggacaggttaaatttgtagatacatcgttaaagttaatgcctcaaaacattgaaacggttaattttagcaacaatgatagaatacatttcattcagtcattatttgaaggattcagtcaagtatttatcgaagcgagtgtaattggtggcgtatgtattttaatcggcatattgatagcatcaagaaaagcagcactcttagctgttatagctagtttgttaagctttatcattgtagctctattaggtggtaattatgatgatattaatcagggattattcggttataactttgtattaatggcaatcgcactaggatatacatttaaaacagcgattaacccttatatttcgacttttttaggtgtgttattaacagtagtggtgcaactaggtacaacaacattgcttgaaccgtttggcttacctgcattaacattgccatttattatcgtgacatggattttattatttgctggtattaaacatgacaaagtagatgcttga

SEQ ID NO: 416310 - DNA, 453 bp, Staphylococcus aureus; identical to SEQ ID NO: 406290

SEQ ID NO: 416311 - DNA, 615 bp, Staphylococcus aureus; identical to SEQ ID NO: 415190

SEQ ID NO: 416312 - DNA, 837 bp, Staphylococcus aureus; identical to SEQ ID NO: 415189

SEQ ID NO: 416313 - DNA, 744 bp, Staphylococcus aureus; identical to SEQ ID NO: 415187

SEQ ID NO: 416314 - DNA, 804 bp, Staphylococcus aureus; identical to SEQ ID NO: 415185

SEQ ID NO: 416315 - DNA, 423 bp, Staphylococcus aureus; identical to SEQ ID NO: 415182

SEQ ID NO: 416316 - DNA, 1125 bp, Staphylococcus aureus; identical to SEQ ID NO: 415179

SEQ ID NO: 416317 - DNA, 777 bp, Staphylococcus aureus
atgaagaagaatttcaagttacgcatttcaacgctactattgatagttattttagttgtttttgctgtattactcatcgtgaatgaaactaaattgtttaaaaatgatgtgaattactcttttgatgaggctgtttcaatgcaacaagggaaaggtattgtacagacaaaagaagaggatggtaaatttgttgaagcaaataataatgaaattgctaaagcaatgactatttcacataaagacaatgatatgaagtatatggatatcacagaaaaagtgccaatgtcggaatctgaagttaaccaattgctaaaaggtaaggggattttagaaaatcgagggaaagtttttctagaagctcaagaaaaatatgaggttaatgtcatttatcttgttagccatgcattagtagaaacaggtaacggcaaatcagaattagcaaaaggcattaaagatgggaaaaaacgctattacaacttttttggtataggagcattcgatagtagtgctgttcgtagtgggaaaagttatgctgaaaaggaacaatggacatcaccagataaggcgattattggtggtgcaaagttcattcgtaatgaatattttgaaaacaatcaactgaatttatatcaaatgcgatggaatccagaaaatcctgcgcaacatcaatatgcgagtgacattcgatgggcagataaaattgccaaattaatggataaatcctataagcagtttggtataaagaaagatgatattagacaaacatattataaataa

SEQ ID NO: 416318 - DNA, 3039 bp, Staphylococcus aureus
gtgtggggcatcgttattttaggtggatatgagcaatttattaaaagtcatttacggaaaatatatatagacggggtgagtaatatgcaagaacatttggtggttacacttgatggaaaagattatcttgtagaaccaggtacgaatttacttgaatttattaaatcacaagatacttttgtaccttcaatttgttataacgagtcgatgggaccaattcaaacatgtgatacatgtactgttgagattgacggtaaaattgaacgttcatgtagtacggtgattgatcgtccaatgactgtaaatactgtgaacaatgatgtgaaagatgctcaaaaagaagcgcttgatcgaattttagaaaagcatatgctgtattgtacagtatgtgattataataatggtgattgtgaaattcataatacgatggatgcatgggggcttcagcatcaaacgtatgaatataaagagaagccatatgaaaaggattatggcccattttatcgttatgatccaaatcaatgtatcttatgtgggcgttgtgtagaagcatgtcaagatatcgaagtgaatgaaactattagaattgattgggatcgtgaacatccacgtgttatttgggataatgatgtaccaattaatgaatcgtcatgtgtatcttgtggtcaatgcgcaactgtatgtccatgtaatgccatgatggaagtgaatatggaaggtaatgcgggttatatgactgatacggaacctggttcattagcagcaatgattgatttaactaaaaaagcagaacctggttatggtccactatttgcaatctcagattcagaagcagaaatgcgtaaagagcgtattaagaaaactaaaacagtgtgtacttattgtggtgtgggttgttcatttgaagtttggactaaagatagagaaattttaaaagtacaaccatcacatgattctccagcaaataaaattgcgacttgtgttaaaggtaagttttcatggggacatattaattcagatcaacgcttaactaaaccactagtaaggaaaaatggtgagttccatgaagtagaatgggatgaagctttaaatgtcattgcagataattttacatctattaaagaaaagtatggcccagatgcactatcattcatttcttcttctaaagcgacgaatgaagaatcgtatttaatgcaaaaattagcaagacaagttattggcacaaataacgttgataactgttcaagatattgccaagcacctgcaacaaaaggcttatttagaacggttggacacggcggtgactcaggtagtattgaagatttagaaaaagcggcaatgtctgtattgataggtaccaatacagccgaagctcatccagttatcgcatcacgcatgaaacgtgctcaaaaattatttggacaaaaaatacatgtatttgatattagaaaacatgaaatggcagaacgtgcggatcgtttttatcaacctaaaccaggtacggatttagcgtggttaagtgcagtgactaagtatattattgatcatgatttacacgataaagcatttattgatgagtgggtagatgattttgatgaatattacaaatcattagaaacatttacaatggcttttgctgaagaagcaacaggtattcctgaatcagaattgattaaatttgctgaagaatgtgctaaagctgaatctgttgtaatttgttgggcaatgggtattacacaacaagacattggtagtgactcaagtacagcgatttcaaacttattattagtaacaggtaattatcgtcgtcctggtactggtgcgtatccattacgtggacataataatgttcaaggatgtagtgatatgggaagtatgcctgataagattactggttatcaaagtattgaagcggatgatattcgcgctaaatttgaaaaagaatatggcgttaaattgaatccaaaagctggtaaagataatcatgaaatggtagaaggtatacatgacggagaagtacactcattgtacttatatggtgaagatacgggtattgtggattcaaatattaattttgtacaagctgcgtttgaaaaattagatttcatggtagtccaagatgaatttttaacattcacagcaacatacgcagatgttgtattgccagcaagtccttcacttgaaaaagacggtacttttacaaataccgaacgtcgtattcaacgtttataccaagcattagaacctcttggtgattcaaaacctgactggaaaattttccaagcaattgctaatagattaggatttgattggaattacaagcatcctagtgaaattatggatgaagtagcacgcttaacacctctatatgctggggtaagttatgatcgtttagaaggattcaatagtttacaatggccagtacaacctgatggtactgatgagcctattctatacttagaaggattcaattttgataatggtaaagcaaaattattcccattatcatttgataattactttaagcaagatgaaatttatgatattcatgtaaacaatggtcgattgttagagcacttccatgaaggtaatatgacttatcaaacaccaatgattaaatacaaagtgccacgtgcatttgttgaaatttctccagagcttgctgaagatagaggcattcatgaaggtgcagaagttaagctgatttctgaaacaggagaagcggtattacaagttcacgtgacagatcgtgttaaaggtaaagaaatctatattccattaaataatgatgcgatggaaaatggagatctaggtgcaattaacttattaactaatagtgatgttgatcaatacacggatacaccatcttataaacgtactagctgtcgtttggaggtaattacgaaacgtggtaagtcaccgttgaaccctaataatttccgtgtcaataaaaaacgtcatccgcagtacagtgttcaagtacagaaaaaatgggaacgttcagattatgttttcccgggaaatcaggtggataaataa

SEQ ID NO: 416319 - DNA, 357 bp, Staphylococcus aureus
atgttaaaacaaatactgccacgtgctacaaaaatatcgatactctttgctgtagcatttttcatcataaattatatcggtatggaaaaacctgacatcctatatttagttggaagaactattattgcaacacttgctttcatactcatttgtcttacattatttactattattaattctccagagcgcaagattaaactcggtacgactttaccgattgcattaattattggtatcattttcggcgccatatttttaacggtacaaatcggtgtcatcactgggttaatcatcggtgtgattgctacgtttatttgggaattgattgaaaaaaataaaggaggtcgttcatcatga

SEQ ID NO: 416320 - DNA, 192 bp, Staphylococcus aureus; identical to SEQ ID NO: 406318

SEQ ID NO: 416321 - DNA, 1314 bp, Staphylococcus aureus; identical to SEQ ID NO: 415164

SEQ ID NO: 416322 - DNA, 882 bp, Staphylococcus aureus
atggcaactcaagatcctagaacaaaatttaaaacaacggaatatgaaaaacaagaacaagaggtaccgggtttacaatctgaaatgacgccagcacctgattgtggcgaaacgtcttaccaaggtcatcaacgcttacaaggctataaaatgttagtcacaggtggtgactcagcaatagggcgtgcagcagcaattgcgtatgctaaagaaggtgcagatgtagcgattaactatcttccgagtgaagaacaagatgcacaagaagtacgccaagtaattgaagaaagtggtcaaaaggcagtgttaattcctggtgatataagagatgagcagttcaactatgaccttgttgaacaagcatatcaacaattaggtggcttagataatgttactttagttgctggacatcaacagtatcatgatgatattcatggatttacaactgaggcatttacagaaacatttgaaacgaatgtctatccgctattttggacagttcaaaaagcattggaatatttaaaaccgggtgcgtcaattacaacgacatcatctgtacaaggttataatcctagtcctattcttcatgattatgccgcttcaaaagcagcaattatttcattaactaaaagtttttcagaagaattaggaccaaaaggaattagagtgaactgtgtagcacctggtccattctggtcaccattacaaatttctggtgggcaacctcaaagtaaaatcccaacatttggtcaaaaaacacctttaggtcgtgcaggtcaacctgttgagttatgtggaacttatgtgctattagcgtcagaggaatcaagttatacaactggacaagtgttcggtgttagcggtggagtgcaaatagattag

SEQ ID NO: 416323 - DNA, 885 bp, Staphylococcus aureus; identical to SEQ ID NO: 410342

SEQ ID NO: 416324 - DNA, 936 bp, Staphylococcus aureus; identical to SEQ ID NO: 406333

SEQ ID NO: 416325 - DNA, 687 bp, Staphylococcus aureus; identical to SEQ ID NO: 406335

SEQ ID NO: 416326 - DNA, 1020 bp, Staphylococcus aureus; identical to SEQ ID NO: 415157

SEQ ID NO: 416327 - DNA, 900 bp, Staphylococcus aureus; identical to SEQ ID NO: 413338

SEQ ID NO: 416328 - DNA, 621 bp, Staphylococcus aureus; identical to SEQ ID NO: 415154

SEQ ID NO: 416329 - DNA, 1209 bp, Staphylococcus aureus; identical to SEQ ID NO: 413339

SEQ ID NO: 416330 - DNA, 1932 bp, Staphylococcus aureus; identical to SEQ ID NO: 415147

SEQ ID NO: 416331 - DNA, 555 bp, Staphylococcus aureus; identical to SEQ ID NO: 415145

SEQ ID NO: 416332 - DNA, 1383 bp, Staphylococcus aureus
atgaaatcttgcccgaagtgcggacaacaagcacaagatgatgtacagatatgtacacaatgtggacataaatttgatagtcgtcaagcattatatagaaagtcaaccgatgaagatatacaaactaataacatcaagatgagaaaaatggtgccttgggcaattggttttttcattttaatcttaattattatattgttctttttactaagaaacttcaattcacctgaagcgcaaactaaaatattagtgaatgcgattgagaataatgataaacaaaaagtagcaacattattaagtactaaagataataaagtagattctgaagaagcgaaagtatacattaactatatcaaagatgaagttgggcttaagcaatttgtcagcgaccttaaaaatacggtacataaattgaataagagtaagaccagcgtagcttcttatattcaaaccagatctggtcaaaatatattacgtgtaagtaaaaatggcacgcgttatatctttttcgataatatgagctttactgcacctaccaagcaaccaattgttaagccgaaagaaaaaacaaaatatgagtttaaatctggtggtaagaaaaagatggttatagctgaagcaaataaagtgacgccaataggtaattttataccggggacatatagaattccagctatgaaatcaactgagaacggtgattttgcaggctatttaaaatttgattttagacaaagtaattctgaaacggtagatgttactgaagattttgaagaagcaaatataactgtaactttaaaaggcgatacaaaattaaatggtagttctaaaaaagtaactataaatgaccgtgaaatggcattttcaagttccaaaacgtatggtccatatccacaaaataaagatattaccatttcagcttcaggtaaagcgaaaggtaaaacatttacaacacagacgaagacgattaaagccagcgatttaaaatacaatacagagataactttgaattttgacagtgaagatatcgaagactatgttgaaaagaaagaaaaagaagaaaacagcttgaagaacaaattgatagaattctttgctggatattctttagcgaataatgctgcgtttaatcagtcagattttgattttgtatcgtcatatataaaaaaaggatcatctttttatgatgatgtaaagaagcgtgtatctaaaggaagtttaatgatgattagttcaccacaaattatagatgctgaaaaacatggtgataagattaccgcaaccgtaagattaataaatgaaaacggtaagcaagtagataaagaatatgagcttgaacaaggctcgcaagaccgcttgcaattaatcaagacatcagaaaaatag

SEQ ID NO: 416333 - DNA, 1599 bp, Staphylococcus aureus; identical to SEQ ID NO: 415134

SEQ ID NO: 416334 - DNA, 1035 bp, Staphylococcus aureus; identical to SEQ ID NO: 405026

SEQ ID NO: 416335 - DNA, 1443 bp, Staphylococcus aureus; identical to SEQ ID NO: 415126

SEQ ID NO: 416336 - DNA, 447 bp, Staphylococcus aureus; identical to SEQ ID NO: 415122

SEQ ID NO: 416337 - DNA, 423 bp, Staphylococcus aureus; identical to SEQ ID NO: 415121

SEQ ID NO: 416338 - DNA, 1170 bp, Staphylococcus aureus; identical to SEQ ID NO: 415340

SEQ ID NO: 416339 - DNA, 1035 bp, Staphylococcus aureus; identical to SEQ ID NO: 415117

SEQ ID NO: 416340 - DNA, 453 bp, Staphylococcus aureus; identical to SEQ ID NO: 405006

SEQ ID NO: 416341 - DNA, 732 bp, Staphylococcus aureus; identical to SEQ ID NO: 415109

SEQ ID NO: 416342 - DNA, 825 bp, Staphylococcus aureus
gtgatagaaaataagaaaacagttgaagatacatattcaacaggcgcaattgttgattcaatatcatcttcagtacaaatgaagcaagtaatggtacagcaaacacctggccgatatatgcttaaagcaatgatggccggatttttactctcaatcgttactgtatttatgttcggaataaagacgcagtttgcgaatactcacgtagatggacttatcaatttaatgggagccattgcgtttagtttaggtttgattttagttgtattaactaactctgaattattaacaagtaacttcatgtactttacagtaggctggtattataaagtcgtttctgttaagaagatgacttggattttattatattgtttcttaggaaatattttaggtgggtttgtgttatttttcttaatgaaatttgcgcatgtcatgacacctgaaatgacacaagctttaacagctttagttcagaaaaagactgttgattcaacatggttgaatatttttacaaaaggtattttctgtaacttctttattaatattggtattttcatctctatgcaattcaaaggcggcttaacaaaggcattcttcatagcttgtggtgtcgtggtctttgtatacatgggatatgagcacgttgtgttcaatgcaggtctatatgcaggtatggtattctttaaccttgatgcagtttcatggttacatgttttaaaaaatatcgtttttgctttcttaggtaactttgtcggtggcggtatttttgtaggtctcgtttatgctttcttaaatggtaagcgtaatcgtttagagcaacaataa

SEQ ID NO: 416343 - DNA, 1440 bp, Staphylococcus aureus
atgtcgaagaaacaaaaattaacgatgattattactatgctgatgggtggattttttggattattaaatgaaacactattagtgacggctttaccaagtattatgaaagattttgaaatttcatatacacaagttcaatggctgacaacagcttttttattgactaatgggattgttattcctttgtccgcgcttgttatacaacgttatacaacaagacaagtgtttttagtgggtatttctatctttttcttaggtacattactcggcggcttgagtccgcactttgcaacattattagttgctagaattattcaggcgttaggcgcaggtattatgatgccattgatgatgacaacgattttggatgttttccaaccgcatgaacgcggtaaatatatggggatatttggtttggtaattggtttagcaccagctattggacctactctttcaggttaccttgttgaatatttaaactggagatcgcttttccatgttgtcgctccaattgcagctgttacatttttaattggatttaaaacgataaaaaatgttggaactacaattaaagtacctattgattttatttctgtcattttttctgtactaggtttcggcgggttattgtatggaacgagttcaatttcagaaaaaggttttgataatcctatcgtattagtatctatgattggaggcgttgttttagtcgcattatttgtattacgtcaatatcggctatcaacaccattattaaattttgctgtatttaaaaataaacaatttacagttggtatcattattatgggtgtcacaatggtatcgatgattggttcggaaacgattttacctatctttgtgcaaaatttattgcatcgttcagctttagattctggattaactttattaccaggagcaattgttatggcatttatgtcgatgacttcgggtgctttatatgaaaagtttggtcctagaaagcttgctttagtaggtatggcgattgttgttattactacggcttattttgttgtaatggatgaacaaacatcaacaatcatgttggcaacagtttatgcgattcgaatggttggtatcgcgttaggattaattccagtaatgacccatacgatgaatcaattaaagccagaaatgaatgcacacggttcatctatgacaaacacagtacaacaaattgctggttctatcggaacagctgcattaattactattttatctcatgcaagcaaaaacttttctccaactatgtcagactataatggcatgaacaaaattgatatgatgaatcaaattaaagttgatacgatgttgcatggttatcacgctggatttttatttgcattattgattacagttgttagtttcttttgttcatttatgttacaagggaagaaaaaagaagttgattctcgtcaataa

SEQ ID NO: 416344 - DNA, 1311 bp, Staphylococcus aureus
atgaaaaataaatatatctcgaagttgctagttggggcagcaacaattactttagctacaatgatttcaaatggggaagcaaaagcgagtgaaaacacgcaacaaacttcaactaagcaccaaacaactcaaaacaactacgtaacagatcaacaaaaagctttttatcaagtattacatctaaaaggtatcacagaagaacaacgtaaccaatacatcaaaacattacgcgaacacccagaacgtgcacaagaagtattctctgaatcacttaaagacagcaagaacccagaccgacgtgttgcacaacaaaacgctttttacaatgttcttaaaaatgataacttaactgaacaagaaaaaaataattacattgcacaaattaaagaaaaccctgatagaagccaacaagtttgggtagaatcagtacaatcttctaaagctaaagaacgtcaaaatattgaaaatgcggataaagcaattaaagatttccaagataacaaagcaccacacgataaatcagcagcatatgaagctaactcaaaattacctaaagatttacgcgataaaaataaccgctttgtagaaaaagtttcaattgaaaaagcaatcgttcgtcatgatgagcgtgtgaaatcagcaaatgatgcaatctcaaaattaaatgaaaaagattcaattgaaaacagacgtttagcacaacgtgaagttaacaaagcacctatggatgtaaaagagcatttacagaaacaattagacgcattagtagctcaaaaagatgctgaaaagaaagtggcgccaaaagttgaggctcctcaaattcaatcaccacaaattgaaaaacctaaagcagaatcaccaaaagttgaagtccctcaaatccaatcaccaaaagttgaggttcctcaatctaaattattaggttactaccaatcattaaaagattcatttaactatggttacaagtatttaacagatacttataaaagctataaagaaaaatatgatacagcaaagtactactataatacgtactataaatacaaaggtgcgattgatcaaacagtattaacagtactaggtagtggttctaaatcttacatccaaccattgaaagttgatgataaaaacggctacttagctaaatcatatgcacaagtaagaaactatgtaactgagtcaatcaatactggtaaagtattatatactttctaccaaaacccaacattagtaaaaacagctattaaagctcaagaaactgcatcatcaatcaaaaatacattaagtaatttattatcattctggaaataa

SEQ ID NO: 416345 - DNA, 948 bp, Staphylococcus aureus; identical to SEQ ID NO: 410070

SEQ ID NO: 416346 - DNA, 687 bp, Staphylococcus aureus; identical to SEQ ID NO: 413345

SEQ ID NO: 416347 - DNA, 1764 bp, Staphylococcus aureus; identical to SEQ ID NO: 415090

SEQ ID NO: 416348 - DNA, 1143 bp, Staphylococcus aureus; identical to SEQ ID NO: 410321

SEQ ID NO: 416349 - DNA, 1410 bp, Staphylococcus aureus; identical to SEQ ID NO: 416141

SEQ ID NO: 416350 - DNA, 1830 bp, Staphylococcus aureus; identical to SEQ ID NO: 415082

SEQ ID NO: 416351 - DNA, 852 bp, Staphylococcus aureus; identical to SEQ ID NO: 415080

SEQ ID NO: 416352 - DNA, 1638 bp, Staphylococcus aureus; identical to SEQ ID NO: 415075

SEQ ID NO: 416353 - DNA, 267 bp, Staphylococcus aureus; identical to SEQ ID NO: 415359

SEQ ID NO: 416354 - DNA, 870 bp, Staphylococcus aureus; identical to SEQ ID NO: 408542

SEQ ID NO: 416355 - DNA, 375 bp, Staphylococcus aureus
atgatagacaactttatgcaggtccttaaattaattaaagagaaacgtaccaataatgtagttaaaaaatctgattgggataaaggtgatctatataaaactttagtccatgataagttacccaagcagttaaaagtgcatataaaagaagataaatattcagttgtagggaaggttgctactgggaactatagtaaagttccttggatttcaatatatgatgagaatataacaaaagaaacaaaggatggatattatttggtatatctttttcatccggaaggagaaggcatatacttatctttgaatcaaggatggtcaaagataagtatatgtttccgcgggataaaaatgctgcaaaacaaagagcattaa

SEQ ID NO: 416356 - DNA, 870 bp, Staphylococcus aureus
ttgtttaatgaagattaccgcttgcaaattggaattaagccgttgagttttgaattatatttaaatttcttaaatgaaatgtttcagtcaaatgaaatgaactggtttttaaatgatatcgaaaatgtaaatttatatggtgttttagaagaaaatgagatagaggaaattgagtcatcatttgagcgtgtaaaagaattttatttctcaaatattgaagaaaaaaggtatgaattcagtgaatatactgatataaataacgaacatgaacaaatagttgatcttttacttgatattgatagatatattcagaatatgataaatcaattagaagaaaacaatatattagaagaatgtttaattgataatatcgaaaatagtttatatttattagaagaaaagaaaaatgagattgaagatttaaaatttaaaatggacattcactttaaattagtaaactattgggacgaagatatgtattataattttataaacttttttatcaataaatcagactttaaatatttttcatccttagtagatgaattaggtcagagattgaaaaatgagaatttcaaacaaagagaattaaatttattgacattgataaaagacatagtgggagtgttaattacattttatgaacaatttcacatcagttctgcatatgaactaggaaataactggtttgagatagatcgtgatataagaatgagtttgatttttataaatgaaaaaatcacattaattgaatatacatatattgaaaaaggagagtcggaggaactcttagtattattagaagaaatattcaataattattcaactataataaacgctataatgatagtatactcagaaaatgagtag

SEQ ID NO: 416357 - DNA, 234 bp, Staphylococcus aureus
atggcgacaattggatttgaagaaaaattatggcaagctgcggataaattacgagggagtatggatgcagcaaaatacaagaatgtagcgttaggcatcatattcttgaagtatgtatctgacccttttgaagaaaagtatgaagaattaaaaaatgatgatttagctgatgaagaggataaagatgagtacttagcagaaaatattttctgggtacccaaagaagcacgttag

SEQ ID NO: 416358 - DNA, 183 bp, Staphylococcus aureus
atgaaaaaattaaaattctttttattaattccttttttatatattttttatacacgacttattgatgttagaaataaaaaattggtagatagtgtagatattgaatctgaagaagatatccttttgcaaaaaaatttatatagagattcagaaggaaaaataagagaatttattgattactaa

SEQ ID NO: 416359 - DNA, 2322 bp, Staphylococcus aureus
atgagaaaactatgctctttagtattaggtgaacattttagggaggaaaatagtttgcaatattcaatagttatgccttataaagaaacggataaaaagatgtttaatgattgtttagatagtcttaataatcaaacttttaaagattttgaggtgttatttatacatgatggagattcaaatttgcatgacgaaataaaaaatattaattttaattataaagttttagaatctactgtttcatcaaaccctcaatattatagaaatagaggcattaaggaagcaatgggtgaatatatcttgtttatggatagcgatgattacttacatcctaattcgttaagttatgccaatgaaattataaatgaagaacacgattttgtggttaaactaggagtaaaaaatactcactatactaaaagtttaactttcaaggaaaatactcgaagtttttataaacctgaaacttccgaaaaactaagaaagctacttactgatataaataaagaaaatgtatctaattcagagtttattaataaactatatgagcttgaattagtaaagcatagttataataatattaaacaaaataagtttttagacaatattaattatcgtttaaaatctaatgggttaataattaatagacaattcataatagatcatgaactagaatttgatacaactaacagtttatatggagatattccgtttgttatcagattatataatttagtagatagaataaaacaaacaaaagtaaaattatattttaaattaatacataacgatagtattagttatccgtcgcatacacaaaaatttaaagaaactaaaagctattataaattattagcttatgataaagcattgaattattgtcctaatttaaacttagcgagaaaattaaaaggttttgctacgagggaatatttatattatgtatgtaaaagtgaagattttcgaaactcatttaataatgtaaaaccaatatattcaattttacgagatttactaaataaaccttcaaaaagactcaaaatcaatgtgcgtcataaattggaaattaatgctattaagaacagggaatatagaaaagcctataatagatcaagaagaagagttaagttgtataatacttataaatttttgaaacctaaaaatgaaagatatagaaaaaaagttatacaaaaaaatatatttacaaaactgccaatacgtaaagatttggtagtttatgaaagttttttagggaaaaattactctgatagtcctaaagcaatttttgaatatcttaaatcatctgatagcgataaatttaaacatgtttggattttgaataataaagatattttagaagattatccaatattaaatgatgaaaatgtgaaaattattgatagatttagctgggaatatttttattatgtaactgtcgcaaagtattttatactaaatatgagacagcccaaatggttagttaaaaagaaagatcaaactattttatctacgtggcatggtactcctttaaaaagattagtatttgatatggataatgtaacttcagcaagtaaaagttataaacaagatttttatcagcaatcaagaaattgggattacctaattgctgctaataaatatagtgagcaaattttcgagagggcattcaagtatcctacttcaaatattttaacttatggttatcctcgaaatgatatcttaagtaattataatcaagaatataaaaataaggttaaacaaaagttaaatatacctacagataaaaaagtcgttctttatgctcctacttggagagatgatgagtatcatggagtaggtcaatacaaattttcattaaatttagacttagaacaaatgagacaagaattgggagaagaatatatcgtattacttagaatgcattactttatatcggatagattagatatttcagaatatgaaggatttgcgtttgatttttctaaatataatgatgtaaatgatctttatattgtaagcgatatattaatcacagattattcttcagttttctttgattatgctaatctgaaaagacctattttattctacacttatgacttagataaatataaagatgaactgcgtggtttctatatagatatggaaaaagatttaccgggaccgcttttatttgattcattggaagttattaataatataaaaaatattgaggttgtaaataataattataaagagagatacgaagcattttataataaattctgtttattagatgatggaaaagcaacaaaaagagttgttgaaaaggttattaagtaa

SEQ ID NO: 416360 - DNA, 222 bp, Staphylococcus aureus
atgaaccataacactacacaatcagattggcgaacggttactagttgtttagtctcacagaattatatttcgatagtaaaaggtctactacatcatttcacaaacatcgatgatgaggaaatacttgataaaacctatgacgattttatgaatgatgaatctataacaacggtacttaataatgattttcaagatattatcaatcgctacttatcaaaataa

SEQ ID NO: 416361 - DNA, 312 bp, Staphylococcus aureus
atgaatagatatatcacaaggggtattgccaatcacttacctaccacattacaacaccaattatggcaacttgtagcgaaacgtgaaagcgaacagttcaaggaactagaagaaatggattactttcatgtctttcagttcaacatgtacaaaaatcaattatacgtaaaacacaaacaagaacgtcctgagtatatcaaaattcataaagctaattactcaaaagctatcaatataaataaggtatacattatacgagaagatgatgtatacctttcttattacgtcatgttactaccggaagaatactag

SEQ ID NO: 416362 - DNA, 342 bp, Staphylococcus aureus
atgatgacattagaacaacaactcaaacactatataactaacttattcaatctgccaaaggatgaaaaatgggaatgtgaatccatcgaagaagtcgctgatgatattctacctgaacaacacgtaagacttggtccacttagtaataaaatacttcagactaatacctactactcatacacacttcacaaaagtaatatctatcccttcatcctctactatcagaaacaactcatagccatcggttatatcgacgaaaatcacgatatggatttcttatatctacacaacactatcatgccccttttggatcaacgatacttactaacaggaggacaataa

SEQ ID NO: 416363 - DNA, 1677 bp, Staphylococcus aureus
atgaagggtaaaattgcactttattcacgtgttagtacgtctgagcagtcagaacatggttattctgtaaaagagcaggaacaagtactcatcaaagaagttgtgaaaaatttcccaggttatgactatgagacatatactgactcaggcatttcaggtaaaaatattgaaggtcgtccggcaatgaaacgtctattacaagatgttaaggataataaaatcgaaatggtgttaagttggaaattgaatcgtatctcacgatcaatgagagacgtgtttaatattattcatgaattcaaagaacatgatgtagggtataaatcgatttctgagaatattgatacatccaatgcttctggagaagtactcgttacaatgtttgggttaataggatctatagaacgccagactttgatttccaatgtgaaactttctatgaatgctaaggcaaggagcggagaggcaatcaccggtcgtgttttaggctacaaattatcacttaatccacttacacagaaaaatgatttggttatcgatgaaaatgaagctaatattgtacgtgaaattttcgatttatatttgaatcataataaaggcctcaaagccattacaaccgtacttaatcaaaaggggtatcgtactattaatcaaaagccattttcagtgtatggtgttaaatacattttgaataatccagtctataaaggctatgtcagattcaataaccatcaaaactgggctgtacagcgaagaagtggcaaaagtgataaaaatgatgtgatattggtcaaaggtaaacatgaagccattataagtgaagaggtatttgacaaagttcatgaaaaattagcttctaaaagttttaaaccgggcagacctattggtggagatttctacttacgtggtcttattaaatgcccagaatgcggaaataatatggtatgtcgacggacgtattataaaacgaaaaagtccaaagaacggacaatcaagcgttattacatttgttccttattcaatcgttcagggagttctgcatgtcacagtaattccatcaatgctgaagtcgtcgagcgtgtaattaatgttcatttgaatcgtattctgtctcaaccagatattatcaagcagattgcgtcaaatgtgatcgaagaactgaaacaaaagcatagtaaccaaccagaaattaaatatgacattgatagtttagaaaaacaaaaagctaagcttaaaacacaacaagaacgattattggaattgttcttagatgatgaaatggatagcgaaatgttaaaagctaaacaaagtgaaatgaatcaacagttagaagtattagaccaacaaattaaagaagcaaaacaagcaaatcaatcacaggatgatatacccaattttgataagttaaaagcacgactcattttgatgataacacgattcagtgtgtacttaagaaaggctacacccgaagctaaaaatcaacttatgaaaatgttaattgattcaattgaaattacgacagataaacaagtaaaacttgtaaggtataaaattgacgaaagtcttatccctcaatctttgaaaaaagattgggggtctttttttatgcccaaatttcaatttgaaatatatggtcaaaatgattatttcatcgaccaaattaccacttttaccacttag

SEQ ID NO: 416364 - DNA, 1644 bp, Staphylococcus aureus
atgaatcatatattacaaatgttatctaagctattaagtgtggctaaggaggcaatcgaccgtcaaggtctgattgctatcctaactattcctgttaataatgacgatgaaatagaagaaacggctcaaggtgaaaccgtgtataacgaacttatcgatcagttacgacttaatatcccaaaagatacggattatcgacctaacatctatagttattttggtattaagaagaatcctaatgacaccgtactcatggaaatgatgataaaggtttttcatatcaaacgctttaattcagaactgtttgttttcaaagctaacgggtggcaaaagataaatggagatgaattacaagggttgatatctaaaatgatacaagtattgcttgtagattataagccttcactaagcactctaaaaaatgtcgtagatggattgcaaaaatcaacagatgtagaagaacttgttgaaaatgagcactatattggttgtggtgaaaatatgttcgatcttaatacgtttcaagtcgttaaaaattcaatcgatatctttcctaaaacacgattgaatttatcattaagtacaaatgatgtaattactgataagataccgccttattttaagcaatatatgttacaacttgcgaattatgacgatgatttacaatactttcttttccagcatacagcagtattacttacagctgatactaaataccgtagaggtctcattttgtatggtggagctaagaatggtaaatctgtatatattgaactagttaaatcatttttctatagtaaagatattgtgtctaagccacttaatgagcttgaaggtcgttttgacaaagaaagtttaattgacaaaagtctaatggcaagtcatgaaattggacaatctaggattcaagaaaagatcgtaaatgacttcaaaaagttattatctgtagaatcaatgcatgttgatcgtaaaggaaaaactcaagtggaagtcattttggatttgaaacttatttttagtacaaatgcgatacttaattttcctcctgaacatgcgaaagctttggagcgtcgagttaatattattccatgtgagtattatgttgaaaaagcggacacttcattaattgataagctccagagtgagaagaaagaaatctttctttacttgatgtatgtgtatcaacagattgtaaaagcagatatcgagtaccttgaaaatagccgtgtcactgaaattactcacgattggttaaattttggatatgaatttgtttctagcaggtccgtaagtattccaaatcagaaagcatgtattaatttactcagaaaacttatagaaatcaaatcaggatcacgaatcaaagtatccgagttaaataaagttattaatgaagaaataaaggtgagttctcaggttattaatcagttaattcaagcaaactttgatactcaaaccaaactatacaatggctacgattattggattgatttaggttggaaagaagccaataaaaaagagattcatgatatttcggaaaaagataatattatttcattagataaaaatgaaaatataacagacgatgaggcattagatgaagagaatttggattttgattgggaggactttgacgatgaataa

SEQ ID NO: 416365 - DNA, 372 bp, Staphylococcus aureus
atgaataatgatagaggaaaaagtcttcaaattccccaaagtacatcgttaaaagaaggatctatatacgttgctacattacattctgtgactgagacagattactcaggcgacataaaacatcaatttacgtatgaaatagagatagatcaacaaatattctatgtgaaccgtagtgttgtggtcaatgtgacacatcaacaattatcaattaatgactggctcgaacgtcatagtaactatagcgcaagtcatgaaaactatgagccttatattgatcagaaacatttaattctattaggtcaatataacggtaactattatgtacaagatgtagcatcgttagatgcgtttggaggcgtattatcatga

SEQ ID NO: 416366 - DNA, 1110 bp, Staphylococcus aureus
atgtatcaaacaaatacacgtgatttaattacaaaattacctcaaagcaataaaacagaacactttttaatgaacaaattttcaaatcaagataaagttcagcagctacaaagacaaattagccaacagctagatcaacaatataatgagcttttgtctaatgaaaaagctaagctagaccaatatgtggaagtacaccataatttagaaccattaaagaaagagattgaatcagaatctattaaccttgataccgataaattacctgatatcaaagcgacaatgcttgaaaaggctaagaacgatgaacattctgataaaatcgaacacctatttgatagattagatcagtcattaaatggtacgaatcgattatatacacaattatcgttgattggcacacgaacacatcggataacaacgaaaagatttaatgttcaaggcttacctaaattagtccaacaaacgattttaccttcgcaatttaaaaaggtttatacaatagattttaaatcattcgaaccatcagttgctgcgtatatgacacaagacgaacaactgattgactacttgaatcttgaagaagggttatacgatgcattactgagagacttatctttgtcaaaagagaagcgcgtgagtgtgaaacgtgcatttatagggtcatttctttttggcggtcgttatagtagctctaaattcaaaatcaatcaagaggttagtgaaattaactggctacaagtaatgagcaaattcaagaagatcattgaatttaaagagcaagtcgaaaaatataaaacaatgcctacgccttacggcattgaacatgatatgagcgcatttcaaggtagtagtattatggcaatttacgtacaaacggtagcgagctatattttcaagcacattttgttggaagtgtacaaagcacagtgcgaacaaaaaacgttcaagattatagtgccgatacacgatgcgattatgattgaatgtaatgataaggagattgcacaaagtgtagcacagctcatgaaagatacagctaatcaactgtttaatggtgaatttgcacatgtgacagtggaagctttaggaggtatagacaatgaataa

SEQ ID NO: 416367 - DNA, 2013 bp, Staphylococcus aureus
gtgaataaaaatattacagctctaaaatctactgaaaatactacatatatgcagtatacggttcatatcgatgatcaaattataaataatataaaagagtgtaccaaaaagtttaaaattttgcctatggaagataaaattccactatcaccgttgttacaaccagaatatgcaggagaggtacaagtttttattagtacatatgagcagtttatgattaattttggtaaagtaatattggatagtcaaggcataaaaatacagtttgaaagtgaatcattaagtagtattcaacgaggcattcaagaacattgttacttaaataagcgaacaaatgacattgatgtgactaaagaatggtatttatgcaaattttcaaatcgaacattagaagaggataaaaatcaactgtataatgctttaaagcaactcatgaatgattctaaaaataaaaagcaagcttttcaagaggtgtttaaggttcatattgatatttatctctacaataaagaaaaatctgaatataagtatcaagcatctagttatttctatcttgtaaaagaaaatcctaaaataatttataaaaaaagacatttacaagagaaacaagggatcaagggtacaactttcacgaacaaattaaaattattgaacaaaatgtatggtgtagatgttgcaaaatatcagccattttataattctaataatcctgaatatgaaagaggtcaatttggtgaaagatacatttctcaaagatctaactatgaatttaatagacttcaatatcaaattatatatatattatcgaaaatacttgataagcatccattaccaaagtcagataataattataaacatattccaactattgaaaaagcaatattaagagatgattcccataatttttatgagtattttgaagatataatgaaagaaattatgaatatggataattctcccttacaggaaaaattattgactgattttacatatcaatcccaatgtagatggtactctgaaaataaaaaattaaaattgcaacttgaaagatttatgcataaagttttagagagtaattattatgagggcaacaaattattgagaatgatgtctaacgcaattgaagaaacaatcaatgaggctaaagaagataaggttcatttcaattattttaaagattattttttgacagacggtggggtgaagaattgggagcaaattagcgagaaaattactgaattcaatggtaaagttattaacgatatccaacatgaatataataagatacagtccaagaatacaaatcaaaatcagaaactaaactttgtttatttatatcattgctttgagtttagtaataacatagtaaaagcaaaagataatgaaagtaaaaattatatcttgttttttatagataaatataaaataaagacaccatttttggatcaattattaataaattgtttgaatcaagaaatagatcaggaaagtattaactacaatatgcaaacaatgtttgaaaaagaaagatatgatagaagtagtaccattgaaaaattagtagcaacaagaaaatttaagtatgaaaaagatgattcagatttattcaaacaacttttcaatgatgttgaaaattcaatagacagattaggtatttacttactaaataatggtataaattcgaatgatgaaaatgcaagatactatagatcgtttttaaaggaacttagtagaataaaaagtaaattaacgccattttctcttgaaataagtaagtctagcggaagagagcaacattatcctgatgatgctgttgatgataaagatgagagaagaaaaaataaagaagaaacatatcatgcttttgatgataaaagcgatattgactacaaattaaagaataaaataagtgattatatcgataatttattgtcagttaaaattaggaataatttgtatgatattagtccaaatacaaaaagcaataattataatgagccaactcaaaaatga

SEQ ID NO: 416368 - DNA, 930 bp, Staphylococcus aureus
atgaaaaaatctgttagattatataatatgattgaatattgtaatgaaaataggaacttcaaattaaatgatttaatgtcagaatttaatatttctcgtagtaccgctttaagggatataaaagaaattgaagcattaggagtacctttatatagtaatccagggaaaaatggtggttatacgatcataggtaatcgagaccaaacgaaaatagcaatctcagatgaagagttgaaagctttagtatttacactttcgagtatttcaaatgtgagtaatctaccttttcaaacagaatatcaagaaatattaaaaaaattatataataactcgaataaaaaagagttaataaaccaatataatgatctatttcaatattttaatgaagataagtatcagttcaaaagttataagttatttaatgaaatcattagattgataattgagaataagtcttttgaaacctgttattcacaaaactatattaaagaacaatataaaggtattggcattatgtataaaaatcatcaatggtattttgttgtagctaatatagaatcaaagttagtgaatctattaaatatttcgaaaataaaagaactatatgaaatgggagagactcaagagtgtaatgatataactatgcagaattttcaacagttcatggttaaaaatgaaacagctattgatattcttattagaagcaatgttatgggattgaatatcttgaaaggctacctgtggagtgactatatgattgaaaatattgacgaagagacatatttatttaaatcaaaagtgaacgcgaaagatatagattttatagctaagttaattgtcacaggtggtgtcaatgtaaaagtagagacccctaatagtttgaaaaatgctgttaaagttgaattaactaaaataataaacatgtattaa

SEQ ID NO: 416369 - DNA, 1071 bp, Staphylococcus aureus
atgaatttaactactcaaatcacaaaaatgttaggtattaaatatcctattatacaagctggaatggcaggaagtactacgccagaactagtttctactgttagtaaacaaggaggcttaggtatgataggagcaggttattttgattcacatcaactttcgaaagagattttagaagttcaaaaactgacacaagctccttttgcagtaaatctatttacccccaatgatattaagtacgataaaaaacaaattgagcagatgaatacaaaactcaaaccatatagagaagcgcttggattatctactcccaaaaatagtacggttaaagaaaaagaaaagtttgaagatgcaatagaagttattgaatcattaaaagtacctatcattgcttttacttttggtattccaaatcaaaatattattaaacgacttcataatgcaggaaaaattttaattggaactgcaacatcagtcgaagaagcagttgaaaatgaaaatgccggtatggatatagttgtagcccagggctatgaagcaggtggccacagaggatcatttacaacaatcaatggtgaatttccattggtcggtactttatctttagtaccacaaattgttgataatgtgtctataccagttattgcagctggtggtattatggatggaagaggtttagtagctagtttagctttgggggctggagcagcgcaattaggtactgcttatttaacaacgaatgaaagtggcgctgatgacaaaatcaaaaatgaaattattgaaagctctgaaacagatacaatactgacaaatgtatttagtggcaaattggctcgcggaattatgaatgaatttgtacacaatatgaatttatattcaaaacaggtgcctccttatcctttacaaaatcaattaacaacgcaaatacgaaaatctgctttggagaaaggatatactgagtggacccatatttggagtggacaaagtactagattagctgacacggtcgatgcagctcaattaacaaaaaatattattaatgatgcagtcaaaattatcaataataagtga

SEQ ID NO: 416370 - DNA, 867 bp, Staphylococcus aureus
atgaacttaaatgacttagaagctttttataaagtctgcgaaaattgtagctttactaaagcagcgcaagaactgaattatgttcaatcaaatgtaacagctaaaattcaaagattagagtcttattatcaagtgaaattactatatagagataaaaaaggaattaaaccgacaccagaaggtattgaattactaaattatattaagagaatattcacaattttacatgaagcagaacataatgtaagcaacaataaaaaattaaatattaacataggtacaattgaaacaatagctgcagttcatttacctaaattattgaatgaatataagaagaaaaatccaaaaattcaaattaatttaaaaacagataatagtattaaattaattgaacatgtaaagaatagagaaatggattgtgcttttatatctgggaatattaacgataaagatcttatttgcacaaatatctttaatgaaaaattagtgattttatctcaaaagggcaactttaaacagaatataaacgaaaataagtctattataatgtttggcgaaggttgtttttatagaaaaatttttgaagattggcttaattatcatgatattaatatagaaaataaaatgacattaaatactttagatggcattttggggtgtgttgaagctggattaggtatagcatttttacctatgtcagtattaaataaaggaaatagcgatggtatagaaataaccaaagtagaggaatcatttcaaacaatatcactaaatatcatttatcgacaagataataaaaataataatgtgataaatcaattgaaacaagttgcttttgagaaaatgaaatcaaatataataaaatag

SEQ ID NO: 416371 - DNA, 1191 bp, Staphylococcus aureus
atgaaaaaacatgcatataaacaacttttattaggtatgatagcaatgttaatcgttatgtctatcagtaggtttgcttatacacctatattaccatttatgcaacaagatacatctatggacaatcaagaagcggggtttttagctacatggaattatttagggtatttagttggcgctgttattccaatattttatatttataaaactaaagtaatagatttgaaaatttaccttgctttaaatattatttctactatcttaatgggatttacagaacaatatttaatttggtcaatttttcgattgatttccgggataacaagcgggacggtatttgtattaacttcaaacatagtactagattcattaaagaaaatacaaagagaggggatatcaggtgtattatatagtgctgttggattaggtatttttttaagtagtatttatctttatttttttgccagtgtggattcatggaaaatggtttggtttgttttaggaatagtttcactggttttgggcttaattgtattggtttttatgaaagaaaatacaaatacaataataaattttaaagaagaaaaaatgaaaattaataatagactaaacaaaaagtttgttatctttttttctattgcttacttctttgaaggggcaggttatattattactggtacttttctagttgctatagttaaatcaattccttctgttgctgaatatgcgactttaagctggatgtttgttggattaggtgcaattccttctacattaatttggtcacttatagctgaaaaaatcagttataaaaaagccatttatggtgcatttattttacaaattataagcgtttgtctacctgtttttactcatgaaatttttagtttagttattagttcagttctatttggagggacttttttaggtttaactacattatttatttctaaaggacaaagtttaatgtacaaaacagatgaccccttaaatttagtctcattactgactgtaatatacagtttaggacaaatgttagctcctatgtttgcgggaattttaattggtaaatcgaataattataacattgctttaatatttgcaactgttttattaatactgggtcttatttctacaatatttagctataaacaaaacgaaagtattggtgaaaaatatgaacttaaatga

SEQ ID NO: 416372 - DNA, 189 bp, Staphylococcus aureus
gtggtaggtttgctctggggcatgggctctacagtagcagtttcctcattagattcacttttttctacactagatttatcacttttagacgcattctgtttatcctcatctttactagacttttcgctatcttcagaatcagtatccgcactagaagttgtagcaggtgtagtagccgaagcttcataa

SEQ ID NO: 416373 - DNA, 216 bp, Staphylococcus aureus; identical to SEQ ID NO: 409932

SEQ ID NO: 416374 - DNA, 174 bp, Staphylococcus aureus; identical to SEQ ID NO: 407440

SEQ ID NO: 416375 - DNA, 216 bp, Staphylococcus aureus; identical to SEQ ID NO: 408001

SEQ ID NO: 416376 - DNA, 1194 bp, Staphylococcus aureus
atgaaaggtgcaatggcttggccctttttgagattatatatattaacattgatgttctttagtgccaatgcaatcttaaacgtatttataccgttacgagggcatgatttaggcgcaacgaatacggttatcggtatcgttatgggggcatacatgttaacagcaatggtgtttcgaccatgggcaggacaaattattgctcgtgtcggtcccattaaagttttaagaattattttgatcatcaatgccatagctttaattatttatggttttactggattagaaggttatttcgtagcacgtgttatgcaaggtgtgtgtacggcattcttttctatgtctttacagttaggtattattgatgcattaccagaggaacatcgttctgaaggtgtatcattgtactcgctattttcaacgattccaaacttaattggaccattagttgccgtaggtatttggaatgcaaataatatttcactatttgcaattgtcattatctttatcgcattaacaacaacattctttggctatcgcgtgacctttgctgaacaggaacccgatacgtcagataagattgaaaaaatgccgtttaacgctgtaactgtttttgcgcaatttttcaaaaataaagagttgttgaacagtggtattatcatgattgttgcatcgattgtatttggtgcagttagtacatttgtaccgttatacacagtgagtttaggattcgcgaatgcgggaatctttttgacaatacaggccatcgcagttgttgcggcaagattttacttaaggaaatacattccgtcagatggtatgtggcatcctaaatatatggtatctgtactatcattattagtaatcgcgtcatttgtagtggcatttggtccgcaagtaggtgcaattattttctatggtagtgcgatattaataggaatgacgcaagcaatggtgtacccaacattaacatcatacttaagcttcgtcttaccaaaagtaggtcgtaatatgttgttaggtttatttattgcctgtgcagacttaggtatatcgttaggtggcgcattgatgggacctatttccgatttagtaggatttaaatggatgtatctaatttgtggtatgttagtcattgtaataatgattatgagtttcttgaaaaagccaacaccacgtccagcgagtagtctttaa

SEQ ID NO: 416377 - DNA, 777 bp, Staphylococcus aureus
atgagtaatacggcacttggattgacggcattgcttttagtcattccgattatcatttcatataaagaaggtttacatattattaaagatttaattgttgcgacactacgcgcagtggtgcaattaatcattttgggatttttgctgcattatatttttaaaataaacgataaatggctgcttattttatgtgtattggtcattattattaatgcatcatggaatacaattagtcgagcatcaccagtgatgcatcatgtgttttggatatcatttctagctatcttcattggaacagcattaccacttgcaggtactgtagctacaggggcaattcattttacagccaatgaagttatacctatcggcggcatgcttgcaaataatggcttgattgcaattaatttagcttaccagaatttagatcgtgcattcgtacaagatggtactaatattgaatctaaattatcacttgcagctacacctaaattggcttctaaaggtgcaatacgtgaaagtattcgtttagctatagtgccaacaattgattcggttaaaacatatgggcttgtgtcgattcctggtatgatgacaggcttaattattggtggcgtaccacctttacaagcgattaaatttcaattgttagtcgtgtttattcatacaactgcgaccattatgtctgctttgattgcgacatatttaagctatggtcaatttttcaatgcaagacatcaattagtagcacgaaatacggatgttaagagtgaatcatga

SEQ ID NO: 416378 - DNA, 1227 bp, Staphylococcus aureus; identical to SEQ ID NO: 415077

SEQ ID NO: 416379 - DNA, 1401 bp, Staphylococcus aureus
atggacacatcaaaacaatttagaggtgacaaccgattgcttttgggtatcgttttaggggttattaccttttggctattcgcgcagtcacttgttaatcttgttgtcccattacaatcaacatatagtagtgacgttggaacgataaatatcgctgttagcttatctgccttatttgctggtttgtttatcgtaggtgctggtgatgttgctgataaatttggtcgcgtcaaaattacttatgtaggattgatattaaatgttgtaggttcattactcatcatcattacacctttgccagcatttttaattataggtagaataattcaaggtttgtctgcagcatgtattatgccatccacacttgctattattaacgaatattatattggtacaagaagacaacgtgccttaagctattggtctattggttcttggggtggtagtggtatttgtacgttgtttggtggcttaatggctacatatataggttggcgttcaatatttgttgtttcaattctattaacattattagcaatgtacttaatcaaacatgcacctgagactaaagcagaaccaatcaaaggtatgaaagcagaagctaaaaagtttgacgttattggtttagtcattttagtagtgacgatgttaagtttaaatgtaatcatcacacagacgtctcattttggtttagtttcaccgttaattctaggtttaattgttgtgtttatctgttcattagttggttttgtatattacgaaaataaaataaagcatccacttgttgatttttcaatttttaaaaatagaggatacagtggtgcaactatttcaaacttcttattaaatggtgtagcaggtggtgcacttatcgttattaacacgtattatcaacaacaattaggatttaattcttcgcaaacgggttatatttcattaacgtatttaatagcagtgttgtcaatgattcgtgtaggtgaaaagattttatctcaacatggtccgaagcgcccactattactaggaagtggctttacagtgattgggttaatcttattgtcgttaacatttttaccagaagtgtggtatatcatatctagtatagttggatatttattgtttggtactggtttaggattatatgctacaccatcaactgatacagcagttgctagtgcgccagatgataagtcgggtgttgcttcaggcgtatataaaatggcgtcatcattaggaaatgcatttggagtagcagtatctggtacagtttatactgtgttagcagctaatttaaatttgaacttaggtggtttcacaggtatgatgtttaatgccttgctagcaattgttgcatttttagtcattttactattagttcctaaaaatcaaacgaatttgtaa

SEQ ID NO: 416380 - DNA, 1497 bp, Staphylococcus aureus; identical to SEQ ID NO: 415081

SEQ ID NO: 416381 - DNA, 807 bp, Staphylococcus aureus; identical to SEQ ID NO: 415084

SEQ ID NO: 416382 - DNA, 657 bp, Staphylococcus aureus; identical to SEQ ID NO: 415085

SEQ ID NO: 416383 - DNA, 1359 bp, Staphylococcus aureus; identical to SEQ ID NO: 415093

SEQ ID NO: 416384 - DNA, 948 bp, Staphylococcus aureus; identical to SEQ ID NO: 410070

SEQ ID NO: 416385 - DNA, 867 bp, Staphylococcus aureus; identical to SEQ ID NO: 415098

SEQ ID NO: 416386 - DNA, 687 bp, Staphylococcus aureus; identical to SEQ ID NO: 415099

SEQ ID NO: 416387 - DNA, 1440 bp, Staphylococcus aureus; identical to SEQ ID NO: 416343

SEQ ID NO: 416388 - DNA, 468 bp, Staphylococcus aureus; identical to SEQ ID NO: 414366

SEQ ID NO: 416389 - DNA, 1560 bp, Staphylococcus aureus
ttgaagattaaagcgcaagttgcgatggtattaaatttagataaatgcataggatgccatacgtgtagtgtgacatgtaaaaacacttggacaaatcgtccaggtgctgagtacatgtggttcaataacgtagaaacgaagccaggtgtagggtatccgaaacgttgggaagaccaagaacactacaaaggtggttgggtactaaatcgtaaagggaaacttgaattaaaatctggaagtagaatttcaaaaattgctttaggtaaaattttttataacccagatatgccattaataaaagattattatgaaccatggaactataattatgaacatttaacaactgcgaaatcagggaagcattcgccagttgctagagcgtattcagaaattacaggggataacattgaaattgaatggggacctaactgggaagatgacttagcaggtggtcatgttacaggcccaaaagatcctaacatccaaaaaatagaagaagatattaaattccaatttgacgaaacttttatgatgtatttaccacgtttatgtgaacattgcttgaatccaagttgcgttgcatcgtgcccttcaggtgctatgtataaacgtgatgaagatggcattgtattagttgatcaagacgcatgtcgtggatggcgttactgtatgacaggttgtccatataagaaagtttacttcaattggaaaacgaacaaagctgaaaaatgtactttctgtttcccgagaatcgaggcgggtatgcctacggtatgctctgaaacttgtacaggacgtatgcgttacttaggtgttttattatatgatgcagatcgagttcatgaagcggcttcagcagtagacgagaaaggtttatacgaaaaacaattagatatattcttaaatccatttgacgaagaagtcattgctcaagctgaaaaagatggtattggttatgattggattgaagctgcacaaaactctccaatttataagttagcaattgaatataaacttgcatttccgttacatcctgaatttagaacgatgccgatggtttggtattgcccaccacttagcccaattatgagctattttgaaggtaaaaatacaactcaaaatccagatgcgattttcccagccattgaagaaatgcgtttacctattgaatacttagctaatattttcactgcaggagatacagagccagtaaaaggagccctacaacgtatggcaatgatgagaagttatatgagatctcaagttactcaacagccatttgacacgtctcgattagagcgattaggtataaccgagcgccaaactaaagacatgtatcgtttattaggactagctaaatatgaagatcgatttgttattccaacatcacacaaagaaacctatttagatacgtatcacgcacaaggtagtacaggatacaattacggcggcgagcattttggagataactgtgaaggctgtggcgttgcagtaggttcagggaaaactggtcaagaaatttataatgagaatttctatggagggattttccgtgattaa

SEQ ID NO: 416390 - DNA, 678 bp, Staphylococcus aureus; identical to SEQ ID NO: 415116

SEQ ID NO: 416391 - DNA, 453 bp, Staphylococcus aureus; identical to SEQ ID NO: 405006

SEQ ID NO: 416392 - DNA, 741 bp, Staphylococcus aureus; identical to SEQ ID NO: 405009

SEQ ID NO: 416393 - DNA, 366 bp, Staphylococcus aureus; identical to SEQ ID NO: 415123

SEQ ID NO: 416394 - DNA, 1278 bp, Staphylococcus aureus; identical to SEQ ID NO: 413343

SEQ ID NO: 416395 - DNA, 423 bp, Staphylococcus aureus; identical to SEQ ID NO: 415124

SEQ ID NO: 416396 - DNA, 2106 bp, Staphylococcus aureus; identical to SEQ ID NO: 416060

SEQ ID NO: 416397 - DNA, 1443 bp, Staphylococcus aureus; identical to SEQ ID NO: 415126

SEQ ID NO: 416398 - DNA, 1278 bp, Staphylococcus aureus; identical to SEQ ID NO: 409952

SEQ ID NO: 416399 - DNA, 432 bp, Staphylococcus aureus; identical to SEQ ID NO: 405025

SEQ ID NO: 416400 - DNA, 1035 bp, Staphylococcus aureus; identical to SEQ ID NO: 405026

SEQ ID NO: 416401 - DNA, 615 bp, Staphylococcus aureus; identical to SEQ ID NO: 415133

SEQ ID NO: 416402 - DNA, 456 bp, Staphylococcus aureus; identical to SEQ ID NO: 415136

SEQ ID NO: 416403 - DNA, 444 bp, Staphylococcus aureus; identical to SEQ ID NO: 415137

SEQ ID NO: 416404 - DNA, 675 bp, Staphylococcus aureus; identical to SEQ ID NO: 415139

SEQ ID NO: 416405 - DNA, 666 bp, Staphylococcus aureus; identical to SEQ ID NO: 415141

SEQ ID NO: 416406 - DNA, 456 bp, Staphylococcus aureus
atggtaaaacatttacaagaccatattcaatttttagagcagtttataaataacgttaacgcattaactgcaaaaatgttgaaagatttacaaaatgaatatgaaatttcattagagcagtctaacgtattaggtatgttaaataaagaacctttgacaattagtgaaatcacgcaaagacaaggagtaaataaggccgcagtaagccgacgaattaaaaagttaatcgatgctaaattagttaagttagataaaccaaatttaaatattgatcaacgtttgaaattcataaccttaactgacaaaggtagagcatatttgaaagaacgtaatgcgattatgacagatattgcgcaagatattactaatgatttaaattctgaagatattgaaaatgtaaggcaagtattagaagtcatcaatcatcgcattaaaacatatagcaatcataaatag

SEQ ID NO: 416407 - DNA, 1209 bp, Staphylococcus aureus; identical to SEQ ID NO: 415144

SEQ ID NO: 416408 - DNA, 648 bp, Staphylococcus aureus; identical to SEQ ID NO: 413341

SEQ ID NO: 416409 - DNA, 639 bp, Staphylococcus aureus; identical to SEQ ID NO: 415148

SEQ ID NO: 416410 - DNA, 420 bp, Staphylococcus aureus; identical to SEQ ID NO: 415149

SEQ ID NO: 416411 - DNA, 1050 bp, Staphylococcus aureus; identical to SEQ ID NO: 412712

SEQ ID NO: 416412 - DNA, 1209 bp, Staphylococcus aureus; identical to SEQ ID NO: 413339

SEQ ID NO: 416413 - DNA, 609 bp, Staphylococcus aureus; identical to SEQ ID NO: 413437

SEQ ID NO: 416414 - DNA, 1233 bp, Staphylococcus aureus; identical to SEQ ID NO: 415155

SEQ ID NO: 416415 - DNA, 327 bp, Staphylococcus aureus; identical to SEQ ID NO: 406338

SEQ ID NO: 416416 - DNA, 1020 bp, Staphylococcus aureus; identical to SEQ ID NO: 415157

SEQ ID NO: 416417 - DNA, 654 bp, Staphylococcus aureus
atgatatcaattcacgcaatttcgacaggaaaaatccaagatttgccttatagctcgaaaagaccgatacgctctgctttagataaaactaagatttcacaaacaacatggttatcttcaactggtttcactggtgatgaacaggcttataaagatcatggtggaccacataaagcagtttgtgggtttagtaagcataattatgcactgtatcaagatgatttacctacactacctactcatgcgatgtttggagagaatttaacatttgattatttagacgaatctgatgtttactttggtaatcaatatcgtttaggtgaagcgttaattgaggtttctgaaattagagaaccatgctggaaaattcaagcaaaatataatattcctgatttagtgaagcgcatgtctacatctggtaaaacaggtttctatttccgggtattaaaacaaggctatgtatctccaaatgatcagctttacttaatacaagaagcaccaatcgaacatcgtttatctgtacaacagcttaatgacctttattataatgatagacaaaatcaagatatgttacgatatgcactaaacaatccatttctgtcaccaacaagacgcgataaacttcaaaaaatgtataacagaacattgaaataa

SEQ ID NO: 416418 - DNA, 936 bp, Staphylococcus aureus; identical to SEQ ID NO: 406333

SEQ ID NO: 416419 - DNA, 885 bp, Staphylococcus aureus; identical to SEQ ID NO: 410342

SEQ ID NO: 416420 - DNA, 1662 bp, Staphylococcus aureus; identical to SEQ ID NO: 415162

SEQ ID NO: 416421 - DNA, 1239 bp, Staphylococcus aureus; identical to SEQ ID NO: 413337

SEQ ID NO: 416422 - DNA, 882 bp, Staphylococcus aureus; identical to SEQ ID NO: 416322

SEQ ID NO: 416423 - DNA, 570 bp, Staphylococcus aureus; identical to SEQ ID NO: 415326

SEQ ID NO: 416424 - DNA, 765 bp, Staphylococcus aureus; identical to SEQ ID NO: 415166

SEQ ID NO: 416425 - DNA, 531 bp, Staphylococcus aureus; identical to SEQ ID NO: 406321

SEQ ID NO: 416426 - DNA, 918 bp, Staphylococcus aureus; identical to SEQ ID NO: 413335

SEQ ID NO: 416427 - DNA, 636 bp, Staphylococcus aureus; identical to SEQ ID NO: 406319

SEQ ID NO: 416428 - DNA, 186 bp, Staphylococcus aureus
atgacaacagcattaattggtgtaattgtattaatcttactaattattagctttgtgccaaactaccgtgctatgaaatcagcaaaagaacaaggaagtaatgcaacaagagctacaattatggtaggcatagatattatcttaattgtacttatcatcgtgacattattattaaaatatatgtaa

SEQ ID NO: 416429 - DNA, 357 bp, Staphylococcus aureus; identical to SEQ ID NO: 416319

SEQ ID NO: 416430 - DNA, 1380 bp, Staphylococcus aureus; identical to SEQ ID NO: 415170

SEQ ID NO: 416431 - DNA, 738 bp, Staphylococcus aureus; identical to SEQ ID NO: 406312

SEQ ID NO: 416432 - DNA, 693 bp, Staphylococcus aureus; identical to SEQ ID NO: 413333

SEQ ID NO: 416433 - DNA, 798 bp, Staphylococcus aureus; identical to SEQ ID NO: 406310

SEQ ID NO: 416434 - DNA, 948 bp, Staphylococcus aureus; identical to SEQ ID NO: 406309

SEQ ID NO: 416435 - DNA, 3039 bp, Staphylococcus aureus; identical to SEQ ID NO: 416318

SEQ ID NO: 416436 - DNA, 474 bp, Staphylococcus aureus; identical to SEQ ID NO: 406307

SEQ ID NO: 416437 - DNA, 234 bp, Staphylococcus aureus; identical to SEQ ID NO: 406306

SEQ ID NO: 416438 - DNA, 1125 bp, Staphylococcus aureus; identical to SEQ ID NO: 415179

SEQ ID NO: 416439 - DNA, 954 bp, Staphylococcus aureus; identical to SEQ ID NO: 415180

SEQ ID NO: 416440 - DNA, 501 bp, Staphylococcus aureus; identical to SEQ ID NO: 413331

SEQ ID NO: 416441 - DNA, 423 bp, Staphylococcus aureus; identical to SEQ ID NO: 415182

SEQ ID NO: 416442 - DNA, 1956 bp, Staphylococcus aureus; identical to SEQ ID NO: 415186

SEQ ID NO: 416443 - DNA, 744 bp, Staphylococcus aureus; identical to SEQ ID NO: 415187

SEQ ID NO: 416444 - DNA, 327 bp, Staphylococcus aureus; identical to SEQ ID NO: 413330

SEQ ID NO: 416445 - DNA, 690 bp, Staphylococcus aureus; identical to SEQ ID NO: 415191

SEQ ID NO: 416446 - DNA, 453 bp, Staphylococcus aureus; identical to SEQ ID NO: 406290

SEQ ID NO: 416447 - DNA, 1716 bp, Staphylococcus aureus; identical to SEQ ID NO: 415193

SEQ ID NO: 416448 - DNA, 411 bp, Staphylococcus aureus; identical to SEQ ID NO: 415194

SEQ ID NO: 416449 - DNA, 303 bp, Staphylococcus aureus; identical to SEQ ID NO: 406287

SEQ ID NO: 416450 - DNA, 906 bp, Staphylococcus aureus; identical to SEQ ID NO: 416309

SEQ ID NO: 416451 - DNA, 909 bp, Staphylococcus aureus; identical to SEQ ID NO: 415197

SEQ ID NO: 416452 - DNA, 942 bp, Staphylococcus aureus; identical to SEQ ID NO: 413326

SEQ ID NO: 416453 - DNA, 798 bp, Staphylococcus aureus; identical to SEQ ID NO: 415200

SEQ ID NO: 416454 - DNA, 507 bp, Staphylococcus aureus; identical to SEQ ID NO: 415205

SEQ ID NO: 416455 - DNA, 495 bp, Staphylococcus aureus; identical to SEQ ID NO: 415206

SEQ ID NO: 416456 - DNA, 1260 bp, Staphylococcus aureus; identical to SEQ ID NO: 415207

SEQ ID NO: 416457 - DNA, 486 bp, Staphylococcus aureus; identical to SEQ ID NO: 413321

SEQ ID NO: 416458 - DNA, 234 bp, Staphylococcus aureus; identical to SEQ ID NO: 415210

SEQ ID NO: 416459 - DNA, 600 bp, Staphylococcus aureus; identical to SEQ ID NO: 415211

SEQ ID NO: 416460 - DNA, 1023 bp, Staphylococcus aureus; identical to SEQ ID NO: 415314

SEQ ID NO: 416461 - DNA, 1212 bp, Staphylococcus aureus; identical to SEQ ID NO: 415212

SEQ ID NO: 416462 - DNA, 252 bp, Staphylococcus aureus; identical to SEQ ID NO: 413319

SEQ ID NO: 416463 - DNA, 3168 bp, Staphylococcus aureus; identical to SEQ ID NO: 415215

SEQ ID NO: 416464 - DNA, 318 bp, Staphylococcus aureus; identical to SEQ ID NO: 415216

SEQ ID NO: 416465 - DNA, 864 bp, Staphylococcus aureus; identical to SEQ ID NO: 413318

SEQ ID NO: 416466 - DNA, 1335 bp, Staphylococcus aureus; identical to SEQ ID NO: 415222

SEQ ID NO: 416467 - DNA, 309 bp, Staphylococcus aureus; identical to SEQ ID NO: 413316

SEQ ID NO: 416468 - DNA, 624 bp, Staphylococcus aureus; identical to SEQ ID NO: 406251

SEQ ID NO: 416469 - DNA, 276 bp, Staphylococcus aureus; identical to SEQ ID NO: 406250

SEQ ID NO: 416470 - DNA, 834 bp, Staphylococcus aureus; identical to SEQ ID NO: 415228

SEQ ID NO: 416471 - DNA, 279 bp, Staphylococcus aureus; identical to SEQ ID NO: 406248

SEQ ID NO: 416472 - DNA, 435 bp, Staphylococcus aureus; identical to SEQ ID NO: 406245

SEQ ID NO: 416473 - DNA, 210 bp, Staphylococcus aureus; identical to SEQ ID NO: 406244

SEQ ID NO: 416474 - DNA, 264 bp, Staphylococcus aureus; identical to SEQ ID NO: 406243

SEQ ID NO: 416475 - DNA, 318 bp, Staphylococcus aureus; identical to SEQ ID NO: 406241

SEQ ID NO: 416476 - DNA, 540 bp, Staphylococcus aureus; identical to SEQ ID NO: 406240

SEQ ID NO: 416477 - DNA, 186 bp, Staphylococcus aureus; identical to SEQ ID NO: 406239

SEQ ID NO: 416478 - DNA, 399 bp, Staphylococcus aureus; identical to SEQ ID NO: 406238

SEQ ID NO: 416479 - DNA, 537 bp, Staphylococcus aureus; identical to SEQ ID NO: 406237

SEQ ID NO: 416480 - DNA, 360 bp, Staphylococcus aureus; identical to SEQ ID NO: 415300

SEQ ID NO: 416481 - DNA, 501 bp, Staphylococcus aureus; identical to SEQ ID NO: 406235

SEQ ID NO: 416482 - DNA, 648 bp, Staphylococcus aureus; identical to SEQ ID NO: 406231

SEQ ID NO: 416483 - DNA, 219 bp, Staphylococcus aureus; identical to SEQ ID NO: 406230

SEQ ID NO: 416484 - DNA, 366 bp, Staphylococcus aureus; identical to SEQ ID NO: 406229

SEQ ID NO: 416485 - DNA, 390 bp, Staphylococcus aureus; identical to SEQ ID NO: 406228

SEQ ID NO: 416486 - DNA, 945 bp, Staphylococcus aureus; identical to SEQ ID NO: 413308

SEQ ID NO: 416487 - DNA, 369 bp, Staphylococcus aureus; identical to SEQ ID NO: 406226

SEQ ID NO: 416488 - DNA, 438 bp, Staphylococcus aureus; identical to SEQ ID NO: 413305

SEQ ID NO: 416489 - DNA, 948 bp, Staphylococcus aureus; identical to SEQ ID NO: 408066

SEQ ID NO: 416490 - DNA, 171 bp, Staphylococcus aureus; identical to SEQ ID NO: 408070

SEQ ID NO: 416491 - DNA, 855 bp, Staphylococcus aureus; identical to SEQ ID NO: 413301

SEQ ID NO: 416492 - DNA, 2430 bp, Staphylococcus aureus; identical to SEQ ID NO: 415252

SEQ ID NO: 416493 - DNA, 417 bp, Staphylococcus aureus; identical to SEQ ID NO: 413300

SEQ ID NO: 416494 - DNA, 849 bp, Staphylococcus aureus; identical to SEQ ID NO: 406207

SEQ ID NO: 416495 - DNA, 756 bp, Staphylococcus aureus
ttgaataaacatgaacgtttggacgaaattgctaaactagtgaataaaaagggcacgataagaacgaatgaaatcgtcgaaggtttaaatgtgtctgatatgacagttcgaagagatttaattgagttggaaaataagggcattttaacgaagattcatggtggtgcacgcagtaattcaacatttcagtataaagaaatatcacataaagaaaaacatactcgtcaaattgctgaaaaaagatatatagctaggaaagctgcatcattaattgaagatggggatactttgtttttcggaccgggaacaacagtggaactattagcagaagaagtcaatcatcatacgctcacaattattacgaattgtttgccggtgtataaaattttgttagaaaaacaaacagcacattttcgtgtctatttaattggtggtgaaatgcgccatattacagaagcatttgtaggtgaaatggcgaatgccatgttggaaaaactaagatttagcaagatgttctttagtagtaacgcagtaaataaaggtgctgtgatgacatctacattagatgaagcctatacgcaacaattggcactaagtaattcaattgaaaaatacttgttaatcgatcatacgaaagttggcaaagaagattttacatcattttgtcagttaaacgaattgactgcagtggtcatggactatgaagatgaagaaaaagtagaaacgattaaaacatatattgaagtagtcgactaa

SEQ ID NO: 416496 - DNA, 429 bp, Staphylococcus aureus; identical to SEQ ID NO: 406202

SEQ ID NO: 416497 - DNA, 312 bp, Staphylococcus aureus; identical to SEQ ID NO: 415260

SEQ ID NO: 416498 - DNA, 1413 bp, Staphylococcus aureus
atgactaaaacattacctgaagattttatttttggtggagcaacagcagcatatcaagcagaaggtgcgacaaatacagatggtaaaggtcgtgttgcatgggatacgtatttggaagaaaactattggtacactgcagaaccagcgagtgatttttataacagatatccagtggatttagaattaagtgaaaaattcggtgttaatggtatccgtatttcaattgcatggtcacgtatcttcccaaatggatatggcgaagttaaccctaaaggtgttgagtattaccataagttatttgcagagtgtcataaacgtcatgttgaaccatttgtaacattgcatcattttgatacaccagaagtgttacacaaagatggcgattttctaaatcgtaaaacgattgactactttgtagattatgctgaatattgttttaaagaattcccagaagtaaaatattggactacattcaatgaaattggacctattggtgatggtcaatatttagtaggtaaattccctccaggtattaaatatgattttgaaaaagttttccaatcacatcacaatatgatggttgctcatgcaagagcagtaaaattatttaaagatggcggctatcaaggagaaattggtgttgtacacgcattgccaacaaaatatccgttcgatccatcaaatcctgaagatgttcgtgcagcagaattagaagatatcatccataataaattcatcttagatgcaacatatttaggtaagtattctcgtgaaacgatggaaggtgtgcaacatatcttatctgttaatggcggtaaattaaatattacagatgaagattatgccattttagatgcagccaaagatttaaacgacttcttaggtatcaattactacatgagtgactggatgagaggttacgatggagaatctgaaatcacgcataatgcgacaggtgataaaggcggttctaaataccaacttaaaggtgtcggacaacgtgaatttgatgtcgacgtacctcgcacagactgggactggatgatctatcctcaaggtttatatgatcaaatcatgcgtgttgttaaagattatcctaactatcacaagatttatatcactgaaaatggtttaggatataaagatgaatttattgaatctgaaaaaacagttcatgatgatgcacgtattgattatgtaagacaacatttgaacgttattgcagatgctattaaagatggtgcaaatgttaaaggttactttatttggtcattaatggatgtgttctcttggtcaaatggttatgaaaaacgatatggtttattctatgtcgattttgagactcaagaacgttatcctaagaaaagtgcttattggtacaaagagttagccgaaacaaaagaaattaaataa

SEQ ID NO: 416499 - DNA, 870 bp, Staphylococcus aureus; identical to SEQ ID NO: 415262

SEQ ID NO: 416500 - DNA, 1005 bp, Staphylococcus aureus; identical to SEQ ID NO: 413296

SEQ ID NO: 416501 - DNA, 1008 bp, Staphylococcus aureus; identical to SEQ ID NO: 413295

SEQ ID NO: 416502 - DNA, 537 bp, Staphylococcus aureus; identical to SEQ ID NO: 406191

SEQ ID NO: 416503 - DNA, 1194 bp, Staphylococcus aureus; identical to SEQ ID NO: 413292

SEQ ID NO: 416504 - DNA, 969 bp, Staphylococcus aureus; identical to SEQ ID NO: 415271

SEQ ID NO: 416505 - DNA, 1371 bp, Staphylococcus aureus; identical to SEQ ID NO: 415272

SEQ ID NO: 416506 - DNA, 261 bp, Staphylococcus aureus; identical to SEQ ID NO: 413288

SEQ ID NO: 416507 - DNA, 516 bp, Staphylococcus aureus; identical to SEQ ID NO: 413287

SEQ ID NO: 416508 - DNA, 1188 bp, Staphylococcus aureus; identical to SEQ ID NO: 415274

SEQ ID NO: 416509 - DNA, 189 bp, Staphylococcus aureus; identical to SEQ ID NO: 407433

SEQ ID NO: 416510 - DNA, 1431 bp, Staphylococcus aureus; identical to SEQ ID NO: 414953

SEQ ID NO: 416511 - DNA, 264 bp, Staphylococcus aureus
atgagagacacagaaagaaatatattgaatatttttaagacgttattcgacgaatatactttgtcaaaccaacgagcattattggaaattgaacgtaatcatcacggatacttatcgattaatttcctgcactatcacgacagttacaaaacaaacaataagcttgtgcagatacatgaaatcaatccagacagccatgaacgaataaaaaatttaattatcgaggtgctaagaggtcatcggaagattaaaaaaggagcatga

SEQ ID NO: 416512 - DNA, 315 bp, Staphylococcus aureus; identical to SEQ ID NO: 414527

SEQ ID NO: 416513 - DNA, 207 bp, Staphylococcus aureus; identical to SEQ ID NO: 409232

SEQ ID NO: 416514 - DNA, 1065 bp, Staphylococcus aureus; identical to SEQ ID NO: 410066

SEQ ID NO: 416515 - DNA, 1443 bp, Staphylococcus aureus; identical to SEQ ID NO: 408563

SEQ ID NO: 416516 - DNA, 468 bp, Staphylococcus aureus; identical to SEQ ID NO: 408564

SEQ ID NO: 416517 - DNA, 1344 bp, Staphylococcus aureus; identical to SEQ ID NO: 410065

SEQ ID NO: 416518 - DNA, 687 bp, Staphylococcus aureus; identical to SEQ ID NO: 414250

SEQ ID NO: 416519 - DNA, 1188 bp, Staphylococcus aureus; identical to SEQ ID NO: 415274

SEQ ID NO: 416520 - DNA, 1371 bp, Staphylococcus aureus; identical to SEQ ID NO: 415272

SEQ ID NO: 416521 - DNA, 969 bp, Staphylococcus aureus; identical to SEQ ID NO: 415271

SEQ ID NO: 416522 - DNA, 1071 bp, Staphylococcus aureus; identical to SEQ ID NO: 415268

SEQ ID NO: 416523 - DNA, 1977 bp, Staphylococcus aureus; identical to SEQ ID NO: 413293

SEQ ID NO: 416524 - DNA, 510 bp, Staphylococcus aureus; identical to SEQ ID NO: 413294

SEQ ID NO: 416525 - DNA, 1563 bp, Staphylococcus aureus; identical to SEQ ID NO: 415264

SEQ ID NO: 416526 - DNA, 1008 bp, Staphylococcus aureus; identical to SEQ ID NO: 413295

SEQ ID NO: 416527 - DNA, 1005 bp, Staphylococcus aureus; identical to SEQ ID NO: 413296

SEQ ID NO: 416528 - DNA, 933 bp, Staphylococcus aureus; identical to SEQ ID NO: 413297

SEQ ID NO: 416529 - DNA, 429 bp, Staphylococcus aureus; identical to SEQ ID NO: 406202

SEQ ID NO: 416530 - DNA, 756 bp, Staphylococcus aureus; identical to SEQ ID NO: 416495

SEQ ID NO: 416531 - DNA, 741 bp, Staphylococcus aureus; identical to SEQ ID NO: 413299

SEQ ID NO: 416532 - DNA, 849 bp, Staphylococcus aureus; identical to SEQ ID NO: 406207

SEQ ID NO: 416533 - DNA, 417 bp, Staphylococcus aureus; identical to SEQ ID NO: 413300

SEQ ID NO: 416534 - DNA, 855 bp, Staphylococcus aureus; identical to SEQ ID NO: 413301

SEQ ID NO: 416535 - DNA, 816 bp, Staphylococcus aureus; identical to SEQ ID NO: 415251

SEQ ID NO: 416536 - DNA, 426 bp, Staphylococcus aureus; identical to SEQ ID NO: 413302

SEQ ID NO: 416537 - DNA, 1665 bp, Staphylococcus aureus
atgactgataaaaagtacactgcagccgatatggttattgatactttgaaaaataatggggtagaatatgtttttggtattccgggtgcaaagatagactatctatttaatgctttaattgatgatggtcctgaacttattgtcactcgtcatgaacaaaatgctgcaatgatggcacaaggtattggaagattaacaggtaaaccgggtgtagtacttgttacaagtggccctggtgtaagtaatttaacgactggactattaacagctacatctgaaggggatcctgtattagcgttaggtggccaagtgaaacgtaatgatttattacgattaacgcatcaaagtattgataatgctgcgctattaaaatattcatcaaaatacagtgaagaagtacaagatcctgaatcattatcagaagttatgacaaatgcaattcgaattgctacttcaggaaaaaatggcgcaagttttattagtattccgcaagacgttatttcttcaccagttgaatctaaagctatatcactttgccaaaaaccaaatttaggagtaccgagtgaacaagatattaatgatgtcattgaagcgattaaaaatgcatcatttcctgttttattagctggtatgagaagttcaagtgcagaagaaacaaatgccattcgcaaattagttgagcgcacgaatttaccagttgtagaaacattccaaggtgcaggtgtaattagtcgtgaattagaaaatcatttcttcggtcgtgtgggcttattccgcaatcaagttggtgatgaattattacgtaaaagtgatttagttgttacaatcggttatgatccaattgaatacgaagctagtaactggaataaagaattagaaacacaaattatcaatattgacgaagttcaagctgaaattactaattatatgcaaccgaaaaaagagttgattggtaatattgctaaaacgattgaaatgatttctgaaaaagtggatgagccatttataaatcaacaacatttagacgaattagaacaattaagaacacatattgatgaagaaactggtattaaagcgacgcatgaagaaggaattctacatccagtggaaattattgaatctatgcaaaaggtattaactgatgatactactgtaacagttgatgttggaagtcactatatttggatggcacgtaatttcagaagttacaatccaagacatttattatttagcaatggtatgcaaacgcttggtgtagcattaccgtgggcaatttcagctgcacttgtgcgccctaatacgcaagttgtgtccgttgctggcgatggtggctttttattttcatcacaagatttagaaacggccgtacgtaaaaatttaaatatcatccagcttatttggaatgatggaaaatataacatggttgaattccaagaagaaatgaaatataaacgttcgtcaggtgtagacttcggtcctgtagattttgtaaaatatgcagaatcatttggcgcgaaaggtttacgagttactaatcaagaagaattagaagcggcaattaaagagggctatgaaacagatggtccagtattaattgatatacctgtaaattacaaagataatatcaaactttcaacaaatatgttacctgacgtatttaactaa

SEQ ID NO: 416538 - DNA, 1017 bp, Staphylococcus aureus; identical to SEQ ID NO: 408069

SEQ ID NO: 416539 - DNA, 225 bp, Staphylococcus aureus; identical to SEQ ID NO: 408067

SEQ ID NO: 416540 - DNA, 948 bp, Staphylococcus aureus; identical to SEQ ID NO: 408066

SEQ ID NO: 416541 - DNA, 399 bp, Staphylococcus aureus; identical to SEQ ID NO: 406220

SEQ ID NO: 416542 - DNA, 438 bp, Staphylococcus aureus; identical to SEQ ID NO: 413305

SEQ ID NO: 416543 - DNA, 804 bp, Staphylococcus aureus; identical to SEQ ID NO: 413306

SEQ ID NO: 416544 - DNA, 810 bp, Staphylococcus aureus; identical to SEQ ID NO: 416283

SEQ ID NO: 416545 - DNA, 369 bp, Staphylococcus aureus; identical to SEQ ID NO: 406226

SEQ ID NO: 416546 - DNA, 390 bp, Staphylococcus aureus; identical to SEQ ID NO: 406228

SEQ ID NO: 416547 - DNA, 366 bp, Staphylococcus aureus; identical to SEQ ID NO: 406229

SEQ ID NO: 416548 - DNA, 219 bp, Staphylococcus aureus; identical to SEQ ID NO: 406230

SEQ ID NO: 416549 - DNA, 648 bp, Staphylococcus aureus; identical to SEQ ID NO: 406231

SEQ ID NO: 416550 - DNA, 1293 bp, Staphylococcus aureus; identical to SEQ ID NO: 415298

SEQ ID NO: 416551 - DNA, 441 bp, Staphylococcus aureus; identical to SEQ ID NO: 415239

SEQ ID NO: 416552 - DNA, 360 bp, Staphylococcus aureus; identical to SEQ ID NO: 415300

SEQ ID NO: 416553 - DNA, 537 bp, Staphylococcus aureus; identical to SEQ ID NO: 406237

SEQ ID NO: 416554 - DNA, 399 bp, Staphylococcus aureus; identical to SEQ ID NO: 406238

SEQ ID NO: 416555 - DNA, 318 bp, Staphylococcus aureus; identical to SEQ ID NO: 406241

SEQ ID NO: 416556 - DNA, 369 bp, Staphylococcus aureus; identical to SEQ ID NO: 406242

SEQ ID NO: 416557 - DNA, 210 bp, Staphylococcus aureus; identical to SEQ ID NO: 406244

SEQ ID NO: 416558 - DNA, 654 bp, Staphylococcus aureus; identical to SEQ ID NO: 413314

SEQ ID NO: 416559 - DNA, 279 bp, Staphylococcus aureus; identical to SEQ ID NO: 406248

SEQ ID NO: 416560 - DNA, 276 bp, Staphylococcus aureus; identical to SEQ ID NO: 406250

SEQ ID NO: 416561 - DNA, 390 bp, Staphylococcus aureus; identical to SEQ ID NO: 415223

SEQ ID NO: 416562 - DNA, 1335 bp, Staphylococcus aureus; identical to SEQ ID NO: 415222

SEQ ID NO: 416563 - DNA, 2136 bp, Staphylococcus aureus; identical to SEQ ID NO: 415221

SEQ ID NO: 416564 - DNA, 864 bp, Staphylococcus aureus; identical to SEQ ID NO: 413318

SEQ ID NO: 416565 - DNA, 165 bp, Staphylococcus aureus; identical to SEQ ID NO: 415217

SEQ ID NO: 416566 - DNA, 318 bp, Staphylococcus aureus; identical to SEQ ID NO: 415216

SEQ ID NO: 416567 - DNA, 252 bp, Staphylococcus aureus; identical to SEQ ID NO: 413319

SEQ ID NO: 416568 - DNA, 600 bp, Staphylococcus aureus; identical to SEQ ID NO: 415211

SEQ ID NO: 416569 - DNA, 234 bp, Staphylococcus aureus; identical to SEQ ID NO: 415210

SEQ ID NO: 416570 - DNA, 486 bp, Staphylococcus aureus; identical to SEQ ID NO: 413321

SEQ ID NO: 416571 - DNA, 1260 bp, Staphylococcus aureus; identical to SEQ ID NO: 415207

SEQ ID NO: 416572 - DNA, 495 bp, Staphylococcus aureus; identical to SEQ ID NO: 415206

SEQ ID NO: 416573 - DNA, 507 bp, Staphylococcus aureus; identical to SEQ ID NO: 415205

SEQ ID NO: 416574 - DNA, 672 bp, Staphylococcus aureus; identical to SEQ ID NO: 413323

SEQ ID NO: 416575 - DNA, 942 bp, Staphylococcus aureus; identical to SEQ ID NO: 413326

SEQ ID NO: 416576 - DNA, 906 bp, Staphylococcus aureus; identical to SEQ ID NO: 416309

SEQ ID NO: 416577 - DNA, 1716 bp, Staphylococcus aureus
atgagctttaaaatgacgcaaaatcaatatacgagcttatacggtccaactgttggagattctattcgtttaggtgatacgaatctatttgctcaaatagaaaaagactatgcggtttatggtgaagaagctacttttggtggtggtaaatctattagagacggtatggcgcaaaatcctcgtgtaacacgtgatgacgtgaacgttgcagaccttgtcatttctaatgccgttattatcgattacgataaagtggttaaagctgatataggcattaaaaatggttatattttcgccataggtaatgccggcaacccagatataatggataatgtcgacattattataggttcaacaacagatatcattgccgctgaaggtaaaatcgtcactgctggtggtattgatactcatgttcattttattaatcctgaacaagcagaggtcgcattagaaagtggtattacgactcatattggtggtggtactggtgcttcagaaggttctaaagcaacaactgtaactccaggtccatggcatattcatagaatgttagaagctgccgaaggtttaccgattaatgtcggttttacaggtaaaggacaagcaacaaatccaactgcactcattgaacaaatcaatgccggagcaattggattaaaagtacatgaagactggggtgcaacaccatctgctttgagtcatgcattagatgttgctgatgaatttgatgttcaaattgcattacatgcagatactttaaatgaagcaggatttatggaagacacaatggctgctgttaaagaccgtgtacttcatatgtaccatactgaaggtgctggtggcggtcatgcgcctgatttaattaaatccgctgcattttcaaatgttttaccttcatctacaaatccaactttgccttatacacataatactgtagatgaacatttagatatggtaatgattactcaccatttaaatgcggctattcctgaagatatcgcattcgcagattcacgtattcgtaaagaaacgattgcagcagaagatgttctgcaagatatgggtgtattcagtatgattagttccgattcacaagcaatgggccgtgtaggtgaagtaattacacgaacatggcaagtagcacatcgcatgaaagaacaacgtggtcctttagatggtgattttgaacataatgataataatcgcatcaaacgttatatcgctaaatatacaattaacccagcaattacacatggtatttctgaatatgtaggatctatcgagccgggcaaactagctgacattgtcttatgggacccaattttctttggggttaaacctgaattagttgtaaagggcggattaattaactctgccgtaaatggcgatgcaaatggttctatacctacatctgaaccgatgaagtaccgtaaaatgtatggtcaatacggcggaaaccttacaagtacgtcaatgacattcgtgtctaaaactgcttatgaaaatggtatcaatcgtgcattaaatttaaaacgcatggtgcgtccagttaaaaatattagacaattatctaaagcagatatgaaaaataacagtgcaacacctaaattagacgttgatccacaaacatatgaagtatatgtagatggagaaaacattacaagtaatgcagcaactgagttaccattaactcaaagatacttcttattctag

SEQ ID NO: 416578 - DNA, 690 bp, Staphylococcus aureus; identical to SEQ ID NO: 415191

SEQ ID NO: 416579 - DNA, 615 bp, Staphylococcus aureus; identical to SEQ ID NO: 415190

SEQ ID NO: 416580 - DNA, 348 bp, Staphylococcus aureus; identical to SEQ ID NO: 406294

SEQ ID NO: 416581 - DNA, 327 bp, Staphylococcus aureus; identical to SEQ ID NO: 413330

SEQ ID NO: 416582 - DNA, 423 bp, Staphylococcus aureus; identical to SEQ ID NO: 415182

SEQ ID NO: 416583 - DNA, 501 bp, Staphylococcus aureus; identical to SEQ ID NO: 413331

SEQ ID NO: 416584 - DNA, 954 bp, Staphylococcus aureus; identical to SEQ ID NO: 415180

SEQ ID NO: 416585 - DNA, 234 bp, Staphylococcus aureus; identical to SEQ ID NO: 406306

SEQ ID NO: 416586 - DNA, 474 bp, Staphylococcus aureus; identical to SEQ ID NO: 406307

SEQ ID NO: 416587 - DNA, 3039 bp, Staphylococcus aureus; identical to SEQ ID NO: 416318

SEQ ID NO: 416588 - DNA, 948 bp, Staphylococcus aureus; identical to SEQ ID NO: 406309

SEQ ID NO: 416589 - DNA, 798 bp, Staphylococcus aureus; identical to SEQ ID NO: 406310

SEQ ID NO: 416590 - DNA, 693 bp, Staphylococcus aureus; identical to SEQ ID NO: 413333

SEQ ID NO: 416591 - DNA, 738 bp, Staphylococcus aureus; identical to SEQ ID NO: 406312

SEQ ID NO: 416592 - DNA, 1380 bp, Staphylococcus aureus; identical to SEQ ID NO: 415170

SEQ ID NO: 416593 - DNA, 186 bp, Staphylococcus aureus; identical to SEQ ID NO: 416428

SEQ ID NO: 416594 - DNA, 636 bp, Staphylococcus aureus
atgtatagagcagttatatttgatttcgatggaacaataatagatacggaacaacatttatttaatgttattaataaacatttagagatgcataatgccgatcctataagcattgatttttatcgttcttctattggaggagcagctacagatttgcatgaccatttaattaaagcgattggttcggaaaataaagataaactttatgaaggacatcatcttactagtacaacattaccgatgattgatacgattaaatcattgatggcatttttaaagcaacgtcacattcctatggcaattgccacaagtagtgtgaaagcggaaataatgcccacctttaaagcattaggtctagacgattatatagaggtagttgttggtagagaagatgttgaacaagttaaacctgaccctgaattatatttatctgcagtacaacaattaaattatatgccgacacaatgtttggctattgaagattctgtaaatggtgcaacagccgcgattgcagctggattagatgttattgttaatacgaataaaatgacaagcgcacaggacttttctaatgtagattatgtagcaaaagatattgattacgatcaaattgtagcgcgtttctttacgaaatag

SEQ ID NO: 416595 - DNA, 531 bp, Staphylococcus aureus; identical to SEQ ID NO: 406321

SEQ ID NO: 416596 - DNA, 765 bp, Staphylococcus aureus; identical to SEQ ID NO: 415166

SEQ ID NO: 416597 - DNA, 507 bp, Staphylococcus aureus; identical to SEQ ID NO: 415165

SEQ ID NO: 416598 - DNA, 882 bp, Staphylococcus aureus; identical to SEQ ID NO: 416322

SEQ ID NO: 416599 - DNA, 1122 bp, Staphylococcus aureus
atgggattaaaagatcaagctgttacctggagaaggtattttcatcaatttccagaactatccgataaagaatttaagactacacaaaaaattaaagatattttaacagaacatcatattagaatattagacttaccgcttatgactgggctggttgctgaagtgggacaaggtctgagttgtatagctgttcgggctgacattgatgctttaccgattcaagagcttgttgaacaggattttaaatctgaaaatgaaggtgttatgcatgcgtgcggtcatgatattcacatggctagtattttggctacggctgtaaaattaaaagaaattgagggcactcttactgggcgtgttaaattcatttttcaaccagcagaagaactaggacatggcgcttttaaaattattgaaacagatgcattaaaagatgtacaagcagtattgggttttcataatgacccatcgcgttcggtaggtacatttgcaatcaaaacaggggcaattacatcagcagtagatcgctttgagtttcatattaaaggcgtgggtggtcatgctgcaaagccagaacaatgcaacgatccagttattgtgttggcgcaattgattaatagtattcaatccatagttagtagaaatctatctgcgtttgatgaagcggtagtaacaattggacaaatatcatgtggtaatacttggaatgtcattgctgatcatgcgtatgtacaaggcacagtgcgtagttttgatcctgtggtacgaaagcttgtagaaacacgattacaagatattgcggacggattggctcaagcatataatatgaaaattaatttaaattatacacatttacctggcgctgtgatgaatgatgaggcattgacgcataaagcaattgcagtagcccaacatgttggatataaggtggaaatgatggaacagccgcttacgattggagaagatttttcaggttatagtcaacattttccaagtgtatttgcgttaattggttctcatagtgaatatgatttacatcaccctcaatataaaccggatgaaaggattctggaaaaagtacctgagtattttgttgaatttgtaaagagactattgcatgagtaa

SEQ ID NO: 416600 - DNA, 1239 bp, Staphylococcus aureus; identical to SEQ ID NO: 413337

SEQ ID NO: 416601 - DNA, 420 bp, Staphylococcus aureus
atgttaaaatctattaatcatatatgcttttcagtcagaaatttaaacgattcaatacatttttatagagatattttacttgggaaattgctattgactggtaaaaaaactgcttattttgagcttgcaggcctatggattgctttaaatgaagaaaaagatataccacgtaatgaaattcacttttcatatacacatatagctttcactatagatgacagcgaatttaaatattggcatcagaggttaaaagataataacgtgaatattttagaaggaagagttagagatattagagatagacaatcaatttactttactgaccctgatggtcataagctagaattacatactggcacacttgagaacagattaaattattataaagaggctaaaccacatatgacattttacaaataa

SEQ ID NO: 416602 - DNA, 936 bp, Staphylococcus aureus; identical to SEQ ID NO: 406333

SEQ ID NO: 416603 - DNA, 1260 bp, Staphylococcus aureus; identical to SEQ ID NO: 406334

SEQ ID NO: 416604 - DNA, 654 bp, Staphylococcus aureus; identical to SEQ ID NO: 416417

SEQ ID NO: 416605 - DNA, 900 bp, Staphylococcus aureus; identical to SEQ ID NO: 413338

SEQ ID NO: 416606 - DNA, 609 bp, Staphylococcus aureus; identical to SEQ ID NO: 413437

SEQ ID NO: 416607 - DNA, 1209 bp, Staphylococcus aureus; identical to SEQ ID NO: 413339

SEQ ID NO: 416608 - DNA, 420 bp, Staphylococcus aureus; identical to SEQ ID NO: 415149

SEQ ID NO: 416609 - DNA, 921 bp, Staphylococcus aureus; identical to SEQ ID NO: 413340

SEQ ID NO: 416610 - DNA, 639 bp, Staphylococcus aureus; identical to SEQ ID NO: 415148

SEQ ID NO: 416611 - DNA, 456 bp, Staphylococcus aureus; identical to SEQ ID NO: 416406

SEQ ID NO: 416612 - DNA, 666 bp, Staphylococcus aureus; identical to SEQ ID NO: 415141

SEQ ID NO: 416613 - DNA, 1056 bp, Staphylococcus aureus; identical to SEQ ID NO: 405038

SEQ ID NO: 416614 - DNA, 444 bp, Staphylococcus aureus; identical to SEQ ID NO: 415137

SEQ ID NO: 416615 - DNA, 456 bp, Staphylococcus aureus; identical to SEQ ID NO: 415136

SEQ ID NO: 416616 - DNA, 1479 bp, Staphylococcus aureus; identical to SEQ ID NO: 415135

SEQ ID NO: 416617 - DNA, 1599 bp, Staphylococcus aureus; identical to SEQ ID NO: 415134

SEQ ID NO: 416618 - DNA, 402 bp, Staphylococcus aureus
atggttaaagtgacatatgatattccgacttgcgaggattattgcgcattaaggattaacgcaggtatgagtccaaagacgcgcgaagcagctgaaaaaggattacctaatgccttatttacagtaaccttgtatgataaagatcggttaattggtatgggtagagtgattggcgatggcggaactgtttttcaaattgttgatattgctgtttcgaaaagttatcaaggtcaagattacggcagtctaattatggaacatattatgaagtatattaaaaatgtatctgtcgaaagtgcatacgttagtctgatcgcagactacccagcggataaattatatgcaaaatttggatttatgcctaccgaaccagattcaggcggtatgtatatcaaatactaa

SEQ ID NO: 416619 - DNA, 1035 bp, Staphylococcus aureus; identical to SEQ ID NO: 405026

SEQ ID NO: 416620 - DNA, 432 bp, Staphylococcus aureus; identical to SEQ ID NO: 405025

SEQ ID NO: 416621 - DNA, 624 bp, Staphylococcus aureus; identical to SEQ ID NO: 415128

SEQ ID NO: 416622 - DNA, 945 bp, Staphylococcus aureus; identical to SEQ ID NO: 415127

SEQ ID NO: 416623 - DNA, 1443 bp, Staphylococcus aureus; identical to SEQ ID NO: 415126

SEQ ID NO: 416624 - DNA, 2106 bp, Staphylococcus aureus; identical to SEQ ID NO: 416060

SEQ ID NO: 416625 - DNA, 423 bp, Staphylococcus aureus; identical to SEQ ID NO: 415124

SEQ ID NO: 416626 - DNA, 357 bp, Staphylococcus aureus; identical to SEQ ID NO: 413342

SEQ ID NO: 416627 - DNA, 1278 bp, Staphylococcus aureus; identical to SEQ ID NO: 413343

SEQ ID NO: 416628 - DNA, 447 bp, Staphylococcus aureus; identical to SEQ ID NO: 415122

SEQ ID NO: 416629 - DNA, 741 bp, Staphylococcus aureus; identical to SEQ ID NO: 405009

SEQ ID NO: 416630 - DNA, 654 bp, Staphylococcus aureus; identical to SEQ ID NO: 405008

SEQ ID NO: 416631 - DNA, 678 bp, Staphylococcus aureus; identical to SEQ ID NO: 415116

SEQ ID NO: 416632 - DNA, 576 bp, Staphylococcus aureus; identical to SEQ ID NO: 415115

SEQ ID NO: 416633 - DNA, 1560 bp, Staphylococcus aureus; identical to SEQ ID NO: 416389

SEQ ID NO: 416634 - DNA, 3690 bp, Staphylococcus aureus; identical to SEQ ID NO: 415113

SEQ ID NO: 416635 - DNA, 978 bp, Staphylococcus aureus; identical to SEQ ID NO: 415112

SEQ ID NO: 416636 - DNA, 315 bp, Staphylococcus aureus; identical to SEQ ID NO: 415111

SEQ ID NO: 416637 - DNA, 2406 bp, Staphylococcus aureus; identical to SEQ ID NO: 413344

SEQ ID NO: 416638 - DNA, 732 bp, Staphylococcus aureus; identical to SEQ ID NO: 415109

SEQ ID NO: 416639 - DNA, 825 bp, Staphylococcus aureus; identical to SEQ ID NO: 416342

SEQ ID NO: 416640 - DNA, 183 bp, Staphylococcus aureus; identical to SEQ ID NO: 415108

SEQ ID NO: 416641 - DNA, 468 bp, Staphylococcus aureus; identical to SEQ ID NO: 414366

SEQ ID NO: 416642 - DNA, 1548 bp, Staphylococcus aureus; identical to SEQ ID NO: 414991

SEQ ID NO: 416643 - DNA, 267 bp, Staphylococcus aureus; identical to SEQ ID NO: 414968

SEQ ID NO: 416644 - DNA, 600 bp, Staphylococcus aureus; identical to SEQ ID NO: 415104

SEQ ID NO: 416645 - DNA, 732 bp, Staphylococcus aureus; identical to SEQ ID NO: 415102

SEQ ID NO: 416646 - DNA, 780 bp, Staphylococcus aureus; identical to SEQ ID NO: 415100

SEQ ID NO: 416647 - DNA, 687 bp, Staphylococcus aureus; identical to SEQ ID NO: 415099

SEQ ID NO: 416648 - DNA, 867 bp, Staphylococcus aureus; identical to SEQ ID NO: 415098

SEQ ID NO: 416649 - DNA, 1311 bp, Staphylococcus aureus; identical to SEQ ID NO: 416344

SEQ ID NO: 416650 - DNA, 1008 bp, Staphylococcus aureus; identical to SEQ ID NO: 410061

SEQ ID NO: 416651 - DNA, 1734 bp, Staphylococcus aureus; identical to SEQ ID NO: 415091

SEQ ID NO: 416652 - DNA, 1212 bp, Staphylococcus aureus; identical to SEQ ID NO: 415086

SEQ ID NO: 416653 - DNA, 1410 bp, Staphylococcus aureus; identical to SEQ ID NO: 416141

SEQ ID NO: 416654 - DNA, 2079 bp, Staphylococcus aureus
atggcactattagaagcatttttaatttttatttttgctgtgattattggttcggttatcaataatcgattcccacaaattcctactgcctttattcaaattgcattaggtgtcgttattttcattattccaatacaagttgatttccaattcaattctgaagtgtttatgtttgccgttatcgcgccactactttttgtagaaggtacccacgtctctcgaacaaaattattagaatatcgtaaacctatactattaatgtcaatggcactagtgtttgcaactgtagtcggtgttggctattttatacattggatttggcctgccttaccaatgccagccgcttttgcaatagcagcaattttatgtcctactgatgcagtagcagtatctgctattacacgcggaaaattattacctaaaggttctatgacgattttagaaggtgaatctttactcaatgatgcagcaggtatcatttcatttaaaattgctgttactgcattagtaactggtaccttttcattattccaagctgttgaacaatttatcatttcaacaatactaggtgtacttattggtgcaattattggattcgttgtcgttagaatacgtatagacttaaccgctaataaaggtttaaaagataacaataccttaacttttattcaattattaactccttttgtcgtatactttttagcagaagaagttcatgcttcaggtatcattgcagttgtaatcgcaggtctaatccatggtttagaacgcgaccgtttaattagagcacaaacggaactacaaatgaattaccatcaaatttggaacacatttagttatgccttaaatggttttgtatttgttgtattaggttttatgattcctactgtagtcatagatattttccaaacagagcctgacaacttttcatttttaatagtgatcactatattaatcgctattgcaatttatgcatgtcgatttgtttgggtttatttctggtacaaagatttttatttcccgaaaaatatacaatcttatctagacgaagaacatgattcacatgaaacaccaccttctcgtgtgcgttacgcatttattatgacgatgtgtggtattcacggtacaatttcactttcaatggcacttacattaccatttatcattacaaaaggacaagcattcgaataccgtaatgatttattgtttattgcatctttcatggtattaattagtttaatcttagcgcaaattgttttacctttaattacaccatctgccgaagatactacttttaaaggtatgacttatcaatctgccaaaattttcattgttcaaaaagtgatacagcattttaaaaacgaaagtaaaaaagacaaaaacgatacaaattatcgcccagtattaaaccaatactatggagaattgttatttttattaaattcagaacctaataatcaaaatacaaaagaactcaaacgtttagaagatattgcaaaagtaatcgaaacatctacacttgagcgtttaattgataaaggtaaggcaacgtatcaggatattaataattaccgcaatattgtcgaattaacagagacacaccgtactgcatcatttgttgaaaaatttgcaaacttcttcaagatgttatggcttagacttaaagcgatgaagcactacaaagccttaaacaaagaatctaagaagcaagaatttgaaaattcattcaaagatgttcaaaaaattatgcgtattgtgaatcacaatattattttacgcttaaaagaagaacaaaatagtacaaatgtacttgaggttagcttagtcattaatcattactatgatatgagtcgctcattaaagtggcgtgcacaacgtcgaaaagaacgtcaagaaaacagcaatcaaatcataccgcaagctatgttccataaccacaaattggaagcattgtacttacaacgtcaccttttagatgaattaattcgcaaaaataaaatcaacaatatcgttgcagctcaaattcgagaaaatatcaattacaacgaaattgtcttgtctttacagtccaaacattaa

SEQ ID NO: 416655 - DNA, 1497 bp, Staphylococcus aureus; identical to SEQ ID NO: 415081

SEQ ID NO: 416656 - DNA, 1353 bp, Staphylococcus aureus
atgaagattaatactacaggtggtcaaattcatggtattacacaagatggtttagatatcttcttaggcattccttatgcagaaccaccagttcatgataatcgctttaaacattctacgttaaaaacacaatggtcagagccaattgatgcaactgaaatacaacccatcccaccgcaaccagacaacaaattagaagattttttctcctcacaatctacaacttttactgaacatgaagactgtttatatctaaatatttggaaacaacataatgatcagacgaagaaacctgtcatcatttatttttatggtggtagttttgaaaatggtcatggtacagccgaactctatcaaccggcacatttagtacaaaataacgacattatcgttattacatgcaattatcgtttaggcgcattaggatatttagactggtcatattttaataaagattttcattccaataatggactttcagatcaaatcaatgtcataaaatgggtgcatcaatttattgaatcctttggtggcgacgctaataacattactttaatgggtcagtctgcaggcagtatgagcattttgactttacttaaaatacctgacattgagccatacttccataaagtcgttctactaagtggcgcactacgattagacacccttaagagtgcacgcaataaagcacaatatttccaaaaaatgatgcgcgattatttagatacagatgatgttacatcattatcgacagatgatattcttatgctgatggcgaagctaaaacaatctcgaggaccttctaaagggcttgatttaatatatgcgcctattaaaacagattatatacaaaatgattatccaacaacgaaaccaatttttgcatgttatacaaaagatgaaggcgatatttatattactagtgaacagaaaaaattatcgccgcaacgctttatcgacattatggaattaaatgatattcctttaaaatacgaagatgttcagactgcgaagcaacaatctttagcgattacacattgttatttcaaacagccgatgaagcaatttttacaacatcttaatatacaagattcaaacgcacaactatggcttgctgaatttgcatggcatgatacttctagcgcacactatcgcagtgcttaccatattctagatatggtattttggttcggaaacttacaaatattagcagcacatcaatatccaacaactgctcaccttaaatttttaagtcgacaaatgcaaaatgatttagctaattttgctaaaagcggtaaaatgccttggccgatgtatcataatgaacgtcgctattatcgcacatatcaataa

SEQ ID NO: 416657 - DNA, 663 bp, Staphylococcus aureus
atgttgttagaaattaaagatttagtgtataaagcgagcgatagaatcatactagatcatatcagtctaaaagtagataaaggcgagagtattgccattataggtccatcaggtagtggtaaaagtacatttcaaaagcaaatatgtaatttgattagtccaactagtggagaactttattttaaaggtaaaccctataatgattatgacccggaagaattgcgtcaacgaatcagttatttgatgcagcaaagtgacttgtttggtgaaacgattgaagataacatgatattcccatcacttgcacgtaatgataaatttgatagaaaacgtgcaaagcaattaattaaagatgtcggtttgggacattatcaattaagttcggaagtggaaaatatgtcgggtggtgagcggcaaagaattgctatagcgcgccaactgatgtatacaccggatattcttttattagatgaatcgaccagtgcattagacgttaataataaagaaaagatagaaaatatcatttttaagttagtggaacaggatgttgctatcatgtggattacccatagtgatgatcaaagtatgagacattttcaaaagcgcataacgattgttgatggcaaaatttctaaggttgaggagttgaatcaacatgagtaa

SEQ ID NO: 416658 - DNA, 1194 bp, Staphylococcus aureus; identical to SEQ ID NO: 416376

SEQ ID NO: 416659 - DNA, 750 bp, Staphylococcus aureus; identical to SEQ ID NO: 408541

SEQ ID NO: 416660 - DNA, 870 bp, Staphylococcus aureus; identical to SEQ ID NO: 408542

SEQ ID NO: 416661 - DNA, 936 bp, Staphylococcus aureus; identical to SEQ ID NO: 408543

SEQ ID NO: 416662 - DNA, 1599 bp, Staphylococcus aureus; identical to SEQ ID NO: 408544

SEQ ID NO: 416663 - DNA, 675 bp, Staphylococcus aureus
atgaactatttcagatataaacaatttaacaaggatgttatcactgtagccgttggctactatctaagatatacattgagttatcgtgatatatctgaaatattaagggaacgtggtgtaaacgttcatcattcaacggtctaccgttgggttcaagaatatgccccaattttatatcaaatttggaagaaaaagtatcaaaaagcttattacaaatggcatattgatgagacgtacatcaaaataaaaggaaaatggagctatttatatcgtgccattgatgcagagggacatacattagatatttggttgcgtaagcaacgagataatcattcagcatatgcgtttatcaaacgtctcattaaacaatttggtaaacctcaaaaggtagttacagatcaggcaccttcaacgaaggtagcaatggctaaagtaattaaagcttttaaacttaaacctgactgtcattgtacatcgaaatatctgaataacctcattgagcaagatcaccgtcatattaaagtaagaaagacaaggtatcaaagtatcaatacagcaaagaatactttaaaaggtattgaatgtatttacgctctatataaaaagaaccgcaggtctcttcagatctacggattttcgccatgccacgaaattagcatcatgctagcaagttaa

SEQ ID NO: 416664 - DNA, 312 bp, Staphylococcus aureus
atgacaccgtggattccaacagatacaaatataggcggggagtttgtaccatctaatacatcaaaaacagaaatggcagtaactaattatctttgtagtatacgaagaggtaaaattcttgagtttaagagtgcgattgaacgtataatcaacacatcaagtaggaaagaacgcgaattcattcaagagtattattttaataaaaagactttgattgcggtttgttatgacatacacatctctgaaagtacagcgcatagaatcaagaagaaaatagtgtctaaactagccgaagaattaggagaatactaa

SEQ ID NO: 416665 - DNA, 312 bp, Staphylococcus aureus
atgacaccatggattccaacagatacaaatataggcggggaatttgtaccgtctaatacatcgaaaacagaaatggcagtaactaattatctttgtagtatacgaagaggtaaaatcctcgagtttaagagtgcaattgaacgtataatcaacacatcaagtaggaaagaacgcgagttcattcaagagtattattttaataaaaaggagttagtgaaagtttgtgatgacatacacatttctgatagaactgctcatagaatcaaaaggaaaatcatatctagattggcggaagagttaggggaagagtga

SEQ ID NO: 416666 - DNA, 189 bp, Staphylococcus aureus
gtgacacaatacttagtcacaacattcaaagattcaacaggacaaccacatgaacattttactactgctagagataatcagacgtttacagttgttgaggcagagagtaaagaagaagctgagcgcaaatacgaggcacaagttaagataaggagagatggagatgccaaagaaaacggtaacgattga

SEQ ID NO: 416667 - DNA, 735 bp, Staphylococcus aureus; identical to SEQ ID NO: 407375

SEQ ID NO: 416668 - DNA, 249 bp, Staphylococcus aureus; identical to SEQ ID NO: 413262

SEQ ID NO: 416669 - DNA, 297 bp, Staphylococcus aureus
gtgccgtcactaagcatctttatagcgctgatagccattgcgccaaatgctacaaagccagcaccagctattgctacagcaccacctaaagcaagtacaccaccagttaacactttgatagcgtttaatagtgcaaacactacaggtactacgctcgctattacaggtattaaaatgctaaaagatgaagttagtaatccaccaaccatattagaacctacagtaccgaacacacggaacatattagctaaattccccatctgtctttggaaattgtcgtttgcttttattatgtag

SEQ ID NO: 416670 - DNA, 939 bp, Staphylococcus aureus; identical to SEQ ID NO: 409285

SEQ ID NO: 416671 - DNA, 306 bp, Staphylococcus aureus; identical to SEQ ID NO: 409286

SEQ ID NO: 416672 - DNA, 1110 bp, Staphylococcus aureus; identical to SEQ ID NO: 409287

SEQ ID NO: 416673 - DNA, 372 bp, Staphylococcus aureus; identical to SEQ ID NO: 409222

SEQ ID NO: 416674 - DNA, 1758 bp, Staphylococcus aureus; identical to SEQ ID NO: 409223

SEQ ID NO: 416675 - DNA, 2007 bp, Staphylococcus aureus; identical to SEQ ID NO: 409224

SEQ ID NO: 416676 - DNA, 429 bp, Staphylococcus aureus; identical to SEQ ID NO: 409225

SEQ ID NO: 416677 - DNA, 744 bp, Staphylococcus aureus; identical to SEQ ID NO: 409226

SEQ ID NO: 416678 - DNA, 675 bp, Staphylococcus aureus; identical to SEQ ID NO: 409227

SEQ ID NO: 416679 - DNA, 744 bp, Staphylococcus aureus; identical to SEQ ID NO: 409228

SEQ ID NO: 416680 - DNA, 405 bp, Staphylococcus aureus; identical to SEQ ID NO: 409229

SEQ ID NO: 416681 - DNA, 1263 bp, Staphylococcus aureus; identical to SEQ ID NO: 409230

SEQ ID NO: 416682 - DNA, 774 bp, Staphylococcus aureus; identical to SEQ ID NO: 409231

SEQ ID NO: 416683 - DNA, 207 bp, Staphylococcus aureus; identical to SEQ ID NO: 409232

SEQ ID NO: 416684 - DNA, 675 bp, Staphylococcus aureus; identical to SEQ ID NO: 409227

SEQ ID NO: 416685 - DNA, 240 bp, Staphylococcus aureus; identical to SEQ ID NO: 409234

SEQ ID NO: 416686 - DNA, 1257 bp, Staphylococcus aureus; identical to SEQ ID NO: 409235

SEQ ID NO: 416687 - DNA, 480 bp, Staphylococcus aureus; identical to SEQ ID NO: 415809

SEQ ID NO: 416688 - DNA, 2319 bp, Staphylococcus aureus; identical to SEQ ID NO: 415810

SEQ ID NO: 416689 - DNA, 801 bp, Staphylococcus aureus; identical to SEQ ID NO: 415811

SEQ ID NO: 416690 - DNA, 789 bp, Staphylococcus aureus
atgaactggaaactgacaaagacacttttcattttcgtgtttattcttgtcaacatcgtgttagtatcgatttatgttaataaagtcaatcgctcacacattaatgaagttgagagtaacaatgaagttaattttcagcaagaagaaattaaagtaccggctagtatattgaataaatcagttaaaggtataaaattagagcaaattacagggcgatcaaaagactttagttctaaagctaagggcgattcggatttgaccacatcagatggtggaaaattattgaatgcgaacattagtcaatcggtaaaggtcagtgacaataacttaaaagatttgaaagattatgttaacaaacgtgtgttcaaaggttcagaatatcaattaagtgaaattaattctggttctgtaaaatacgaacaaacgtatgataatttcccgattttgaacaatagtaaagcgatgttgaactttaatatagaagataacaaagcggctagttataaacaatcaatgatggatgacattaagcccacagatggtgcagataagaagcatcaagttattggagtgagaaaagcaatcgaggcattatattataatcgttacttgaaaaaaggtgatgaagtcattaatgctagactcggttactactcagtcgtgaacgaaacgaatgttcaattgttacaaccaaactgggaaattaaagtgaagcatgacggtaaggacaaaacgaatacttactatgtcgaagcgacaaataataaccctaaaattattaatcattaa

SEQ ID NO: 416691 - DNA, 1827 bp, Staphylococcus aureus; identical to SEQ ID NO: 415813

SEQ ID NO: 416692 - DNA, 702 bp, Staphylococcus aureus; identical to SEQ ID NO: 405547

SEQ ID NO: 416693 - DNA, 1284 bp, Staphylococcus aureus; identical to SEQ ID NO: 415815

SEQ ID NO: 416694 - DNA, 1401 bp, Staphylococcus aureus; identical to SEQ ID NO: 415816

SEQ ID NO: 416695 - DNA, 447 bp, Staphylococcus aureus; identical to SEQ ID NO: 415817

SEQ ID NO: 416696 - DNA, 1968 bp, Staphylococcus aureus; identical to SEQ ID NO: 415818

SEQ ID NO: 416697 - DNA, 924 bp, Staphylococcus aureus; identical to SEQ ID NO: 415819

SEQ ID NO: 416698 - DNA, 969 bp, Staphylococcus aureus; identical to SEQ ID NO: 415820

SEQ ID NO: 416699 - DNA, 330 bp, Staphylococcus aureus
atgataactcatatgaacatgttaatacttattttattgtgtggtatcgtaacgctattaattcgaattataccttttatcatgatttcaaaagtgcaattgcctgatgttgtggttcgatggctatcatttatcccaatcacactatttacggcacttgtcattgacagcattattcaacagacgcctcatggtgaggggtatacattaaacatcccttacattatcgcgctcattccgacggttattttatctataatcacgcgtagtttaactattacaattattagtgggattgttatcatggcaacattacgatttttcttttaa

SEQ ID NO: 416700 - DNA, 696 bp, Staphylococcus aureus; identical to SEQ ID NO: 415822

SEQ ID NO: 416701 - DNA, 1287 bp, Staphylococcus aureus; identical to SEQ ID NO: 410325

SEQ ID NO: 416702 - DNA, 1515 bp, Staphylococcus aureus; identical to SEQ ID NO: 415824

SEQ ID NO: 416703 - DNA, 813 bp, Staphylococcus aureus
atggaaacgttaaattctattaacattcctaagcgtaaagaagattcacataaaggtgattatggcaaaattttattaattggtggatctgctaacttaggtggtgccattatgttagcggctcgtgcatgtgtatttagcggtagtggtttaatcactgtagctacacatccaacaaatcattcagcattacattctcgttgcccagaagcgatggttattgatattaatgatacgaaaatgttgacgaaaatgattgaaatgactgacagtatactaattggtccaggtcttggcgttgatttcaaaggaaataatgccattacattcctactacaaaatatacaaccgcatcaaaatttaatcgtagacggcgatgcgattacaatctttagtaaactgaaaccgcaattacctacatgtcgtgtgatctttactccacacctcaaagaatgggaacgattaagtggtattcctattgaggaacagacatatgagcgtaatcgtgaagcagttgatcgtttaggtgcaactattgtacttaaaaaacatggtactgaaattttctttaaagatgaagactttaaattaacaatcggtagcccagcaatggcgactggtggtatgggcgatacacttgctggtatgattacaagttttgtcggtcaatttgataacttaaaagaagcggttatgagtgccacatatacacatagttttattggcgaaaaccttgcaaaagatatgtatgtggtaccaccatcaagacttatcaatgaaataccttacgcaatgaaacaattagaaagttaa

SEQ ID NO: 416704 - DNA, 2670 bp, Staphylococcus aureus; identical to SEQ ID NO: 415826

SEQ ID NO: 416705 - DNA, 1935 bp, Staphylococcus aureus; identical to SEQ ID NO: 415827

SEQ ID NO: 416706 - DNA, 1113 bp, Staphylococcus aureus; identical to SEQ ID NO: 415828

SEQ ID NO: 416707 - DNA, 237 bp, Staphylococcus aureus; identical to SEQ ID NO: 405562

SEQ ID NO: 416708 - DNA, 1134 bp, Staphylococcus aureus; identical to SEQ ID NO: 415830

SEQ ID NO: 416709 - DNA, 1362 bp, Staphylococcus aureus; identical to SEQ ID NO: 415831

SEQ ID NO: 416710 - DNA, 138 bp, Staphylococcus aureus; identical to SEQ ID NO: 405565

SEQ ID NO: 416711 - DNA, 348 bp, Staphylococcus aureus; identical to SEQ ID NO: 405566

SEQ ID NO: 416712 - DNA, 1380 bp, Staphylococcus aureus; identical to SEQ ID NO: 415834

SEQ ID NO: 416713 - DNA, 1878 bp, Staphylococcus aureus; identical to SEQ ID NO: 415835

SEQ ID NO: 416714 - DNA, 720 bp, Staphylococcus aureus; identical to SEQ ID NO: 415836

SEQ ID NO: 416715 - DNA, 840 bp, Staphylococcus aureus; identical to SEQ ID NO: 415837

SEQ ID NO: 416716 - DNA, 354 bp, Staphylococcus aureus; identical to SEQ ID NO: 415838

SEQ ID NO: 416717 - DNA, 396 bp, Staphylococcus aureus; identical to SEQ ID NO: 415839

SEQ ID NO: 416718 - DNA, 570 bp, Staphylococcus aureus; identical to SEQ ID NO: 408114

SEQ ID NO: 416719 - DNA, 201 bp, Staphylococcus aureus; identical to SEQ ID NO: 405574

SEQ ID NO: 416720 - DNA, 759 bp, Staphylococcus aureus; identical to SEQ ID NO: 412700

SEQ ID NO: 416721 - DNA, 513 bp, Staphylococcus aureus; identical to SEQ ID NO: 415844

SEQ ID NO: 416722 - DNA, 795 bp, Staphylococcus aureus; identical to SEQ ID NO: 415845

SEQ ID NO: 416723 - DNA, 1017 bp, Staphylococcus aureus; identical to SEQ ID NO: 415846

SEQ ID NO: 416724 - DNA, 576 bp, Staphylococcus aureus; identical to SEQ ID NO: 415847

SEQ ID NO: 416725 - DNA, 909 bp, Staphylococcus aureus; identical to SEQ ID NO: 415848

SEQ ID NO: 416726 - DNA, 1419 bp, Staphylococcus aureus; identical to SEQ ID NO: 415849

SEQ ID NO: 416727 - DNA, 465 bp, Staphylococcus aureus; identical to SEQ ID NO: 415850

SEQ ID NO: 416728 - DNA, 339 bp, Staphylococcus aureus; identical to SEQ ID NO: 415851

SEQ ID NO: 416729 - DNA, 768 bp, Staphylococcus aureus; identical to SEQ ID NO: 415852

SEQ ID NO: 416730 - DNA, 639 bp, Staphylococcus aureus; identical to SEQ ID NO: 415853

SEQ ID NO: 416731 - DNA, 957 bp, Staphylococcus aureus; identical to SEQ ID NO: 415854

SEQ ID NO: 416732 - DNA, 975 bp, Staphylococcus aureus; identical to SEQ ID NO: 415855

SEQ ID NO: 416733 - DNA, 516 bp, Staphylococcus aureus; identical to SEQ ID NO: 415856

SEQ ID NO: 416734 - DNA, 849 bp, Staphylococcus aureus
atgggaaattatttggttttgcaatcagattttgggcttagtgatggcgctgtaagtgcaatgtatggagttgcatatactgtaagtgatgatatacgtgtcgaaaacttaacgcatgatataccaccgtatgacatttgggtagcgtcatatcgtttatatcaaactgtaaaatactggcctaaaggcacagtttttgtatcagtggtagacccgggtgtaggtagtgataggcggagcattgcttgcttaacatattcaggtcattacattattacacctgataatggttctttaagtcatattaaacattacgaaggtattaaaaaagttatcgaaattgatgaagtgaaaagccgattgcctcattcggaagaaagtcatacttttcatggtagagatgtttatgcatacaatggtgcgagattagctgcaaataagatagcgtttgaacgtctcggtcaggcaattaatgttgatagtattgaggcattagaaataagagaagcgacaaaaaatgaggattctgttacaggaagcattgatattttagatatcagatttgggtcattatggacaaatattccattggcattcttaaaatccttggaaattgttcatggtaataatttggtggtaacaatttatcatcaagataagaaagtctatcaaaatattattaaatttgcgcgatcgtttgcagatgttaatgtgggtgaacctcttgtgtatgttaactcgctagtaaatattggtgtagcagtcaatcaagactcattttcagatttatatcatattggtactggaaatgattggacgattcatttatctaaagcaccatcaatttaa

SEQ ID NO: 416735 - DNA, 555 bp, Staphylococcus aureus; identical to SEQ ID NO: 415858

SEQ ID NO: 416736 - DNA, 1713 bp, Staphylococcus aureus; identical to SEQ ID NO: 415859

SEQ ID NO: 416737 - DNA, 834 bp, Staphylococcus aureus; identical to SEQ ID NO: 410333

SEQ ID NO: 416738 - DNA, 498 bp, Staphylococcus aureus; identical to SEQ ID NO: 415861

SEQ ID NO: 416739 - DNA, 1125 bp, Staphylococcus aureus; identical to SEQ ID NO: 415862

SEQ ID NO: 416740 - DNA, 858 bp, Staphylococcus aureus; identical to SEQ ID NO: 415863

SEQ ID NO: 416741 - DNA, 615 bp, Staphylococcus aureus; identical to SEQ ID NO: 410332

SEQ ID NO: 416742 - DNA, 1251 bp, Staphylococcus aureus
atgcttaatgcacaacaatttttaaatcaattttcattagaagcaccattagatgagtcattgtatccaattattcgcgatatttgtcaggaagttaaagttcatggagataaggctttgaaaatgtataatctaacattcgatcatacgaaaacagatcatttagaaattagtcatgaacaaattaaagcagcatttgacacattagatgaaaaaacaaaacaagcattacaacaaagttatgaaagaattaaagcatatcaagaaagtattaagcagacgaatcaacagttagaagaatcagtggagtgttatgaaatataccatccactagaaagtgtgggtatttatgtgcctggtggcaaagcaagttatccatcaacggttctaatgacagcgactttagcacaagtagcgggtgtagaaaatattgttgttgtgacaccacctcaacctaacggagtatcccaagaggtattagctgcatgttatattacgcaagttaatcaagtgtttcaagttggtggtgctcaaagtattgctgcattgacttatggaacagaaacgatacctaaagttgataagattgtaggtccaggtaaccaatttgttgcatatgccaaaaaatatttatttggacaggtaggtattgatcaaattgcaggaccaacagaaatagcactgattattgacgacaccgcagatttagatgccatcgtatatgatgtatttgcgcaagcagaacatgatgaattagcacgtacatatgtcattggtgaagatgcgcaagtccttaaagatttagaatcacgtattgctaaagcattgcctaatgtggacagatacgacattgtttctaaaagtatcgctaatcaacactaccttatccatgctagtaattttgatgaagcatgccatgtcatgaatacaatcgcgcctgaacatgcgtcgattcaaacagtaaatcctcaaccatatattgaaaaagtgaaatatgtgggtgcattgtttattggacattattcgccagaggtcataggagattacgttgcaggtccaagtcatgtattacctacaaatagaacagctagatttaccaatgggttatcggtcaatgatttcttaacacggaacacggtcatccatttatcaaaagatacgtttgaacaaattgctgattcagcacaacatattgctcatgttgaagcattatacaatcaccagcagtctattttaatacgtcagtcttag

SEQ ID NO: 416743 - DNA, 1014 bp, Staphylococcus aureus; identical to SEQ ID NO: 415865

SEQ ID NO: 416744 - DNA, 579 bp, Staphylococcus aureus; identical to SEQ ID NO: 415866

SEQ ID NO: 416745 - DNA, 579 bp, Staphylococcus aureus; identical to SEQ ID NO: 415867

SEQ ID NO: 416746 - DNA, 705 bp, Staphylococcus aureus; identical to SEQ ID NO: 410320

SEQ ID NO: 416747 - DNA, 759 bp, Staphylococcus aureus; identical to SEQ ID NO: 415869

SEQ ID NO: 416748 - DNA, 633 bp, Staphylococcus aureus; identical to SEQ ID NO: 415870

SEQ ID NO: 416749 - DNA, 1053 bp, Staphylococcus aureus; identical to SEQ ID NO: 415872

SEQ ID NO: 416750 - DNA, 873 bp, Staphylococcus aureus; identical to SEQ ID NO: 415873

SEQ ID NO: 416751 - DNA, 306 bp, Staphylococcus aureus; identical to SEQ ID NO: 415874

SEQ ID NO: 416752 - DNA, 1239 bp, Staphylococcus aureus; identical to SEQ ID NO: 415875

SEQ ID NO: 416753 - DNA, 561 bp, Staphylococcus aureus; identical to SEQ ID NO: 415876

SEQ ID NO: 416754 - DNA, 663 bp, Staphylococcus aureus; identical to SEQ ID NO: 415877

SEQ ID NO: 416755 - DNA, 693 bp, Staphylococcus aureus; identical to SEQ ID NO: 415878

SEQ ID NO: 416756 - DNA, 768 bp, Staphylococcus aureus; identical to SEQ ID NO: 412680

SEQ ID NO: 416757 - DNA, 501 bp, Staphylococcus aureus; identical to SEQ ID NO: 415880

SEQ ID NO: 416758 - DNA, 477 bp, Staphylococcus aureus; identical to SEQ ID NO: 415881

SEQ ID NO: 416759 - DNA, 612 bp, Staphylococcus aureus; identical to SEQ ID NO: 415882

SEQ ID NO: 416760 - DNA, 360 bp, Staphylococcus aureus; identical to SEQ ID NO: 412681

SEQ ID NO: 416761 - DNA, 429 bp, Staphylococcus aureus; identical to SEQ ID NO: 412682

SEQ ID NO: 416762 - DNA, 693 bp, Staphylococcus aureus; identical to SEQ ID NO: 412683

SEQ ID NO: 416763 - DNA, 1212 bp, Staphylococcus aureus; identical to SEQ ID NO: 415887

SEQ ID NO: 416764 - DNA, 585 bp, Staphylococcus aureus
atgaaatactttattccagcttggtacgatgaccaacgatggtggcaagacacgactgtgccgtattatcaactacaaaataagacggaatttgacgatatgattagtttaatgggaatgcaccttgaaaatgacttagattatcaactgattgttctcaatcatgcaccaaatttaagaacatttttacatcgatatgacttatatgaaacaaagtattcgtctgtgtttgatgaaattcaaggattcagtcaccatgcgccacaagcgattaattatcatcacttaaaatggccggatgatgttgagtttgtgtacacgccgtatttattaaaatgtgtgacgagtgaacagacctatacaaatatttattttagtcaagaagggtattcaatttggtttgaagaatttgaaagagatcagttacaacggcgttatatttttgatgacagaggttatttatcagcgatacgttattttgatgatcagggagaggcttcttaccaacaatatttaacgattaatggagattgtgtacttcatgaagatttgaaaaatggcagagtcactgtatcaaaaagatag

SEQ ID NO: 416765 - DNA, 936 bp, Staphylococcus aureus
atggctcaactaattgaagaaaaatttcaagcaatgattgcacaacaaatacatgaagatgatcatgtgattgtggcttcagatgctaggcacaatcgacaaatagccaatcatattccagcgaaattgttaagttattcattttttaaaaatagaaatgaaactgtgtcagatgaggaatatcaatctatcgtaaagaatgcccatttaattgttgatagtgtgcaactagaacgtgatttaattagtcatcaagagaagtatcagcgggagaatacaatgattcgaatcacaccatttgaaacgagacaatcacctaatataagtagtcaattgatggaaacatttataggtgtatggatagatggtatgagtgacgctgatttgcaacaaatgatgcaacgacttgtggattatatcgcacaggaagattattaccgtttaattttattatcgcgccatcaaaatgacataccgatgtggcttcgtgaatgtattacgtcggtaaatgaggaataccaagctaaacagaatgcggatgttaatgtttcagcattaatgacacctgaagatcaagatgacatcattgctgttaagacgatacatgctgaacatgatgttgtagaagcattgcggacgttgcgacttgtgatagatatgtcaaaagaacctgatttgtatttacaaattagtgcaattagcgctgggattccacaaattaatggtcaacaaacagattacgtctctgattatgacaatggccgtattataaatacagttgatgaattagatgatgcgttaaattattatttattttatttgaaaaattggaattatgcgtacgcctattctttaaaattaatagatgcatatgcttctaagaatattattaatcagctcgatgagttaatagaaggtgaaaatgatgccacgtaa

SEQ ID NO: 416766 - DNA, 1572 bp, Staphylococcus aureus
atgatgccacgtaaatttagagttttgcaaattggaggagacgatttagaacctatttttcaacacaaaaaaggtgtgagttgggattacttcgatattggattgtttgaatttgatagtggttatgtagaggctattgaagcgattgttgaagcagaagggcgctttgattttatctatattcaagcaccatactcggagacattaacgaatttattacaaatgataagcgaaccatacaatacgtatgttgatgaatcattttggtcagttgaatatgaacaagacgaaaatgtccaaaaatacgttgttcaaccattacattaccggaatattgaagaacgtaataataaattagaggcagttagcttctcaggacagtatggagataaagtttcccctaagttagcacttgtgcatccgaattttaaagtagatgtcgtataccaaggtaattcagagctcacgttgagtggagaatttggaaaagaatttaaacctatcgcatcttggcaaaataatctcgtttacgataaagataaagtcattcaaatatggccagaatttgatattgatggtgcggtcgagttgcaatatacatttagattgattcagactggcgctgatggtgcattaattgaacaaatcatattaactgatgatatgttagacagtcctttagagatacctgcgaaaccatttgatgcttatataagtgtaactgttaaggcgcgtgggaacgggacggtacatttaggacctatacacaaacgatggtctagattagacatgggtcaatttttacttggtggtagtcgtttcgtagatagtcaacgacaggaatttatttattatttccaccctggtgatatgaaaccgccactaaacgtatattttagtggttatcgaacagcggaaggtttcgaaggatattatatgatgaaacgtatgaatgcaccgtttttacttatcggcgatcctcgtgttgaaggtggtagcttttatatcggttcatctgaatatgaacaaggtattatcaatgttattgacgagacattagaaaagctgaattttaaatcacatgaattaatattatctggtttatctatgggttcatttggtgccttgtattatggtgctcagttaaatcctcaggcaattattgttggtaaaccacttgttaatattggaacgattgctgaacatatgcgattacttagaccagaagagttcggtacagcattagacgtcctggtgtctaatgaaggtgatacatctcaagcgtcgataaaggcattaaatcaaaaattttggcaaacatttcaaaagaaatcattgtcacaaactgtttttgccatagcatatatgcaacatgatgattatgatccacatgcatttcaagagctattacctgtattgacagcacaccaagcaagagtgatgaatcgcagtattcctgggcgacataatgatgattcacctaccattgcaagttggtttgttaatttttacaacattattttggaagacaagtttgggagagttcaacatgctgaaaaacaaaacatttaa

SEQ ID NO: 416767 - DNA, 1509 bp, Staphylococcus aureus; identical to SEQ ID NO: 415716

SEQ ID NO: 416768 - DNA, 1359 bp, Staphylococcus aureus; identical to SEQ ID NO: 415891

SEQ ID NO: 416769 - DNA, 1908 bp, Staphylococcus aureus; identical to SEQ ID NO: 415892

SEQ ID NO: 416770 - DNA, 561 bp, Staphylococcus aureus; identical to SEQ ID NO: 415893

SEQ ID NO: 416771 - DNA, 1860 bp, Staphylococcus aureus; identical to SEQ ID NO: 415894

SEQ ID NO: 416772 - DNA, 2982 bp, Staphylococcus aureus; identical to SEQ ID NO: 415895

SEQ ID NO: 416773 - DNA, 939 bp, Staphylococcus aureus; identical to SEQ ID NO: 415896

SEQ ID NO: 416774 - DNA, 1953 bp, Staphylococcus aureus; identical to SEQ ID NO: 410913

SEQ ID NO: 416775 - DNA, 1875 bp, Staphylococcus aureus; identical to SEQ ID NO: 415898

SEQ ID NO: 416776 - DNA, 459 bp, Staphylococcus aureus; identical to SEQ ID NO: 415899

SEQ ID NO: 416777 - DNA, 528 bp, Staphylococcus aureus; identical to SEQ ID NO: 405641

SEQ ID NO: 416778 - DNA, 1530 bp, Staphylococcus aureus; identical to SEQ ID NO: 414914

SEQ ID NO: 416779 - DNA, 450 bp, Staphylococcus aureus; identical to SEQ ID NO: 415901

SEQ ID NO: 416780 - DNA, 1236 bp, Staphylococcus aureus; identical to SEQ ID NO: 415902

SEQ ID NO: 416781 - DNA, 1011 bp, Staphylococcus aureus; identical to SEQ ID NO: 415903

SEQ ID NO: 416782 - DNA, 1431 bp, Staphylococcus aureus; identical to SEQ ID NO: 415904

SEQ ID NO: 416783 - DNA, 705 bp, Staphylococcus aureus; identical to SEQ ID NO: 415906

SEQ ID NO: 416784 - DNA, 2508 bp, Staphylococcus aureus
ttgaaaaaaagaattgattatttgtcgaataagcagaataagtattcgattagacgttttacagtaggtaccacatcagtaatagtaggggcaactatactatttgggataggcaatcatcaagcacaagcttcagaacaatcgaacgatacaacgcaatcttcgaaaaataatgcaagtgcagattccgaaaaaaacaatatgatagaaacacctcaattaaatacaacggctaatgatacatctgatattagtgcaaacacaaacagtgcgaatgtagatagcacaacaaaaccaatgtctacacaaacgagcaataccactacaacagagccagcttcaacaaatgaaacacctcaaccgacggcaattaaaaatcaagcaactgctgcaaaaatgcaagatcaaactgttcctcaagaagcaaattctcaagtagataataaaacaacgaatgatgctaatagcatagcaacaaacagtgagcttaaaaattctcaaacattagatttaccacaatcatcaccacaaacgatttccaatgcgcaaggaactagtaaaccaagtgttagaacgagagctgtacgtagtttagctgttgctgaaccggtagtaaatgctgctgatgctaaaggtacaaatgtaaatgataaagttacggcaagtaatttcaagttagaaaagactacatttgaccctaatcaaagtggtaacacatttatggcggcaaattttacagtgacagataaagtgaaatcaggggattattttacagcgaagttaccagatagtttaactggtaatggagacgtggattattctaattcaaataatacgatgccaattgcagacattaaaagtacgaatggcgatgttgtagctaaagcaacatatgatatcttgactaagacgtatacatttgtctttacagattatgtaaataataaagaaaatattaacggacaattttcattacctttatttacagaccgagcaaaggcacctaaatcaggaacatatgatgcgaatattaatattgcggatgaaatgtttaataataaaattacttataactatagttcgccaattgcaggaattgataaaccaaatggcgcgaacatttcttctcaaattattggtgtagatacagcttcaggtcaaaacacatacaagcaaacagtatttgttaaccctaagcaacgagttttaggtaatacgtgggtgtatattaaaggctaccaagataaaatcgaagaaagtagcggtaaagtaagtgctacagatacaaaactgagaatttttgaagtgaatgatacatctaaattatcagatagctactatgcagatccaaatgactctaaccttaaagaagtaacagaccaatttaaaaatagaatctattatgagcatccaaatgtagctagtattaaatttggtgatattactaaaacatatgtagtattagtagaagggcattacgacaatacaggtaagaacttaaaaactcaggttattcaagaaaatgttgatcctgtaacaaatagagactacagtattttcggttggaataatgagaatgttgtacgttatggtggtggaagtgctgatggtgattcagcagtaaatccgaaagacccaactccagggccgccggttgacccagaaccaagtccagacccagaaccagaaccaacgccagatccagaaccaagtccagacccagaaccggaaccaagcccagacccggatccggattcggattcagacagtgactcaggctcagacagcgactcaggttcagatagcgactcagaatcagatagcgattcggattcagacagtgattcagattcagacagcgactcagaatcagatagcgactcagaatcagatagtgagtcagattcagacagtgactcggactcagacagtgattcagactcagatagcgattcagactcagatagcgattcagactcagacagcgattcagattcagacagcgactcagaatcagacagcgactcagactcagatagcgactcagactcagacagcgactcagattcagatagcgattcagactcagacagcgactcagactcagacagcgactcagactcagatagcgattcagactcagacagcgactcagattcagatagcgattcggactcagacagcgattcagattcagacagcgactcagactcggatagcgattcagattcagacagcgactcagactcggatagcgactcggattcagatagtgactccgattcaagagttacaccaccaaataatgaacagaaagcaccatcaaatcctaaaggtgaagtaaaccattctaataaggtatcaaaacaacacaaaactgatgctttaccagaaacaggagataagagcgaaaacacaaatgcaactttatttggtgcaatgatggcattattaggatcattactattgtttagaaaacgcaagcaagatcataaagaaaaagcgtaa

SEQ ID NO: 416785 - DNA, 1425 bp, Staphylococcus aureus; identical to SEQ ID NO: 416137

SEQ ID NO: 416786 - DNA, 888 bp, Staphylococcus aureus; identical to SEQ ID NO: 414943

SEQ ID NO: 416787 - DNA, 756 bp, Staphylococcus aureus; identical to SEQ ID NO: 415911

SEQ ID NO: 416788 - DNA, 252 bp, Staphylococcus aureus; identical to SEQ ID NO: 408119

SEQ ID NO: 416789 - DNA, 498 bp, Staphylococcus aureus; identical to SEQ ID NO: 415914

SEQ ID NO: 416790 - DNA, 1881 bp, Staphylococcus aureus; identical to SEQ ID NO: 415915

SEQ ID NO: 416791 - DNA, 606 bp, Staphylococcus aureus; identical to SEQ ID NO: 415916

SEQ ID NO: 416792 - DNA, 1371 bp, Staphylococcus aureus; identical to SEQ ID NO: 415917

SEQ ID NO: 416793 - DNA, 1851 bp, Staphylococcus aureus; identical to SEQ ID NO: 415918

SEQ ID NO: 416794 - DNA, 537 bp, Staphylococcus aureus; identical to SEQ ID NO: 415919

SEQ ID NO: 416795 - DNA, 1623 bp, Staphylococcus aureus; identical to SEQ ID NO: 415920

SEQ ID NO: 416796 - DNA, 564 bp, Staphylococcus aureus; identical to SEQ ID NO: 415921

SEQ ID NO: 416797 - DNA, 1491 bp, Staphylococcus aureus; identical to SEQ ID NO: 415922

SEQ ID NO: 416798 - DNA, 1710 bp, Staphylococcus aureus; identical to SEQ ID NO: 415923

SEQ ID NO: 416799 - DNA, 213 bp, Staphylococcus aureus; identical to SEQ ID NO: 404795

SEQ ID NO: 416800 - DNA, 444 bp, Staphylococcus aureus; identical to SEQ ID NO: 415925

SEQ ID NO: 416801 - DNA, 1599 bp, Staphylococcus aureus; identical to SEQ ID NO: 415926

SEQ ID NO: 416802 - DNA, 1497 bp, Staphylococcus aureus; identical to SEQ ID NO: 408120

SEQ ID NO: 416803 - DNA, 891 bp, Staphylococcus aureus; identical to SEQ ID NO: 415928

SEQ ID NO: 416804 - DNA, 417 bp, Staphylococcus aureus; identical to SEQ ID NO: 404800

SEQ ID NO: 416805 - DNA, 1338 bp, Staphylococcus aureus; identical to SEQ ID NO: 415930

SEQ ID NO: 416806 - DNA, 1449 bp, Staphylococcus aureus; identical to SEQ ID NO: 415931

SEQ ID NO: 416807 - DNA, 705 bp, Staphylococcus aureus; identical to SEQ ID NO: 415933

SEQ ID NO: 416808 - DNA, 861 bp, Staphylococcus aureus; identical to SEQ ID NO: 415934

SEQ ID NO: 416809 - DNA, 819 bp, Staphylococcus aureus; identical to SEQ ID NO: 415935

SEQ ID NO: 416810 - DNA, 852 bp, Staphylococcus aureus; identical to SEQ ID NO: 415936

SEQ ID NO: 416811 - DNA, 384 bp, Staphylococcus aureus; identical to SEQ ID NO: 415937

SEQ ID NO: 416812 - DNA, 1077 bp, Staphylococcus aureus
atgacaaaaatttttaaaatatcatttttgattttgttagtagtaattgtttctagttattatggtgaaagttttgtcttagctgataataatcctatcgtcaattcagaaaatggtagtgataataattttgaatcaggaacaattgaacgtaatcaaaatgagctttatgaagtaggtgattatagtacgcccttaactgagcgagttttcggcaaagatcaaagaacggttgttaataatattttacaaagaccttataagcagactgtattattaaatatgacgttttcaaataaccgtgtatataaaggcaccggtactatgattggtaaggacattgtattgacagcggctcataatgtctattctaaagacgataagggttgggctaaaaagattgatgtctatgctggagtaaatgggcaaacatatacaataggaaaggccttttcgcataagttttttgtatctaaaacttggattaataatgctcctacaaaagaagatatagcaattattaagttaaatagtaatttaggaaataaaacaggttacttaactttgaacacacacattagcaaaggtgaaaatattgaaatttctggatttccaggagacaagtcagacaacagacaatataaaggtaaagggaaattagaaagttttgatgagaatgaaatgtattatacggtagacacattttcaggacaaagtggtagtgcgataagagattcaaaaaacaatatcatcggagtacatgcatacggcagatataatcataattcaggcgtgagaataaatgatttaaaattagattacataaattattggataggtaagtatagaagtcatccatataataagaaagtgaaagtaattaaaagtaagtatatatattggaaaaacattgaaattacaaaaaagggtgataataaattaattaaaaaagataaagcgtacacagctaaactctattacaatattccaaatgggtataaatattactctttatacgacgaaaaaaatagatggatgggttactttaatagcaatgatattaaggtagtaaaatag

SEQ ID NO: 416813 - DNA, 636 bp, Staphylococcus aureus; identical to SEQ ID NO: 408193

SEQ ID NO: 416814 - DNA, 1683 bp, Staphylococcus aureus
atgaaccaacatttactaggaaatccaaaattaactgtaactcatgtcaatgaagtgaaaaccggtattaaccacatcgttgtcgacagtgttcaatatggaaatcaagaaatgattatggaaaaagatgtcactgtggaaatgcgcgatggcgaaaaattatatattaatattttcagaccaaataaagatggcaaattccctgtagttatgtctgcagatacttacggtaaagataataagcctaaaatcaccaatatgggtgccctttggccaacattaggcgccattccgacatctagttttacacctgaagaatcaccagacccaggattttgggtaccaaacgattatgttgtagttaaagttgcattacgcggtagtgacaaatccaaaggcgtcttatctccatggtcaaaaagagaagcggaagattattacgaagtgattgaatgggcagcaaaacagccatggagtaatggaaatatcggaacaaatggtgtttcttatcttgcggtgactcaatggtgggtcgcatcattaaatccaccacatttaaaagcaatgattccttgggaaggattaaatgatatgtatagagaagtagcctttcacgggggtattcctgatactggcttttatcgtttctggatacaaggtatttttgcgagatggacagataatccaaatatcgaagacatgattcaagcacaacaagaacaccctttgttcgatgatttttggaaacagcgtcaagtgccattatcacaaattaaaacacctctactaacatgtgctagttggtctacacaaggtttgcacaaccgtggctcttttgaaggatttaaacaagctgcatcagaagaaaaatggctatatgtgcatggacgtaaagagtgggaaagttactacgctagagaaaatctcgaacgccaaaaatcattctttgatttttaccttaaagaagaaaataacgattggaaagatacgcctcatgtcatatatgaagttagagatcaattttataaaggcgaattcaaatcagcgtcagcgttccctttacctaacacagaatatacaccattgtatttaaatgctgaaaatcacacattgaatcatgcaaagattagtagcgcgtatgtcgcacaatatgactctgaagataaacgacaagatgtaagttttaaatatacgtttgacaaagatactgagttagttggaaacatgaacttaaaactatgggtaagcactacagactcagacgatatggatttatttgcaggtattaaaaagttagatcgtcgtggtaatgaagttaacttccctgattttaatcatattgaaaatggtcaagtagctactggttggttacgcgtatcacatcgtgaattagatcaagaaaaatccacaatcgcgcaaccttggcataaacatgaaacagaattaaagttgtcacaagatgagattgtacctgttgaaatcgaattgttaccttcaggcacgctatttaaacaaggcgaaacattggaagttgttgtaaaaggtagtgaaattgtaattggtaatagtacccctggcatgaaaacacgttatgaacatgaagaaaccataaataacggcatgcacatgatttatactggtggtaaatatgattcacaattaatcattcctatcgttaattga

SEQ ID NO: 416815 - DNA, 588 bp, Staphylococcus aureus; identical to SEQ ID NO: 415940

SEQ ID NO: 416816 - DNA, 450 bp, Staphylococcus aureus; identical to SEQ ID NO: 415941

SEQ ID NO: 416817 - DNA, 723 bp, Staphylococcus aureus; identical to SEQ ID NO: 415942

SEQ ID NO: 416818 - DNA, 276 bp, Staphylococcus aureus; identical to SEQ ID NO: 415943

SEQ ID NO: 416819 - DNA, 1065 bp, Staphylococcus aureus; identical to SEQ ID NO: 415944

SEQ ID NO: 416820 - DNA, 867 bp, Staphylococcus aureus; identical to SEQ ID NO: 415945

SEQ ID NO: 416821 - DNA, 276 bp, Staphylococcus aureus; identical to SEQ ID NO: 415946

SEQ ID NO: 416822 - DNA, 339 bp, Staphylococcus aureus; identical to SEQ ID NO: 415947

SEQ ID NO: 416823 - DNA, 297 bp, Staphylococcus aureus; identical to SEQ ID NO: 415948

SEQ ID NO: 416824 - DNA, 1107 bp, Staphylococcus aureus; identical to SEQ ID NO: 415949

SEQ ID NO: 416825 - DNA, 1347 bp, Staphylococcus aureus
atgcacatgttagaagtgaaatatgatatgagaactgggcattatacgcccatacctcatgaacctcattatttggttattagccatgcggataaacttaccgcaacagaaaaagcgaaattaagattattaatcataaaacagaaattagatatttcattggcagaaagtgtagtttcttcgcctatagcgagtgaacatgtgatagaacaattgacactatttcaacatgagcgacgacatttaagacctaaaataagtgcgacatttttagcctggttgttgatatttttaatgtttgcattgccaattggtatcgcttatcaattttcagattggtttcaaaatcagtatgtatcagcatggatagaatatttaactcaaacaacattgctcaatcacgatatattacagcatatattatttggtgattatggtgtgctatcacttggaacatattcgctcgtatgggcattgccggttgtaatattaattagtttatcaactgcaataattgatcaaacaggactcaaatcatggatgatatgggcaattgaaccgtcaatgttatggatcggattacaaggtaatgatatcgtgccactattagaaggatttggatgtaatgcagcagctatttcacaagcagcacaccaatgccatacctgcacgaagacacagtgtatgagtttaataagctttggtagttcttgtagttatcaaataggtgcgacattatctatttttagtgtagctggaaagtcatggctatttatgccgtacttaatattagtacttttaggtggcatcttacataataggatatggttgaaaaagaatgatcaacaacttagtgttccgctaccttatgataggcaattacatatgccaaatatacgtcaaatgttgctacaaatgtggcaaaatatacaaatgtttatcgttcaagcgctacctatttttatcacaatctgtcttattgttagtattttatcactaacgccaattttgaatgttttatcacaaatatttacacctatattatcgttattaggcatctcttcagaattgtcaccagggattttattttcaatgattcgaaaagacggcatgctcttgtttaatttgcatcaaggcgccttattacaaggaatgacagcaacacagttactactacttgtgttttttagttcaacatttacagcgtgctcggtcacaatgacgatgcttttgaaacatttaggtggtcagtcagcactaaaattaattggaaagcaaatggtgacatcattgtctttagttattggtgtaggcatcattgttaaaatagtaatgctgattatttaa

SEQ ID NO: 416826 - DNA, 891 bp, Staphylococcus aureus
atgaaaatagttattataggtgggtttttaggtggcggtaaaacgactgtcttaaatcatttgctcgctgaatcattaaaggaatcgctgaaaccagcagtcatcatgaatgaatttgggaaaatgagtgttgatggtgccttagtatctgaagacatacctttaagtgaactgacagaggggtgtatctgttgcgcaatgaaagcagatgtatcagaacagttacatcaattatatttaaaagagcaaccagacattgtatttattgaatgtagtgggattgcagaaccagtctctgtcttagatgcttgtttaacgcctattttagctccgtttacaacaattacacatatgattggtgtaatagacgcaagcatgtataaacacattaaatcattccctaaagacatccaaggcttattttatgagcaattagcatattgttctgtcttatttgttaataaaatagattcagcagatgttgaaacaacgagcaaactattgaaagatttagaagttattaacccagaggccgatatacaagtcggtatgcatggcagcgtcactttgccaatatcagttagacaaatgacagcaacttctgacaataaacatgaatcattacacaaaacaataaatcatcaatttgtgcaatcaccagtcacatgtactaaagcagagtttataaaacgtttagcatgccttccgtctcatatttataggttgaaagggtttatgacatttgaagacaccacacatacgtatctcattcaatttacacaaggccaatatgaattaacacctgtagcattttcaaaaaaagtgccagaatatttggtgcttatcggaaagggtatttcaaaagaagactatcaatgtttggagcagtag

SEQ ID NO: 416827 - DNA, 831 bp, Staphylococcus aureus
atggaaactttagaattacaaggcgctaaattacgataccaccaagtcggacaaggacccgtgctcatctttattcctggtgcaaacggtaccggaaacatttttctgcctcttgcagaacagttaaaagaccattttactgttgtagccgttgatcgtcatgattatggagaaagcgagttaactgaaccactccctgattccgcttcaaaccctgacagtgattatcgtgtcaaacgcgacgcacaggacattgccgaacttgcaaagtcattaagtgatgaacctgtctatatattaggttcaagttcaggttcaatcgttgcgatgcatgtgttaaaagattaccctgaagtcgttaaaaagattgcatttcacgaaccaccaattaatacatttttaccagacagtacttattggaaagataaaaatgatgacattgtgcatcaaattttaacagaaggcttagaaaaaggtatgaaaacatttggtgaaacattaaatatcgcaccaattgatgcaaaaatgatgtctcaacctgctgatactgaagaaggacgtatagaacagtacaaacgtacgatgttctggtcagaatttgaaattagacaatatacgcattcagatattactttggatgatttcacaaaatacagcgataaaatcaccctactaaatgggacagattctagaggctccttcccacaagatgttaacttttatataaacaaagaaactggcatacctattgtagatattccaggcggtcacttaggttatattcaaaaacctgaaggctttgctgatgtattattaaatatgtggggttaa

SEQ ID NO: 416828 - DNA, 1011 bp, Staphylococcus aureus; identical to SEQ ID NO: 415953

SEQ ID NO: 416829 - DNA, 705 bp, Staphylococcus aureus; identical to SEQ ID NO: 415954

SEQ ID NO: 416830 - DNA, 558 bp, Staphylococcus aureus; identical to SEQ ID NO: 415955

SEQ ID NO: 416831 - DNA, 300 bp, Staphylococcus aureus; identical to SEQ ID NO: 415956

SEQ ID NO: 416832 - DNA, 822 bp, Staphylococcus aureus; identical to SEQ ID NO: 415957

SEQ ID NO: 416833 - DNA, 378 bp, Staphylococcus aureus; identical to SEQ ID NO: 415958

SEQ ID NO: 416834 - DNA, 231 bp, Staphylococcus aureus; identical to SEQ ID NO: 415792

SEQ ID NO: 416835 - DNA, 321 bp, Staphylococcus aureus; identical to SEQ ID NO: 404830

SEQ ID NO: 416836 - DNA, 588 bp, Staphylococcus aureus; identical to SEQ ID NO: 415961

SEQ ID NO: 416837 - DNA, 702 bp, Staphylococcus aureus; identical to SEQ ID NO: 410926

SEQ ID NO: 416838 - DNA, 276 bp, Staphylococcus aureus; identical to SEQ ID NO: 409072

SEQ ID NO: 416839 - DNA, 243 bp, Staphylococcus aureus; identical to SEQ ID NO: 414970

SEQ ID NO: 416840 - DNA, 1812 bp, Staphylococcus aureus; identical to SEQ ID NO: 415966

SEQ ID NO: 416841 - DNA, 768 bp, Staphylococcus aureus; identical to SEQ ID NO: 408192

SEQ ID NO: 416842 - DNA, 498 bp, Staphylococcus aureus; identical to SEQ ID NO: 415968

SEQ ID NO: 416843 - DNA, 1494 bp, Staphylococcus aureus; identical to SEQ ID NO: 409073

SEQ ID NO: 416844 - DNA, 1128 bp, Staphylococcus aureus; identical to SEQ ID NO: 415970

SEQ ID NO: 416845 - DNA, 864 bp, Staphylococcus aureus; identical to SEQ ID NO: 414666

SEQ ID NO: 416846 - DNA, 1509 bp, Staphylococcus aureus; identical to SEQ ID NO: 415972

SEQ ID NO: 416847 - DNA, 1155 bp, Staphylococcus aureus; identical to SEQ ID NO: 408190

SEQ ID NO: 416848 - DNA, 1029 bp, Staphylococcus aureus; identical to SEQ ID NO: 415974

SEQ ID NO: 416849 - DNA, 207 bp, Staphylococcus aureus; identical to SEQ ID NO: 404844

SEQ ID NO: 416850 - DNA, 2409 bp, Staphylococcus aureus; identical to SEQ ID NO: 415976

SEQ ID NO: 416851 - DNA, 192 bp, Staphylococcus aureus; identical to SEQ ID NO: 415977

SEQ ID NO: 416852 - DNA, 600 bp, Staphylococcus aureus; identical to SEQ ID NO: 415978

SEQ ID NO: 416853 - DNA, 1545 bp, Staphylococcus aureus; identical to SEQ ID NO: 415979

SEQ ID NO: 416854 - DNA, 549 bp, Staphylococcus aureus; identical to SEQ ID NO: 415980

SEQ ID NO: 416855 - DNA, 2490 bp, Staphylococcus aureus; identical to SEQ ID NO: 415981

SEQ ID NO: 416856 - DNA, 228 bp, Staphylococcus aureus; identical to SEQ ID NO: 404851

SEQ ID NO: 416857 - DNA, 1995 bp, Staphylococcus aureus
atggaaaattattgtattttaggaaatcctaatgttggtaaaacatctttgtttaacgctttaactggttcgtatgaatatataggcaactggagtggcgtaacggtagagaaaaaagtagggaaacttaaagaaaatgtaggacaattaattgatttaccaggtacatatgatttatcgccgatttctaaagatgaaactgtagtgacagactatttattaaacgattcattttcaggaatcattaacattgttgatgcgagtcaactaaaaagaaatgtgcaattaacagtacaattgttagaacttaatcaaccaatatacatcggattaaatatgattgatgtagctacaaagcgcgggataaaaatcgattatcataaattgatgaaaaagttaaaaacacctatttttccagttgtggcacgtacaggcaaaggaacaaaatatttacttggcgaaataaagcatctaggggaagggtatcaaccgcattttaaaatcaattatggtgagaagattgaagagacaattaaaaatatgtgtcaaataataatgacagagacatctcatgataagtatcaagctaggtttattgcgattcaattcttattaaataacatgcaaattgcaaacgaacttaattcagaggttgtaaataaattgtcgagtttacgtgatcaagttgctgaacaagtaggggctgtatctgttcgtcgagagatggagcgtatacgcaatcattatattgagacgttattgcaagacgtggtaacgtatccagatgaagataagcaatatttcagctctagaatagacaagatattaacacataaatatatagggatgcctatctttctagcaattatgtggttgatctttcaaactacatttacatggattggcacacctttgtcggatcaactcgatgcatttataggtggtacatttacagatagtgtgaagacgattatgaattatctaggggttataccatttttacaagatttaattacagatggcattattgctggtgtaggatcagtattagtctttgtaccacaaattgttgtgctctttttctttatatctttattagaagattcaggttatatggcacgtattgcggttttaatggatcgtattatggaatcgttcggtttaagcgggaagtcttttataccaatgattatcggatttggttgtaatgtaccgagtattatggctgcgcgcagtattgaaaatgaaaaagagcgtttaacaacgatattaattgcaccattcatgtcatgctctgctagactgccagtgtatgcgttgttcgtaggtatctttttcaaagagaatcaatctttagtagtattaagcctgtatgttttaggtattattatggcatttttagtcagtacagtacttactaagacgattttaaaaaatgataatgcaatctttattgtggaattgccaacataccgtgtgccttccattaaaacgttgtggcgtagtacttgggaaaaggctaagggctttgttcgtaaagcaggtacatttatttttggcggctcagtagtcatttggctattaagttatgtaggaccacatggtatcaatgtgaatatcaatcaaagttttttacatatggttggtagtttctttggtatgttagtgcaaccgctcggatttggaacatggcaagcaggtgctacgttagtgccaggatttttagcaaaagaagttatcgtaagttcgatggcgattatctattcatcaggtgatgcaggccttgttaatgtgattcaaaatcaattcacaccgctatctgcgtatgcatttatgatatttatactattgtatattccttgtgtttctacagtggcagcaatccgtaaagagacttattcatggaaatggacggcacttgcagttgcctatcctctagtcactgcatatgtcttaacattcattttttatcaagtcggacatttatttgtttaa

SEQ ID NO: 416858 - DNA, 171 bp, Staphylococcus aureus; identical to SEQ ID NO: 415984

SEQ ID NO: 416859 - DNA, 2106 bp, Staphylococcus aureus; identical to SEQ ID NO: 415985

SEQ ID NO: 416860 - DNA, 522 bp, Staphylococcus aureus; identical to SEQ ID NO: 415986

SEQ ID NO: 416861 - DNA, 1167 bp, Staphylococcus aureus; identical to SEQ ID NO: 415987

SEQ ID NO: 416862 - DNA, 1278 bp, Staphylococcus aureus; identical to SEQ ID NO: 415988

SEQ ID NO: 416863 - DNA, 432 bp, Staphylococcus aureus; identical to SEQ ID NO: 415989

SEQ ID NO: 416864 - DNA, 219 bp, Staphylococcus aureus; identical to SEQ ID NO: 404860

SEQ ID NO: 416865 - DNA, 864 bp, Staphylococcus aureus; identical to SEQ ID NO: 415991

SEQ ID NO: 416866 - DNA, 396 bp, Staphylococcus aureus; identical to SEQ ID NO: 415992

SEQ ID NO: 416867 - DNA, 690 bp, Staphylococcus aureus; identical to SEQ ID NO: 413589

SEQ ID NO: 416868 - DNA, 1740 bp, Staphylococcus aureus; identical to SEQ ID NO: 415994

SEQ ID NO: 416869 - DNA, 2100 bp, Staphylococcus aureus; identical to SEQ ID NO: 415995

SEQ ID NO: 416870 - DNA, 411 bp, Staphylococcus aureus; identical to SEQ ID NO: 415996

SEQ ID NO: 416871 - DNA, 357 bp, Staphylococcus aureus
atggttaagcaattaaatagtgtcgaagcattccgtgaatttattcatcaatatccgttagcagttgtacatgtcatgcgcgatcagtgtagcgtgtgtcatgccgttttaccacaaattgaagacttgatgcaatcatatcccaatgtgccattagctgtgattaatcaaagtcaagttgaagctattgctggagaattaaatattttcactgtacctgtggatttaatttttatgaatggaaaagaaatgcatcgtcaagggcgttttatcgatatgcaacgttttgaacatcatcttaagcaaatgaatgatagtgtgaataacgatgtcgatgagcatgaatatcgcaaatga

SEQ ID NO: 416872 - DNA, 969 bp, Staphylococcus aureus; identical to SEQ ID NO: 415997

SEQ ID NO: 416873 - DNA, 963 bp, Staphylococcus aureus; identical to SEQ ID NO: 415998

SEQ ID NO: 416874 - DNA, 204 bp, Staphylococcus aureus; identical to SEQ ID NO: 404870

SEQ ID NO: 416875 - DNA, 1044 bp, Staphylococcus aureus; identical to SEQ ID NO: 416000

SEQ ID NO: 416876 - DNA, 681 bp, Staphylococcus aureus; identical to SEQ ID NO: 416001

SEQ ID NO: 416877 - DNA, 900 bp, Staphylococcus aureus; identical to SEQ ID NO: 416002

SEQ ID NO: 416878 - DNA, 171 bp, Staphylococcus aureus; identical to SEQ ID NO: 404874

SEQ ID NO: 416879 - DNA, 492 bp, Staphylococcus aureus; identical to SEQ ID NO: 416004

SEQ ID NO: 416880 - DNA, 621 bp, Staphylococcus aureus; identical to SEQ ID NO: 416005

SEQ ID NO: 416881 - DNA, 723 bp, Staphylococcus aureus; identical to SEQ ID NO: 416006

SEQ ID NO: 416882 - DNA, 636 bp, Staphylococcus aureus; identical to SEQ ID NO: 404878

SEQ ID NO: 416883 - DNA, 801 bp, Staphylococcus aureus; identical to SEQ ID NO: 416008

SEQ ID NO: 416884 - DNA, 993 bp, Staphylococcus aureus; identical to SEQ ID NO: 416009

SEQ ID NO: 416885 - DNA, 672 bp, Staphylococcus aureus; identical to SEQ ID NO: 410190

SEQ ID NO: 416886 - DNA, 807 bp, Staphylococcus aureus; identical to SEQ ID NO: 416011

SEQ ID NO: 416887 - DNA, 285 bp, Staphylococcus aureus; identical to SEQ ID NO: 416012

SEQ ID NO: 416888 - DNA, 435 bp, Staphylococcus aureus; identical to SEQ ID NO: 410193

SEQ ID NO: 416889 - DNA, 960 bp, Staphylococcus aureus
atgataaataatcatgaattactaggtattcaccatgtcacagcaatgacagatgatgcagaacgtaattataaattttttacagaagtattaggcatgcgtttagttaaaaagacagtcaatcaagatgatatttatacgtatcatacattttttgcagatgatgtaggttcagcaggtacagatatgacattctttgattttccaaatattacaaaagggcaggcaggaacaaattccattacaagaccgtcttttagagtgcctaacgatgacgcattaatgtattatgaacagcgctttgatgaatttggtgttaaacacgaaggtattcaagaattatttggtaaaaaagtgttgccatttgaagaagtcgatggccaagtgtatcaattaatttcagatgagttaaatgatggggtagcacctggtgtaccttggaagaatggaccggttccagtagataaagcgatttatggattaggacccattgaaattaaagtaagttattttgacgactttaaaaatattttagagactgtttacggtatgacaactattgcgcatgaagataatgtcgcattacttgaagttggcgaaggcggcaatggtggccaggtaatcttaataaaagatgataaagggccagcagcacgtcaaggttatggtgaggtacatcatgtgtcatttcgtgtgaaagatcatgatgcaatagaagcgtgggcaacgaaatataaagaggtaggtattaacaactcaggcatcgttaatcgtttctattttgaagcattatatgcacgtgtggggcatattttaatagaaatttcaacagatggaccaggatttatggaagatgaaccgtatgaaacattaggtgaaggtttatcattgccaccatttttagaaaataaaagagagtatatagaatcagaaataagaccatttaatactaagcgttaa

SEQ ID NO: 416890 - DNA, 594 bp, Staphylococcus aureus; identical to SEQ ID NO: 416014

SEQ ID NO: 416891 - DNA, 1080 bp, Staphylococcus aureus
atgcgtatcttaaaagagtccattattgtggcatttgcctttgttggtgttgtcgttggtgccggctttgctactggtcaagaaattttccagtttttcacaagtcatggcgcatatagcatttcaggcattattgtaacaggactattgattactttaggtggaatggttgtcatgcatacaggtcatcatctaaagtccagaaatcattctgattcaattaactatttcttatacccctctattgcaagaggttttgatattattttaacaatgtttatgttgtctttagctattattatgactgcaggtggtgcgtcaaccattcatcaaagtttcaacttaccgtattggctgagcgcactcatattagtcgcctttattttagcaacactgtttctaaaattcgatcgtttaattgctgtgcttggtggagttactccatttttaattgcaattgtcattatgattgcggtctactatttcacaacgagtcatcttgattttactgccgctaataatgatgctcagattcataagcagaaatcattatcacctggatggtggtttgatgcgattaactatgcaagcttgcaaattgctgctgccttcagcttcttatcagtgatgggtagcaaagttaaatatcgtgactcaacgttatacgggggcttgattggcggtttaatcattacatttttactcatgatgattaacctaggtttaatttctcaattcgataaaattaaacacgtcgatttacctacattaaaattagcgacacaaatgtctccgtcaattggtattattatgtctgtcattatgatacttgtcatctacaatactgttgttggattaatgtatgcatttgcgtcacgtttcagcgttccattcagcagacgttacttcatcattattattacaatggctgtcatcacttatattagtacatttatcggtttcatttcattaattggaaaagtattccctattatgggattgttcggtttcatcttactcatacctgtactctataaaggtttaattaagcgtattaccggcaaatctcatatcgattaa

SEQ ID NO: 416892 - DNA, 1965 bp, Staphylococcus aureus; identical to SEQ ID NO: 416015

SEQ ID NO: 416893 - DNA, 771 bp, Staphylococcus aureus
atgggaactttaattaaacaagaatgtttcaaattatttaaaaagaaatcaacttttatcgcacctattgtcttcattctactaatggttgctcaaggttatatcgctacaaaatacaatgaaatttttacgccacaggaatctttcacatctgcttataatggtttttcatggtttgcatttttattaattattcaagcaagtacaatcatttcaatggaatttcattacggtacgattaaaaatttactctatcgtgaatattcaagaacaactatgattgttagcaaaatcatcacattatttattatttctttaatttattttgttattacaattattgcttcaattgttattgggtctttattctttaatgatttaaatatatttgaaagtagcggtaatcaattatctttattgaatcaattattattagttagtttaggtacatttgttggcgtttggttagttttaagcttaacgttgctattatcatctgcaactaattcaacgggtgtagccattgctgtaggtattgttttttattttgcaagttctattttagcagttattcaaacggcacttttagaaaaaatagactggctaaagtggaatcctattaatatgatgaatattatgcttcaaacagttgaaaaaggctttagtaagtcgacgaaattagaacttcatgaattgtttattggtaatattgcttatatttctattttcttaatacttgtagtatttattttcaagaagaaaaatatttag

SEQ ID NO: 416894 - DNA, 696 bp, Staphylococcus aureus; identical to SEQ ID NO: 414325

SEQ ID NO: 416895 - DNA, 1278 bp, Staphylococcus aureus
atgaaggaaaaacgaactaacgtaaggtggatgttcgcgcttgcgttcttctttattggggttattgcgtatatggatagagcaaacatttcatatatcgctaaacaaatgatggatgatttagggatgaccaaaccacaatttggtttattggcatcattcttctctctaggttatgcattaatgcaagtaccatcggggatgttggctgaaaaattcggtccacgtaagatgattacaattgcattagtttggtggagtgcatttacaatcttaacgggtatgattaagaaccacggtttaatttatttagtgagattcttatttggtgtgggtgaggcgccaatgtatccttctaatgctgtgtttaactcattttggttctctaaaaatgaaaaaggtagagcatcaagtgcattattagcaggatcatatttcggacctgtattagcaccaatagttacaattgctattgttaacgcatttaactggcaagcagtattttacatttttggtgcagtaggtattttaatggctgtattatgggcgattattgccaaagacttacctgagcaacatagaatggttaatgaagcggagaaacgtttcattatggaaaatcgtgatatcgtagctactgaaaagtcatcaccaccatggaataatttctttaaacgttttagcttctatgcaattgcaattcaatactttgttgtacaatttatcattacattattcttaatttggttaccgacgtatttaacagaagtattccacgttaactttaaagaaatgagcattagttcattaccttggttattaatgttcttcttaatcttatcagcaggtgcaatttctgaccgtgtattaggattaggtcgttcaaaattcgtagctagaggtgtaattgcaatcgcaggatttattgtgtttgcagtttcaattatctttgctgtacgtacaggaaatttatatgtaagtattttctggttatcactaggtcttggtggtatcggtatttcaatgggtatgagttgggctgcagcaactgacttaggacgtaacttctctggtacagtatcagggtggatgaacttatggggtaatataggtgcattaatcagtccgctattagcaggtctattcgtagaacatttaggttggacaatgacattccaattgttaatcgttccagcagtaatcgctgtgattatgtggttctatgtgaaaccagatcaacctttaattgttagtgatgataaagcaatagaaaaataa

SEQ ID NO: 416896 - DNA, 1824 bp, Staphylococcus aureus; identical to SEQ ID NO: 416017

SEQ ID NO: 416897 - DNA, 693 bp, Staphylococcus aureus; identical to SEQ ID NO: 416018

SEQ ID NO: 416898 - DNA, 678 bp, Staphylococcus aureus; identical to SEQ ID NO: 416020

SEQ ID NO: 416899 - DNA, 1554 bp, Staphylococcus aureus
atgaaatatatgattggtgtcgacattggaacgacgagtaccaagtcagtcttatatgatgaaaatggagcttttatcatgaaacatcaaatcggctatgatttacacacaccaaacgttgatgtctcagaagaaaacccagatgaattattcgatgcggtattaatgacaattaaatacataatgagggaatcgaaagttaatcaagatgatattaaatttgtgtcatttagtgcgcaaatgcatagcttgattgcgatggatcagcaacatcaaagattaacaaataatattacttgggcagataaccgcgctgcaaaatatgcaacagtaataaatgaagtgcatgatggcaatgcgatttatcagcgaacaggtacgcctattcatcctatgtcgcctttagtgaaaattttttggatgaaacatgaatggcaagatgtatttcaacgtactgctaagtttgcagatattaaaacatacattttctatcatttatttgatacatatatcattgattattcaatggcttccgcaacagggatgtttaatttagaaacattagattgggatgttggggcattagaattgcttggtatttccaaggaaatgttcccggaattagtgccaacaacgtacgtaatgaaaggcatgaaagaacgttatgcaacattaatggggcttaatgaagatacaccgtttgttattggtgcgagtgatggggtcctttctaatttgggtgtcaatagtgttggtaaaggagaagttgctgtcacaatcggtacatctggcgcgattcgtactgtgatagataaaccacgtactgattacaaaggtagaatattttgttatgtcttaacagaggaccactacgtcatcggaggtcctgtaaataatggtggtgtcgtattgagatggttgcgcgacgagttgctagcgagtgaagtcgaaactgcgaaacgtctcggtgttgatccttatgatgtcttaactcaaattgcaaagcgtgttaaaccaggtgcagatggtttaatattccatccctatttagctggagaacgtgcgccgctttggaacgcaaatgcaagaggttcattcttcggtttaactttatctcataaaaaagaacatatgattcgcgctgcattagaaggtgttctttacaatttgtataccgtctaccttgcactcattgaagtaatgaatgaaacgcctaatatgataaaagcaacaggtggttttgcgaaaagtgaagtatggcgtcaaatgatgtcagatatatttgacacagagttagtggttcctgaaagttatgaaagttcatgcttaggtgcctgcgtgcttggacttaaagctgtaggtgacattgaagatttttcaatcgtttcatcgatggtcggtgctacaaataatcatacgccgtttgaagaaaatgtcgctgtttaccaagagctcgtatccatttttatcaatttaagtcgttctttaacagagaattatgaacaaattgcagattttcaacgccaacatatggctgaaaataaaacacaataa

SEQ ID NO: 416900 - DNA, 1359 bp, Staphylococcus aureus; identical to SEQ ID NO: 416022

SEQ ID NO: 416901 - DNA, 201 bp, Staphylococcus aureus; identical to SEQ ID NO: 415389

SEQ ID NO: 416902 - DNA, 2886 bp, Staphylococcus aureus
gtgaaaagcaatcttagatacggcataagaaaacacaaattgggagcggcctcagtattcttaggaacaatgatcgttgttggaatgggacaagaaaaagaagctgcagcatcggaacaaaacaatactacagtagaggaaagtgggagttcagctactgaaagtaaagcaagcgaaacacaaacaactacaaataacgttaatacaatagatgaaacacaatcatacagcgcgacatcaactgagcaaccatcaaaatcaactcaagtaacaacagaagaagcaccaacaactgtgcaagcaccaaaagtagaaaccgaaatgaaatcacaagaagatttaccatcagaaaaagttgctgataaggaaactacaggaactcaagttgacatagctcaaccaagtaacgtctcagaaattaaaccaagaatgaaaagatcagctgacgttacagcagtttcagagaaagaagtagcggaagaagctaaagcgacaggtacagatgtaacaaataaagtggaagttactgaaagctctttagaaggacataataaagattcgaatattgttaatccgcataatgctcaaagagtaactttaaaatacaaatggaaatttggagaaggaattaaggcaggagattattttgatttcacattaagtgataatgttgaaacacatggtatatcaacactgcgtaaagttccggagataaaaagttcaacagaagataaagttatggcaaatggtcaagttataaatgaacgtacaattcgctatacatttactgattatataaataacaaaaaagatttaactgctgaattaaacttaaacctattcattgacccaacaacagtgacaaagcaagggagtcaaaaagttgaagtaacactaggtcaaaataaagtctcaaaagaatttgatatcaaatatttagacggcgttaaagatagaatgggtgttactgttaatggtcgtattgatactttgaataaagaagagggtaaatttagccattttgcatatgtgaagcctaacaaccagtcgttaacttctgtcacagtaactggtcaagtaacatctggatataaacaaagtgctaataatccaacagtcaaagtatataaacacattggttcagatgaattagctgaaagtgtttatgcaaagcttgatgataccagtaaatttgaagatgtgactgaaaaagtaaatctatcttacacaagtaatggtgggtacacattgaaccttggcgatttagataattcgaaagactatgtaattaaatatgaaggtgaatatgatcaaaatgctaaggatctaaatttccgaacacatctttcaggatatcataaatactacccatactatccttattacccgtattatccagttcaattaacttggaacaacggtgttgcattttactctaataatgctaaaggcgatggtaaagataaaccaaatgatcctatcattgagaagagtgaaccaattgatttagacattaaatcagagccaccagtggagaagcatgaattgactggtacaatcgaagaaagtaacgattctaagccaattgattttgaatatcatacagctgttgaaggtgcagaaggtcatgcagaaggtattattgaaactgaagaagattctattcatgtggattttgaagaatctacacatgaaaattcaaaacatcacgctgatgttgttgaatatgaagaggatacaaacccaggtggtggccaagtaacaactgagtctaacttagttgaatttgacgaagagtctacaaaaggtattgtaactggcgcagtgagcgaccatacaacagttgaagatacgaaagaatatacaactgaaagtaatctgattgaattagtggatgaattacctgaagaacatggtcaagcacaagggccaatcgaggaaattactgaaaacaatcatcatatttctcattctggtttaggaactgaaaatggtcacggtaattatggcgtgattgatgaaatcgaagaaaatagccacgttgatattaagagtgaattaggttatgaaggtggccaaaatagcggtaatcagtcattcgaggaagacacagaagaagataaacctaaatatgaacaaggtggtaatatcgtagatatcgatttcgacagtgtacctcaaattcatggtcaaaataatggtaaccagtcattcgaggaagacacagaagaagacaagcctaagtatgaacaaggtggtaacatcattgatatcgacttcgacagtgtgccacaaattcatggattcaataagcataatgaaattattgaagaagatacaaacaaagataaacctaattatcaatttggtggacacaacagtgttgattttgaagaagatacacttccaaaagtaagtggtcaaaatgaaggtcaacaaacgattgaagaagatacaacgccgccaacaccgccaacaccagaggtaccaagtgagccggaaacaccaacaccaccaacaccagaagtaccgagtgagccaggcgaaccaacgccaccaaaaccggaagtaccaagtgagccggaaacaccagtaccaccaacaccagaggtaccatctgaacctggtaaaccagtaccacctgctaaagaagaacctaaaaaaccttctaaaccagtggaacaaggtaaggtagtaacacctgttattgaaatcaatgaaaaggttaaagcagtggcaccaactaaacaaaaacaatctaagaaatctgaactacctgaaacaggtggagaagaatcaacaaacaaaggtatgttgttcggcggattattcagcattctaggtttagcattattacgcagaaataaaaagaataacaaagcataa

SEQ ID NO: 416903 - DNA, 474 bp, Staphylococcus aureus
atgagattgatatttagtatgattaaaaacattatagcagtaatagcaattgtgataattgtttatatcgccttgaaatacgcaccttttttaaaagaacaagattggaatcctgtaaatcacgataatgatcaaatgaatcaagttacgcaacccactaatgatgcccaacatgtttatgtaagtggtgagaaatattcattaaaagaaaatgatttaataaagaatgtaccattaagccaaattaaaaatgtatttaaaatgatagataaacaagagtttatggctgtgtctggaatgaatcgcatggcttataatgatcaatatattataggtcaaagaggagacgaatttattctttataaatttggagatgagtcaatgcgtgtttacaatactgaatttgaaatgcaacaagacttaaatgaattagggcaaaatttacaactaaaacccgaaaatgcttatcaatag

SEQ ID NO: 416904 - DNA, 147 bp, Staphylococcus aureus; identical to SEQ ID NO: 407426

SEQ ID NO: 416905 - DNA, 369 bp, Staphylococcus aureus
atgatccaacaagaaacacgcttgaaagtagcagacaactctggtgctcgtgaagttcttacaatcaaagtattaggtggatctggtcgtaaaacagcaaacatcggcgatgttatcgtatgtactgttaaaaatgcaacaccaggtagcgttgttaaaaaaggtgacgttgtcaaagctgtaatcgtacgtactaagtcaggtgttcgtcgtaatgacggttcatacatcaaatttgatgaaaatgcatgtgttatcatccgtgatgacaaaggcccacgtggtactcgtatcttcggacctgttgctcgtgaattacgtgaaggtaacttcatgaaaatcgtatcattagcaccagaagtaatttaa

SEQ ID NO: 416906 - DNA, 354 bp, Staphylococcus aureus; identical to SEQ ID NO: 414837

SEQ ID NO: 416907 - DNA, 378 bp, Staphylococcus aureus; identical to SEQ ID NO: 412164

SEQ ID NO: 416908 - DNA, 204 bp, Staphylococcus aureus
gtgtttaagttgattaaaggtgtgatgaaagaagaaacatatcattcgttgattaaccatattgataatcacttagaaagctcaaaaatgcgagaaacaatgattgtagatgataacgatgaacaattctttaagaaaaaatatcaaaggcatgaaccagaaattatttttgaagatgaacgagatgatggctacactttataa

SEQ ID NO: 416909 - DNA, 1257 bp, Staphylococcus aureus; identical to SEQ ID NO: 409235

SEQ ID NO: 416910 - DNA, 630 bp, Staphylococcus aureus
atgtattttttatctacacgcgataatgtggatgaactaagaaaaattgaaaataaaagtagttttgtgtcagctgataacgtgccagagtatgttaaaggtgcctttatttcaatggaagatgaacgattctacaatcatcatggattcgatttgaaaggtacaactagagctttattttcaacgattagcgacagagatgtgcaaggtggtagtaccattacacaacaagttgtcaaaaattatttttatgataatgatcgttcatttactagaaaagtaaaagaattatttgtagctcatcgagttgaaaaacaatataataagaacgaaattttaagcttttatttaaataatatttactttggggataatcaatatacgcttgagggcgcagcaaaccattactttggaacaaccgtgaataaaaatagtacaacaatgtctcacataacagttttacaaagcgctattttagctagtaaagtcaatgcacctagcgtatataatatcaataatatgtcagagaattttacgcaacgtgtaagcacgaacttagaaaaaatgaagcaacaaaattatatcaatgaaacacaatatcaacaggctatgtcacaattaaatcgttaa

SEQ ID NO: 416911 - DNA, 132 bp, Staphylococcus aureus
atgaaaagaagcgataggtactcaaactcaaatgaacattttgagcatatgaaacacgaacctcactataatacgtattatcaaccagttggcaaaccgccgaaaaagaaaaaagtaaacgaatactattaa

SEQ ID NO: 416912 - DNA, 708 bp, Staphylococcus aureus
atgaaacatggcattcagtcacaaaaggttgttgctgaagttattaaacaaaagccaacagttcgttggttgtttctcacattaacagttaaaaatgtttatgatggcgaagaattaaataagagtttgtcagatatggctcaaggatttcgccgaatgatgcaatataaaaaaattaataaaaatcttgttggttttatgcgtgcaacggaagtgacaataaataataaagataattcttataatcagcacatgcatgtattggtatgtgtggaaccaacttattttaagaatacagaaaactacgtgaatcaaaaacaatggattcaattttggaaaaaggcaatgaaattagactatgatccaaatgtaaaagttcaaatgattcgaccgaaaaataaatataaatcggatatacaatcggcaattgacgaaactgcaaaatatcctgtaaaggatacggattttatgaccgatgatgaagaaaagaatttgaaacgtttgtctgatttggaggaaggtttacaccgtaaaaggttaatctcctatggtggtttgttaaaagaaatacataaaaaattaaaccttgatgacacagaagaaggcgatttgattcatacagatgatgacgaaaaagccgatgaagatggattttctattattgcaatgtggaattgggaacggaaaaattattttattaaagagtag

SEQ ID NO: 416913 - DNA, 297 bp, Staphylococcus aureus
gtgccagcaggttatacacccgataaaaataatgtaccgtataaaaaagaaactggttattacacagtagctaatgttaaaggtaataatgtaagagacggttattcaactaattcaagaattacaggggtattacccaacaacacaacaattacgtatgacggtgcatattgtattaatggttatagatggattacttatattgctaatagtggacaacgtcgctatattgcgaccggagaggtagacaaggcaggtaatagaataagtagttttggtaagtttagcacgatttag

SEQ ID NO: 416914 - DNA, 249 bp, Staphylococcus aureus
atgaataaccgcgaacaaatcgaacaatcagttatcagcgctagtgcatataacggtaatgacacagagggattgctaaaagagattgaggacgtgtataagaaagcgcaagcgtttgatgaaatacttgagggtttacctaatgctatgcaagatgcactcaaagaagatatttatcttgatgaagcagtagggattatgacgagtcaagtggtctataaatatgaggaggcgcaggaaaatgactaa

SEQ ID NO: 416915 - DNA, 222 bp, Staphylococcus aureus
atgaagcagactgtaacttatatcattcgtcatagggatatgccaatttatataactaacaaaccaactgataacaattcagatattagttactccacaaataaaaatagagctagggagtttaacggtatggaagaagcgagtatcaatatggattatcacaaagcaatcaagaaaacagtgacagaaacaattgagtacgaggaggtagaacatgactga

SEQ ID NO: 416916 - DNA, 345 bp, Staphylococcus aureus; identical to SEQ ID NO: 407362

SEQ ID NO: 416917 - DNA, 183 bp, Staphylococcus aureus
atgatggggtatataaaaagaatggctttatacatgagtgtatttcttttaatcatttttattgttggatgtcgaaatatgaaagatgaacagaaaaaagaagaacaaacaaataaaacagattcaaaagaagaacaaatcaaaaagaagaacaaatcaaaaagagttttgagaaaacattag

SEQ ID NO: 416918 - DNA, 378 bp, Staphylococcus aureus; identical to SEQ ID NO: 410975

SEQ ID NO: 416919 - DNA, 348 bp, Staphylococcus aureus; identical to SEQ ID NO: 407407

SEQ ID NO: 416920 - DNA, 333 bp, Staphylococcus aureus
atgttagatatgattggcggaaaaaaacttaaaatcgttaactatatcctagataatgtccacttaagtaacaatacaatgatagctacaacaagagaaatagcaaaagctacaggaacaagtctacaaacagtaataacaacacttaaaatcttagaagaaggaaatattataaaaagaaaaactggagtattaatgttaaaccctgaactactaatgagaggcgacgaccaaaaacaaaaatacctcttactcgaatttgggaactttgagcaagaggcaaatgaaaaacaagaaaatgcattatctgattattattctttcaaggactag

SEQ ID NO: 416921 - DNA, 348 bp, Staphylococcus aureus
gtgcaattaataagtatgttagatatgattggcggaaaaaaacttaaaatcgttaactatatcctagataatgtccacttaagtaacaatacaatgatagctacaacaagagaaatagcaaaagctacaggaacaagtctacaaacagtaataacaacacttaaaatcttagaagaaggaaatattataaaaagaaaaactggagtattaatgttaaaccctgaactactaatgagaggcgacgaccaaaaacaaaaatacctcttactcgaatttgggaactttgagcaagaggcaaatgaaaaacaagaaaatgcattatctgattattattctttcaaggactag

SEQ ID NO: 416922 - DNA, 201 bp, Staphylococcus aureus
atgaaaacatatgatttaattgtaataggatttgggaaagctggtaaaactttagccaaatatgctgcatcaacaggtcaacacgtcgcagttatcgaacaatctccgaaaatgtatggaggcacttgtataaacacgaagtgtacaaactcccatacaaaaataaccacgtcaattaagacgtggtttctatttgtttaa

SEQ ID NO: 416923 - DNA, 186 bp, Staphylococcus aureus
atgcaacaacaagcatatataaacgcaacgattgatataaggatacctacagaagttgaatgtaggaattatacaagtgtagataacgaaaaagaagcgctagcagattacttatataacaatccggatgaattactagagtatgacaatttaaaaattagaaatgtaaatgtagaggtggaataa

SEQ ID NO: 416924 - DNA, 411 bp, Staphylococcus aureus
atggaaaataatttcaaacgtttattaacaatgtctgaaaaacaggaattacatttagataaaactcaccttttcttttgggaatctgatttatttttgattgctaaatctgctttaaacatcgcgtatacgcttactgaaaatacatttaatcatgcccatttagaatgtctaaattatctaaataaggctttagtaacagaattgaaaatgattaaagtaaagactgactactacgcatacgaaaccttcacatacaaactttctaattttgtgaatatcttttcacaggattggggtcaaagttttgatcaaaagaaggtcgaattctttcaagctcttcttgatgcttttcgtcaattaccagttgtagatttcggcgatgcaacattatcaacttttttaacttaa

SEQ ID NO: 416925 - DNA, 330 bp, Staphylococcus aureus
ttggatataaatacatttaaaaaagaagcaaatgtgatgaactttttattgagtatgcacagcaaaattattaatgaagaaaatgaatcaactatcagcagtgaaattgagaaaaaaatattggaaataccactggctgatagttggacagactatttactgttaagtaacgaagaagtaaaccttaagttaaaaaagttgataatgttgcatcgccgaaatctacaactggtaattgacgaaaagcatcaagaagagcttgaaagaattcgaccttcttttgatcaaaactttgaccccaatcctgtgaaaagatattcacaaaattag

SEQ ID NO: 416926 - DNA, 1377 bp, Staphylococcus aureus
atgaaagtagcaatttatactagagtaagtacacttgaacaaaaagaaaaaggacactctattgaagaacaagaaagaaaattaagagcatacagcgacataaacgactggactatacaaggtgtttatgtagatgctggctattctggtgctaaaactgaccgacctgaacttaatagattaaaggaaaatttatcaaaaatagatttagtattagtctataagttagacaggttgacgcgtaatgtaaaagatttacttgatttattagaaatatttgagcgagaaaacgtatctttcagaagtgccacagaagtttatgatacatcgacggcaatgggtcgcctattcgtcactttagtaggtgctatggctgagtgggaacgtgaaacgataagggaaagggcaatgatgggcaagcaagcagcgattagaaaaggcatgatattaacacctcccccattctactatgatcgtgtagataataaatatattcctaataaatataaagatgtagttgtgtgggcttatgaagaggttaaaaaaggaaatagcgctaaaggtatagcaaggaagttaaacgcatctgatataccaccaccaaacggcatacagtgggaagataggacaataacaagagctttaaggagccctttatcaaaagggcactatttttggggggatatatttattgaaaactctcacgaaccaataattacagatgaaatgtataacgaaataaaggaacgcttgaatgaacgtgttaatgcgaaaacaataactcatacttcagtttttagaggtaaactcatctgccctaattgcaatggaagattatgtttgaataccagttatagaaaacttaaacgtggagatgttatacacaaaaattattattgtaataattgcaaagttaataaaaatggtgctttttcatttaccgaaaaagaagctttaaaagtattttacgattacctttctaagttagatttaagtaaatacaaaacaaaagaaaaagaagataaaaaaattgtaaccattgatataaataaagttatggaacaaagaaaaagatatcacaaattatacgcaaacggcatgatgcaagaagaagaattatttgaattaataaaagaaactgacgaaaagatttcagaatacgaaaaacaaaaagagagagttcctaaaaaacgattagatgtcagtaagataaaaaaattcaaaaatattcttttagactcatggaatgcctttactttagaagataaagcagacttcattaagatggccataaaatctattgaaatagagtacattcacgttaaaagagggaaaactaagcattctatcaaaataaagaatattgatttttattaa

SEQ ID NO: 416927 - DNA, 2607 bp, Staphylococcus aureus
gtgttaaaaaagtggctaaattcaaacgtcaaacaattctttgttataactttcattagtgtaatattaacgcttattttattttctactcatatctatgattatattgtgaatggtactgtttttagtggggctggagatggattccgtcaaatgatgccatttcaaatgtatttgtatgaacatttaagtagtttttctagtttatatgatgcatcgtttggattaggtggcgattatatgaaaggactatcatattattattcgctgtcacctttaatgtggctaaattttctattcattaaaataggagaaacggttggtatatttaatccgacaacaatacatttttggccgacaaaccaacttattatggccatgataagagctatcataacatttgtcgtgaccttctacttatttaaaatattacactttaaacgctcaacaaatatgatcgctacgattttatacggcatgtcaactgtcgttatatactttaattttacttggtcattttatggaagtttattatatttattaccattatcgattcttggtttggaaagatattttcaacaacgcaaaatcggtattttcattgttgcgatagccttaacactatttagcaatttttatttcagttattatcaagctattattataggttgctactatttatatcgactcattttcacttacaaatatgacattgtctctagaacacaaaaattaatttgcgtcatatctgctacagttttgagtgtgttatcaagtgtatttggtttattcactggcatttctgcgtttttggaaaatgacagaaagcaaaatcccaatgttgatataccgtttttgacaccacttgattaccattattttttctttagcgatggattttatattacgatttcaattcttactatcgttgcattattgtcattcaaactgtatcgtttttacttttatagacttttcgcaatagtaacatggttattatttattggttcattatcacagtatttcgacagtgcttttaatggtttttcatttccagaaaggcgttgggtgtatatcttagcactatcatcaagcgctctttgcggattgtttattcaacatttatcaacattaaatatgaaatattatttaatcagaacaataccagtaagcatcatcgcattactttatgtattactatcaccgacacacccacttgcacttatagtaggtattatcctgctaatggtgcttgccgttattttaaaatttagtttatggcgttataaaaaattaaccgttgcaatattagtattaatcgttatgattcaacaaatcgtcattttagataacaataaaaatatggcaatcaaaccttatcaacaatcattatcaacgttgaaacaacatgattaccatagtaactatgtaaaccagcttataaaaaagataaatcaaaatgcaactggtccatttaatcgcattgattatatgtcagactatgcattaaattcaccatttatatatcattataatggcatttcattatattctagtatttttaatggagacatattaaaatattatgacaagacactccaaattaatatgccaatcgataaaaacagcacttatagattacttggcaatcgtcaaaatttactatcgctttggaatgtgaatgatcgaattagagtaaatcatgatgacaacttaccatatggatttaaaattaagtctgaacacaaagacaataaagttcgttggattcattctaaaaataccatccattatccaagtgcacatattacaaataaggtcttttccaataaagaattaaaatctccattagataaagaacaagcaatgttgcaagggattgtttctaacaatattaaagatgttaatacacattttaaagccaataaaaatttactatcagattcaacaattaaattaaatagtgcagcctggcaatctcctacaaaacatttattacaagttaaacaaaataatggtggtctaactgtacagttgccaaaatcagtttctaatcaatttaaagatttgtattttgaaatggatttagaattactttcgccggataaagctcatgatgttaaagtgaatgaatatacacaagaaagaaataaactcacttataaatatcgacgcgttgtaacacccgtaacgatacgcattaaagcttcagatagaattagattatcattgcctaaaggtaagtatcgagtaaatttaaaagggatatacggcgaagattataccacgcttaaagacgcttcaaattcattagaagctgtcaaagttagtaagacaaagcatggttatactattactaaaaataaaaattcatctgggtatattgttttgccaacagcatataatcaaggtatgaaagcgacatcaggtgatcaaagtcttaaagttgaacaagtaaatggtgttatgaccggcattaaagcacctaaaaatataacaaagattcaattgagctataccccaccatactattatttgcttataacaattactatatttggcattatatgtagtattattttcacgagatgggcaagacaaaaataa

SEQ ID NO: 416928 - DNA, 546 bp, Staphylococcus aureus
ttgccaattataaaaggtaagaaagttattctattcgcaccgacatttagaggtaatggtcacggtacggcacattatccattttttaaaattgattttgaacgtttagcaagatactgcgagaagcataatgcagttgtgttattcaaaatgcatccgttcgtaaaaaatagacttaatatttcacgtgaacatagacaatactttatcgatgtgtcagatcatcgtgaagttaacgatattctctttgttacagacttgttgattagtgattattcatctttaatatatgaatatgcagtatttaaaaagccgatgattttctatgcatttgacttagaagattacattacgacgcgtgatttctatgaaccatatgaatcatttgttccaggtaaaattgtacaatcctttgatgcattaatggatgctttggacaatgaagattatgaggttgaaaaagttgtaccattcttagataaacattttaaatatcaagatggtcgctcaagtgaacgtttagtcaaagatttgtttagacgctaa

SEQ ID NO: 416929 - DNA, 504 bp, Staphylococcus aureus; identical to SEQ ID NO: 414210

SEQ ID NO: 416930 - DNA, 522 bp, Staphylococcus aureus
atgcaaacaatcaaagaaatcgataagtataaaaacaatatccatgaatatggtaatgatataaataaattagagtcaaatgttaatgatgccaagaatgaactagcgagtaaaaataaagagtatcaagatttagtgattaatggaaaagtagaacaagcagataaattatatagtgagattgaaaaattagaagctgattatcgtgtaaaaaataaaaggttaactgtaatgaaacgctcacttaagcaagttgtaataaaaaattgtgaaagtatgactcaagtggctgatcgtttaagagatgaatatattgatgtgtatcaagctgatttaaataactatgagcaacttaaacaagaattacaagaagctgagaataaattgaaagcttataataatgagtactatataaagcagaaagagttatcacgctatattgatggaaagagacgagaaaatgatattcaaaatattgaatttattggcgcagttaatattattgaaccatttaatgtttaa

SEQ ID NO: 416931 - DNA, 231 bp, Staphylococcus aureus
atggaaacaaatcagtacgaagaattaagtgaagtattagaactgactgaaaaccaaaagttgagattatatatatatcaagagagacaaaataaaaacataaaacaagataataaagacgcaacacaaagtacagaagaaaaacgtgaaaaacgtcaaaaaatcttagacattgaagatgatgtaactagacaaaatgcaattgcgaaaaatatagagttatttaactag

SEQ ID NO: 416932 - DNA, 342 bp, Staphylococcus aureus
atgcaaagtatcgcagaaaaagagacgtatcatttacccaccgaacacctgcaagttttcaatgtgataaaaaatacgtccaataagtatattactaaaactaaaatcttaaatcaattgggatatgaatataattcaagtaatgaacgatggttacgaagagtaatcaattcattagtatatgattatggctatcctatcggatgcagttataaacctagtgaacgtggttattacatcattacgacagaacaagaaaagcaacaagcgatgagaagtattaagaaattagctgatggcagtatgaaacgctatgaggctttgaaacgaattgaagtgtaa

SEQ ID NO: 416933 - DNA, 213 bp, Staphylococcus aureus
atgaagaatgattttagagttattcttgctattaaaaaaatttcaatagctgacgtatttgaagatactgggatagcaaaaacaacgttatacggtttgtaccatgaaaaaactaagaaccctgatacgtctactattatgaggctttgtaagtatcttgaaattacacctaatgaattttttggaattgataataatgaaaaggaggcataa

SEQ ID NO: 416934 - DNA, 633 bp, Staphylococcus aureus
atgattcaaagtagattatctgtattaatggccgaaagaggtttgaaaatttcagacttatatgaagaaactggtatttcaaaaactacattgatggcagtagcagaaaatactggtaaaggcgttcagtttgatactgtcgataaattgtgtaattttttaggcgttacgccatgcgaatttttcgattattccccatatatagttgaaaccaaaaaaagtaattttagcgaaggaaacttagaaggttttgaaattagaattaaaaaacaaaattacgaaaaatattttaacttagatatatatgtttttagtggagattcgtatgatatacctctaaaaaaaggagaatttgattattatatatctttagtgttgcaagattcagatcattattctgaacatgaattttatcattttcttactaacatgagcatttcattcagaattgacttcatcaataaactaattgaaaaagttaaatcaaaattaaaagatttggttttaaacaaacaaccttctgaacttataggaggttatgaaactattcaatttcaatcaaatgattatgtcgctttgaaattatttgaagatagcgagtttgaaaccttaaaaaaattccatattaagtag

SEQ ID NO: 416935 - DNA, 324 bp, Staphylococcus aureus
gtgtataagagacaggaattaaaaggatggtctcaagaggaattagccaatatattaaaggtttccagacaaagtgtttctaaatgggaaagtgccaaaaactatccttccttagatattttgattgctatgagcgatttattcggaatctctttagagcatttaattaaaggagatgcacgttttaaaaaagttattttagagggaaattatagagagagtaacagggtaccttccatagttgattttctttatgatttttggtggcttttctttcctgttgccggatttttagtttgggccattcattcgttcatgggttga

SEQ ID NO: 416936 - DNA, 462 bp, Staphylococcus aureus
atgcacaatatgtctgacatcatagaacaatacatcaaacgtttatttgaagagtcgaatgaggatgtcgttgaaattcagagagcgaatatcgcacagcgttttgattgcgtaccatcacagttaaactatgtaatcaaaacacgattcactaatgaacatggttatgaaatcgaaagtaaacgtggtggtggtggttacatccgaatcactaaaattgaaaataaagatgcaacaggttatattaatcatttgcttcagctgattggaccttctatttctcaacaacaagcttattatattattgatgggcttttagataaaatgttaataaatgaacgtgaagctaaaatgattcaagcagttattgatagagaaacgctatcaatggatatggtttctagagatattattagagcaaatattttaaaacgtttgttaccagttataaattattactaa

SEQ ID NO: 416937 - DNA, 183 bp, Staphylococcus aureus; identical to SEQ ID NO: 408524

SEQ ID NO: 416938 - DNA, 675 bp, Staphylococcus aureus; identical to SEQ ID NO: 408534

SEQ ID NO: 416939 - DNA, 195 bp, Staphylococcus aureus
gtgatattttctgatactaataaacaatttaaaggagatttaggttataaagaggataaaataggtgaattatttagagaaaaagatgctaaagacagattaaatgtcgatgaaataattgaaaaagaacacttggacaaaagtaaatatgaagccgagccaccgttgttcttcttttcgggatctttggattag

SEQ ID NO: 416940 - DNA, 429 bp, Staphylococcus aureus
atgatgaaaatcaaagttaaaaaagaaatgagattagatgaattaattaaatgggctagaagtaatccggagttatcaaagggcaaaaatttttttacaacaggtaacggcgatggcatcgttcgttttcaaaaggacacaaatgagtgtacgacatcagtctgtgtgccacttgatgctcctttcgaagtcgaagtggaagaggaaatcacagaagaaacggtaataccgtcagtagttgtagttagaacgcaatacttccctaatggtagtcagtcaataaacgtaactaaaattaacaataagtcgataaaggaactcgttggttcaaacccgattaattcgagctttaaataccatgagatttacttgatgaatggcaaaggattgggggacttaatttggaaagatgtggagttggtagaatga

SEQ ID NO: 416941 - DNA, 267 bp, Staphylococcus aureus
gtgattcgaaaagctagaaagaaaccggtagaaattgagtttgtaaaatatacaggtgacaaccaacgagaaatatatgaatggacaaatggaagggcatataatgttccggattatgacgatgacgatattacttactttggtgtagctacactagaaggcttcctaatagctgaagttggtagttatattgttaaaggtgtagaaggtgagttttacccagttgaacctaatatatttaagaagacatatgaggtaatagattga

SEQ ID NO: 416942 - DNA, 555 bp, Staphylococcus aureus
atgaggtttaagtgggaacagaaacacattgattatgtgaaatctatttataaggggcgttacttaaaagatgttagagatatgtttaataacaaatttggtacgaatataagcaagaatgctatcaatgctaagatgaaccgtttaggtgtaaaaagtggtgtgtcaccatacggatctaggcaagcacatggacatcttcacaagcctataggttctaaaaaattagatcaacacggatacgttttaataaaagtagacaacaaaactaataatcaaagaaataactggaaattatatcatcactatgtttgggaaaaacattatggcgaaataccaccaaaacacgcagtaatctttttgaacggaaataaaaaagattttagaattgaaaatttagcgatgatcacttattcgacattacagatgatgattaataacaatttgttttatgaaaatgcagaattaaccaaaacgggaattaacattgctaaattattaaaaaaacaaactagaagatcggttaaaaaaatgaaaattaaggagaaagaataa

SEQ ID NO: 416943 - DNA, 240 bp, Staphylococcus aureus
atgactaaaaacactttagttgatttaaataatcatttatttgcacaactcgagaggcttaatgacgaagaaataaaaggtgatgaactccaagaagaattgcaaagagctaaagtcatctctgatgtagcgagaagtattgttaaaaacggtaatttgattttacaggcacacaaatttaaagatgaaagtttagacttgaacaatcaattacctgaaatgttggagaataaaaaatga

SEQ ID NO: 416944 - DNA, 222 bp, Staphylococcus aureus
atggaaaaagaaaattttttaagtattgatataattcgagatgatgtaaattattggttaatacgtacaaatggcggagattggtatcaagatttcaaacagaataatcatgtttctattacaaatagtattgtgagtctatgtgatttaaaagaagtcaatgatattgaaaaatacaagaaaatagtaacttcaaaaaaccaaaaaaacaaaaagatttag

SEQ ID NO: 416945 - DNA, 156 bp, Staphylococcus aureus
atgagtgcagttaaagaccatcacaataaagcgaaagcattaccggaaacaggtagtgaaaataacggttcaaataatgcaacgttatttggcggattattcgcagcattaggatcattattgttattcggtcgtcgtaaaaaacaaaataaataa

SEQ ID NO: 416946 - DNA, 156 bp, Staphylococcus aureus
atgagtactactaaagaccatcacaataaagcaaaagcattaccagaaacaggtagtgaaaataacggctcaaataacgcaacattatttggcggattattcgcagcattaggatcattattgttattcggtcgtcgtaaaaaacaaaataaataa

SEQ ID NO: 416947 - DNA, 1062 bp, Staphylococcus aureus
atgagaagatggcaaggattagtagaagagtttaaagcacatttaccagtaaatgaaaatacaccaaaattaacattgaacgagggaaatacaccactcattcattgtgaaaatatgtctaaaatactaggtatagatttatatgtgaagtatgaaggtgccaatccgacaggttcatttaaagatcgcggtatggtaatggctgtgacaaaagcaaaagagcaaggtaagaaaattgtaatatgcgcttcgactggaaatacatcagcgtctgcagcagcatatgcagctagagcaggtttaaaagctatcgtcgtaataccagaaggtaaaattgcgttaggtaaactgtcgcaagcagtaatgtatggtgcagaaatcgtttctattgaaggaaactttgatgaagctttagaaattgtaaaagaaattgcaaaaagtggcgaaatcgagcttgtaaactctgtcaatccatttagaatcgaagggcaaaagacaggctcatttgaaattgtgcaacaattagacggtgaagcacctgatattttagcgattcctgtaggtaatgcaggtaatattactgcatattggaaaggctttaaagaatatcatgaagctaaaggatcacaattgccgaaaatgtttggcttccaagctgaaggcgcatcaccaattgttcaaaataaagtcataaaaaatcctgaaacgattgcaactgctattcgaattggtaatcctgctagttgggaaaaggcgactaatgctcttaaagaatcaaatggattaatagatagtgttactgatgatgaaattctagaagcatatcagttaatgacaactaaagaaggtgtctttagtgaaccagcaagtaatgcttctattgcaggtttaattaaattgcatagacaaggtaaattacctcaaggtaaaaaagtagttgcgattttaactggtaatggactaaaagatcctgatactgctatttcactactagataatccgataaagccattgccaaatgataaagatagcattatcgattatattaaaggagctttataa

SEQ ID NO: 416948 - DNA, 669 bp, Staphylococcus aureus
atgttatccgaaaacttgccttataacgaagaaatgttagcaaatgagtttagtcgacctatcaactcaataaggttagcaatacaaacttttgagacattgggcatgattgaaaaagttaatggtgtcataaaagtgacaaattgggaaaagcaccaaaacattgaaggactcgagaaaatcagggcgcagaacaggttgaggaaacaaaagcaacgagaaaacaacagaaaattgctaaatggtcacgtgacgtcacgtgacagtcacgcaacagaagaagataaagaattagataaagaattagaaagagataaagaaaaagatatagataagaacttaagttcaaataatagcgcaactgacgttacgcatgagcaatttgaggaatggtggaaactttacgacaagaagaaagataagaagatgtcttttactaaattcaaatcatgcttaaagaaacattcttttgaacaaattatgcaaggtactcgagaatatttaaaaactattacagacaagcaatatcaaaagtaccctaaaacgttcttaactaacgaaagctatatgaatgattatatcgaagagattaaagaagaagtaaacaatcaatatgtagatgcgtttcagcgtgcatcacaatccagtatagaaaatttaccgttttaa

SEQ ID NO: 416949 - DNA, 255 bp, Staphylococcus aureus
atgcaacaagatggctttcatgaaccgtatcgtcagcatttaattgctgaatttgatgaagtgaaaacaattgctagtcaacataatgcctatgcaactgtaattagtggtgctggaccaactattttaatatttagtcgcaaagaaaatagtggcgaattagttcgcgctttaaatagaaatgtagttacatgtcattctgaattagtagatattaatgttagtggtgttaaagaacgaattgtataccaatag

SEQ ID NO: 416950 - DNA, 363 bp, Staphylococcus aureus
atgaagaaagtgtttaagaaacctagaattacaactaaacgtttaaatacgcgtgttcatttttataagtatactgaaaataatggtccagaagctggagaaaaagaagaaaaattattatatagctgttgggcgagtattgatggtgtctggttacgtgaattagaacaagctatctcaaacggaacgcaaaatgacattaaattgtatattcgtgatccgcaaggtgattatttacccagtgaagaacattatcttgaaattgaatcaagatatttcaaaaatcgtttgaatataaagcaagtatcaccagatttggataataaagactttattatgattcgtggaggatatagttcatga

SEQ ID NO: 416951 - DNA, 363 bp, Staphylococcus aureus; identical to SEQ ID NO: 416950

SEQ ID NO: 416952 - DNA, 1269 bp, Staphylococcus aureus
atggcgtattctattatcagagttgctaaagtgaaatcaaaaacgaatacaaaaggcattcaaaaacatgtacaaagacaaaataaaaattatgaaaatatggatattgatttagaaaaatcatacttaaattacgatttagtcaatgatagtccgattgattataatcaaaaaatcgaagagaaaattgaacaaaattataatgggaaacgcaaaattagaaaagacgcagtaaaacatattgatggtttaattacatctggtaatgaattttttaaaaatcaaacacttgaagaaacaaagcagttttttgaacatgctaaaacgtttttagaacaagagtatggaaaagataatttattatatgcaacagtgcatatggacgaaaaaacacctcatatgcattatggggtagttccgattacagaagatggtcgattgagtgcgaaagaggttttaggtaataaaaaggcactaactgaatttcaagatagatttaacgaacatatcaatagttgtggttatgacttgagtagaggtataacaaggggcgttacaccgagacgacatgagcagataagtcgttataaaaatttaacagattatcacaaagaagaatatgagcatgagagccgaaaattagaccgtataaagcaagaaagcgaagaagtaatggaacagtatcaaaatgctttagatgttctaaaaaagcctataaatgtcccatatgagcttgaaactgaaaaagttggtggactgttcaacaaagaaacacaggaaacaggtaacgtcgttattgataaaaatgaatttgatttattgcaggaacaagtaaaagcttctcaactcattactgatgattatgaatatattaaaagcggaaaagctttaaaagattttgaggaaaaaaacaaaagattagaagatagattattagacgaacagattaaaaatggaaaagtaatagatgaatacaatgatttagcggatagttataataatttattggaacaaaatcaagaaaaagaaaaagagttaaaccgttcgtataaactatttaacaatgtgtttaagttgattaaaggtgtgatgaaagaagaaacatatcattcgttgattaaccatattgataatcacttagaaagctcaaaaatgcgagaaacaatgattgtagatgataacgatgaacaattctttaagaaaaaatatcaaaggcatgaaccagaaattatttttgaagatgaacgagatgatggctacactttataa

SEQ ID NO: 416953 - DNA, 324 bp, Staphylococcus aureus; identical to SEQ ID NO: 410216

SEQ ID NO: 416954 - DNA, 393 bp, Staphylococcus aureus; identical to SEQ ID NO: 410215

SEQ ID NO: 416955 - DNA, 378 bp, Staphylococcus aureus; identical to SEQ ID NO: 412164

SEQ ID NO: 416956 - DNA, 378 bp, Staphylococcus aureus; identical to SEQ ID NO: 412164

SEQ ID NO: 416957 - DNA, 378 bp, Staphylococcus aureus; identical to SEQ ID NO: 412164

SEQ ID NO: 416958 - DNA, 378 bp, Staphylococcus aureus; identical to SEQ ID NO: 412164

SEQ ID NO: 416959 - DNA, 237 bp, Staphylococcus aureus
atgcctagtctcgtgggctcggagatgtgtataagagacaggtttaaagatgcacgcaaaaagctaaaaaatggcgagttggattatctcaaagaaagtgatccgacagaatatatttaccaaatcttttatgtgtggaatcaaaaagagtatctagcaagtgagatttacgacttaaccgaagaagaaaaacgagaagtaaacaaccaaatgattaacgaaattgaagaagagtaa

SEQ ID NO: 416960 - DNA, 858 bp, Staphylococcus aureus
gtgactattaaagttttaaatgaaccttcaccaaaactattaacaacatggtatgcagagcaagtcactcaagggaaaataaaaacaagcaaatatgttaaaaaagaatgtgagagacaccttagatatctagaaaatggaggtaaatgggtatttgatgaagaattagcgcaccgtcctattcgattcatagaaaagttttgtaaaccttccaaaggatctaaacgtcaacttgtattacaaccatggcaacattttattattggcagtttgtttggttgggttcataaagaaacaaaactgcgcaggtttaaagaagctttgatatttatggggcgaaaaaatggtaaaacaactactatatctggtgttgctaactatgctgtttctcaagatggagaaaacggcgctgaaatccatcttttagcaaacgtaatgaaacaagctagaatattattcgatgaatctaaggcgatgataaaagctagcccaaagcttgataaaaatttcagaacattaagagatgaaatccattatgacgcaacgatatcaaaaattatgccccaagcatcagatagcgataagttagatggattgaatacacacatggggatttttgatgaaattcatgaatttaaagactataaattgatttcagttataaaaaactcaagagctgcaaggttacaacctcttctcatctacattacgacagcagggtatcaattagatggtccacttgttgatatggtagaagcgggaagagacaccttagatcaaatcatagaagacgaaagaactttttattatttagcatctttggatgatgacgatgatattaatgattcgtcgaactag

SEQ ID NO: 416961 - DNA, 237 bp, Staphylococcus aureus; identical to SEQ ID NO: 412625

SEQ ID NO: 416962 - DNA, 459 bp, Staphylococcus aureus
gtgttaggttctatattcaattcatttccgtatacagcctattcgcaaaatgtaggacttgtttctttatccggcgctaagaaaaacaatgttatatacggcatggtcgtgttattgcttatatgtggttgtatacctaagcttggtgcattagcaaatatcataccgctacctgtgttaggtggtgcgatgatagctatgtttggcatggtaatggcatatggtgttagtatattaggacatatcgattttaaaaatcaaaacaatttattaattatcgctgtatcagtaggattaggtactggtataagcgctgtaccacaagcatttaaaggtttaggtgaacaatttgcatggttgactcaaaacggaattgttttaggcgcaatctctgcaattattcttaatttcttttttaatggaataaagtataaacaaacggaagaaaatgtgaaataa

SEQ ID NO: 416963 - DNA, 747 bp, Staphylococcus aureus
ttggctaacggagagaaagtagaaacggtagatgtaacatctgaaacaaactggaagtacgaatttaaaaacttaccgaagtatgatgaaggaaagaaaatagaatatacagtgaccgaagatcacgtaaaagactacacaacagacatcaacggtacgacaataacgaacaagtatacaccaggagagacatcggcaacagtaacaaaaaattgggatgacaataataaccaagacggaaaacgaccaactgaaattaaagttgagttatatcaagatggaaaagcaacaggaaaaacggcaacattaaatgaatctaataactggagccatacgtggacaggattagatgaaaaagcaaaaggtcaacaagtaaaatacacagtcgaggaattaacaaaggtcaaaggttatacaacacatgtggataacaatgatataggtaacttgattgtaacgaataaatatacgccagaaaaaccgaataaaccaatctatcctgaaaaaccaaaagacaaaacaccaccaactaaacctgatcattctaataaagttaaaccaactcccccagataagccatcaaaagtggataaggctgatcaatctaaagataataaaaccaaacctgaaaatcctctaaaagaattaccaaaaactggtatgaagattataacttcatggattacatgggtatttataggtatattgggattgtatttaattttaagaaaaagatttaactcataa

SEQ ID NO: 416964 - DNA, 432 bp, Staphylococcus aureus
atgtggcaaaatatacaaatgtttatcgttcaagcgctacctatttttatcacaatctgtcttattgttagtattttatcactaacgccaattttgaatgttttatcacaaatatttacacctatattatcgttattaggcatctcgtcagaattgtcaccagggattttattttcaatgattcgaaaagacggcatgctcttgtttaatttgcatcaaggcgccttattacaaggaatgacagcaacacagttactactacttgtgttttttagttcaacatttacagcgtgctcggtcacaatgacgatgcttttgaaacatttaggtggtcagtcagcactaaaattaattggaaagcaaatgttgacatcattgtctttagttattggtgtaggcatcattgttaaaatagtaatgctgattatttaa

SEQ ID NO: 416965 - DNA, 315 bp, Staphylococcus aureus
atgattaaaaaaagtttaatagttccactatatattaatattttcttagtatttacagctattagtttagttgttcctagcttgccattaatcattaaagatttaaatatagatggtgatgcttttgggatacttattgctgtattttctctttttcaaatgattttttcgcctatagttggcttttttctgatagatacgctaaaaagcactttttatctattggcttgttactttatatcgtttctgaatttttatttggaattggtatggggttctatacacttttgtcttcgaggatactcggtggtataa

SEQ ID NO: 416966 - DNA, 570 bp, Staphylococcus aureus
ttgaaagttattgagaaagttcattatgaagatattttagaatcaaaaatagttcgattatttcaggcatttataaaggacaaaatggatcaactttttattacttctgaacactttgctattgacatagacaagctattatttcaacttaatttaaatgttaaatatattaaaatggagggtaatacttcgggttatttaagtggaagaacaatctatattaataataatcactcgattaataatacaagatttgcaatagctcgtgaattgggccgttatttatttaaaaattcagacttaatgagagataacaacgataatagtctaaagaatttacatgaaatgatttatgaaagcgacgtaaatcagttttcagtcgacttacttatgcctaaaaagcaaatagaggcattagtctataatttttatgaagtcaataatatcaatttaagttctggtttatctgaaaaagaacgaaacaaactattgaaccttatatcaactaagttggaagtttcgaaagtagctgctggattaaggctgtataatttaggaatacatatttga

SEQ ID NO: 416967 - DNA, 477 bp, Staphylococcus aureus; identical to SEQ ID NO: 407374

SEQ ID NO: 416968 - DNA, 150 bp, Staphylococcus aureus
atgaagaaattcttttttattgggcttttagtgtttgttgtctttttacagcagcaaccattatttggttcagctatgataaaaacaaatatggtactaaacaatatgataaaacattcaaagacgatgcttttgacaatgtatctataa

SEQ ID NO: 416969 - DNA, 477 bp, Staphylococcus aureus; identical to SEQ ID NO: 407374

SEQ ID NO: 416970 - DNA, 378 bp, Staphylococcus aureus; identical to SEQ ID NO: 408254

SEQ ID NO: 416971 - DNA, 807 bp, Staphylococcus aureus
atgaaaaataaattgattatagggcgatatttaccaattaattcttttgttcatcatcttgatccaagagcaaagttaatgtttgtttttctttttattatattaatatttttctgtcattcaccattaacatatctttggatgtttgcacttatcttattctttatgagattagcaaaaattcaattatggttcctaatcaaaggtttaacgccaatatttttctttttaatcttcacattaatgatgcatatatttttaactaaaggtggatatgtattagttgaatggcatggcatcacgattgaaactaatggtattttagaagggctatatatatcactgcgtttaattgggattgtgatgattgcaacaataatgacactatctacaagtccaattgatttaacagatgcgtttgaaagattacttgcgccactaaagatgtttaaattaccagttcatcaattaagtatgataatgtccattgcgttacgattcatcccgacgttaatggatgagttagataaaatcattttggcgcaaaagtcgcgtggttctgaaataagttcagggaacattgcaacacgtattaaatcatttattccattactagtgccactattcatctcagctttccaacgcgccgaagaattagcggtcgcaatggaagttaggggttatgatgccaatgttaagagaacgagctacagacagcttaaatggcaattgagagatacgttatctttaatcatgattatcccaattgcaattattttattcgtattaaaatattcaggagtgtaa

SEQ ID NO: 416972 - DNA, 228 bp, Staphylococcus aureus
atgacagataaaacattacagcaaatagataagttaatatgttcatggttgaaacaaatagacaatgttattccacaattaattatgaagatgactacagaaaccaagcgtcatcgatttgatttagttacaaatgttgataaacagattcaacaacaatttcaacaatttttagcaacacattttccggaacaccaactattagcggaagaaaaagtaatgaaatga

SEQ ID NO: 416973 - DNA, 573 bp, Staphylococcus aureus
atgattacgaatgaaattaatcatttatggattatggatcccattgatggaactgccaatttagtaaaacagcaagaagattattgtattatattggcgtatttttatgaaggtaaaccaatgttatcgtacgtatatgattatccgcataaaaagctttataaagcaatacgaggagaaggtgctttttgtaatggaattaagatgaaagaaccaccatcgttaaaattggaagacgctattatatcgtttaatgcacaagtgatgaatctggatacggtgcaagatttatttgacgcctcatttagttatcgtttagttggtgcttgcggattagattctatgcgagtggcaaaaggtcaatttggggcacatattaatacaaatcctaaaccttgggacattgctgcacagtttttatttgcagaactattgaatctaaaaatgacaactttagatggtaaggcaattgatcatttaaagggtgcaccttttattataagtaataaagcatgtcatgaaacggtacttaaaattttaaatgcaaatggtggttatcaaaaatacagatag

SEQ ID NO: 416974 - DNA, 576 bp, Staphylococcus aureus
atggttcatgtcaaaccaagtatcaatgtcaatggttcagaaggtaatgcagatgttaagtacatttataaacaatatgatgttaatggctcagaagcatataaaactagattacaaaaagatattcacaaatatacgaatacgcctgatttaagtgatgagaatttcagtggagttcaatctggtgaatcaatgaaatataaattgtttggtttagagcaagtgagagctattaaagaacgtctgtttaaaaaaggtttaatgaaacgttataaactattattccatattcttaatttaactggtgtacataagtatgattattcaaccattgatattacttttactcctaatttacctaagtctttaaatgaatcaattgaagcttttaattcattaaatggtggagtatctgaacaaaccagattgaaattgctaccaattattgataatccatttgaagaaatcaagaaaatggaagatgaacagaataaggtaaaaaaaattagtgataattcatcatttaaggcaccatttagccacgaaaatgaaatgactgatataaatgtcagataa

SEQ ID NO: 416975 - DNA, 555 bp, Staphylococcus aureus
atgaataaaaaactattaacaaaaacattgatagcaagtgctttagttttaacaacagtaggttcaggttttcattcttcttcaaattataatggtattaataacgttgcaaaagctgagcaaacgacagataacgaattgtggaaaaatgtaagagacgctttaaaagaagcgaatattatcgataaaacagataatgaaaatgtcaaagtgacttataaattagcaaatggcggtgaaaacagtattgaaggtaccgccaatttaaatgaacttagcaattctaataacaaaccgatcaatagcgatagtgtaaaaggcattgatttgtcaaggaaaaatcccaatggagatagatttgacgcaaatgatgcatggaaaaaattaactgataaattaaaagaaaagcagattgtgaaagacggtgatacagtaactattcatagtaaagacgaaaaagaccctaaaatctcagctaaagtcggtgaagtctataatgataacaaacgattgatgttgtttaaaaaggatatagataaaatcactataaactag

SEQ ID NO: 416976 - DNA, 600 bp, Staphylococcus aureus
atgaactctttcgcactaagaaattgcacaaaattcgatatattccaaactaccaaattttacaaaggtcttacttcaacaaatctagttggcgaaataagccctactaaaaaaaccgttactcttaataaccatgaatacaaaatctttaaatgtgaacagtataaaaataaaaacaacgaaatcatagtggatggtacaccacattcagaatataaagaagtcactcattttgaaacgtattattgcaaagataaaaatttacttattttaaatactgcaattggtgatgcaaaaacattcttaaaatatttagaaaaaaatcaagaacaaaatattaatctaagtaagatagatttccaatttaaaactataacaaaacaacctggagttttaatggatcaaatttggttcaatacttcagataaacatgctaaaactaaatcatttaatggtgtcgaagttaacaaaaacagtgaagcacaacaagcaattaatgataaaaaagctacgtacattaaagtacaaatggatgtggcgtcaaataataaaactgtagcaagaactatcggtttttctaaaaaagtggtgtggttttag

SEQ ID NO: 416977 - DNA, 786 bp, Staphylococcus aureus
atgaagaaaaaaataagctatttttttatcgttttatttgcaatcgtatatatacttgtgttgtttgtaaaagatggctttgtttatgatttttttattagcactttttcaattttaggtgcattatctgtatatttttataatgattctataacgatatttaaatggtataatgaaattgtcaataaattcataaagaaaccacaagtaacttgggaatgcgattattctgtctcatgtacagaagatgattgttttaaaacagcaaaagaagaactgggtgattttctaaatgaagatcgatacagtaatactattaagattcttgataataccaataataagtttactttattaattgaaaatccagatataaaacaatattctgtagaaaaattaaatgttgaggaagaactttttgaattacatttttactataaatgtaatttgagatataaagaatcaaaaactgaatttaataattctataacattgtttaatgatttaactaaaaaaatagcaatattatcaaagaatgaagatgaatttttatctgatacgacacctctatatactgttaaaatatctatgagtaaaatgaatccattttttggtttgacgactaaaaggctaaacaaagaaagtacacgaaatactgaacttagttttgaacaagagggtactaaaataaaatcatcagataatataatgacaataacttctaatagtcaagaaaaaattaagaaggttactcgagaatatattgcattgtctgttgctaattaa

SEQ ID NO: 416978 - DNA, 792 bp, Staphylococcus aureus; identical to SEQ ID NO: 409354

SEQ ID NO: 416979 - DNA, 141 bp, Staphylococcus aureus; identical to SEQ ID NO: 409390

SEQ ID NO: 416980 - DNA, 2421 bp, Staphylococcus aureus; identical to SEQ ID NO: 409335

SEQ ID NO: 416981 - DNA, 1269 bp, Staphylococcus aureus; identical to SEQ ID NO: 416952

SEQ ID NO: 416982 - DNA, 921 bp, Staphylococcus aureus; identical to SEQ ID NO: 416035

SEQ ID NO: 416983 - DNA, 324 bp, Staphylococcus aureus; identical to SEQ ID NO: 410216

SEQ ID NO: 416984 - DNA, 324 bp, Staphylococcus aureus; identical to SEQ ID NO: 410216

SEQ ID NO: 416985 - DNA, 921 bp, Staphylococcus aureus; identical to SEQ ID NO: 416035

SEQ ID NO: 416986 - DNA, 324 bp, Staphylococcus aureus; identical to SEQ ID NO: 410216

SEQ ID NO: 416987 - DNA, 921 bp, Staphylococcus aureus; identical to SEQ ID NO: 416035

SEQ ID NO: 416988 - DNA, 921 bp, Staphylococcus aureus; identical to SEQ ID NO: 416035

SEQ ID NO: 416989 - DNA, 921 bp, Staphylococcus aureus; identical to SEQ ID NO: 416035

SEQ ID NO: 416990 - DNA, 324 bp, Staphylococcus aureus; identical to SEQ ID NO: 410216

SEQ ID NO: 416991 - DNA, 375 bp, Staphylococcus aureus
ttggaaaacactaataatctattcgaaagattagaaatattaacaaaaccagaaaatatagaaactacattttttattatccttaaattcattatttttatcatcattctaatgataggagcgttaatagttttaggaatattgaatagcagaagaaattacaaccctgaaaaaatttggaacaaaagaaaaattcgcgctcttaaatcagaaattggcggaggacaggaatactattttagatactggatctggcaaagaaataaaagaaaaaatattctaatcgctttaagagattactctccatatgaagaatattatccaagtcaaaaatggctaaaaaaagataaatctaaattaccattccgaagataa

SEQ ID NO: 416992 - DNA, 282 bp, Staphylococcus aureus
atgataggagcgttaatagttttaggaatattgaatagcagaagaaattacaaccctgaaaaaatttggaacaaaagaaaaattcgcactcttaaatctgaaattggcggaggacaggaatactattttagatactggatctggcaaagaaataaaagaaaaaatattctaatcgctttaagagattactctccatatgaagaatattatccaagtcaaaaatggctaaaaaaagataaatctaaattaccattccgaagagaaatatgggttataaaataa

SEQ ID NO: 416993 - DNA, 921 bp, Staphylococcus aureus; identical to SEQ ID NO: 416035

SEQ ID NO: 416994 - DNA, 921 bp, Staphylococcus aureus
atggataaggatactgagaagaaacaaagaaatcaagtatttcagaaatttattgaacgacatgtcaaagaaggacaaatggatttgataagggagtgtaatacattcttgagttttgtgtcagataagacgttagaaaaacagaaattgtataaatctaatttgtgtaaaaatcgattttgtcctgtatgtgcatggcgaaaagcgagaaaagatgcgttaggtttatcattgatgatgcaatatattaagcaaaaggaagataaacaattcatctttttaacacttacgacgccaaatgtaacagttgagcatttggaagatgaaataaaacattataatgagtcgtttagacgattaagtaatcgtaaacactttaaatctatagctaaaggttacgtaagaaaattagaaatcacttataacaaaaaacgcgatgattataatccacattttcatgtattaattgcggttaataaatcatattttacagataagcgatattatataagccaaaaagaatggcttgaactatggcgtgatgtgacaggtaatcaagctattacacaagttcatgttcaaaaggttaagcaaaacaataataaagaactttatgaaatggctaaatattccggtaaagatagcgattatctcgttaatcaaaaagtattcgacgcattttataaagcattaaaaggcaaacaggtacttgtctattctggattgtttaaagatgcacgcaaaaagctaaaaaatggcgagttggattatctcaaagaaagtgatccgacagaatatatttaccaaatcttttatgtgtggaatcaaaaagagtatctagcaagtgagatttacgacttaaccgaagaagaaaaacgagaagtaaacaaccaaatgattaacgaaattgaagaagagtaa

SEQ ID NO: 416995 - DNA, 921 bp, Staphylococcus aureus; identical to SEQ ID NO: 416035

SEQ ID NO: 416996 - DNA, 945 bp, Staphylococcus aureus
gtgggctcggagatgtgtataagagacagtaagtatactgagaagaaacaaagaaatcaagtatttcagaaatttattgaacgacatgtcaaagaaggacaaatggatttgataagggagtgtaataccttcttgagttttgtgtcagataagacgttagaaaaacagaaattgtataaatctaatttgtgtaaaaatcgattttgtcctgtatgtgcatggcgaaaagcgagaaaagatgcgttaggtttatcattgatgatgcaatatattaagcaaaaggaagataaacaattcatctttttaacacttacgacgccaaatgtaacagttgagcatttggaagatgaaataaaacattataatgagtcgtttagacgattaagtaatcgtaaacactttaaatctatagctaaaggttacgtaagaaaattagaaatcacttataacaaaaaacgcgatgattataatccacattttcatgtattaattgcggttaataaatcatattttacagataagcgatattatataagccaaaaagaatggcttgaactatggcgtgatgtgacaggtaatcaagctattacacaagttcatgttcaaaaggttaagcaaaacaataataaagaactttatgaaatggctaaatattccggtaaagatagcgattatctcgttaatcaaaaagtattcgacgcattttataaagcattaaaaggcaaacaggtacttgtctattctggattgtttaaagatgcacgcaaaaagctaaaaaatggcgagttggattatctcaaagaaagtgatccgacagaatatatttaccaaatcttttatgtgtggaatcaaaaagagtatctagcaagtgagatttacgacttaaccgaagaagaaaaacgagaagtaaacaaccaaatgattaacgaaattgaagaagagtaa

SEQ ID NO: 416997 - DNA, 813 bp, Staphylococcus aureus; identical to SEQ ID NO: 410214

SEQ ID NO: 416998 - DNA, 804 bp, Staphylococcus aureus
gtgtcagataagacgttagaaaaacagaaattgtataaatctaatttgtgtaaaaatcgattttgtcctgtatgtgcatggcgaaaagcgagaaaagatgcgttaggtttatcattgatgatgcaatatattaagcaaaaggaagataaacaattcatctttttaacacttacgacgccaaatgtaacagttgagcatttggaagatgaaataaaacattataatgagtcgtttagacgattaagtaatcgtaaacactttaaatctatagctaaaggttacgtaagaaaattagaaatcacttataacaaaaaacgcgatgattataatccacattttcatgtattaattgcggttaataaatcatattttacagataagcgatattatataagccaaaaagaatggcttgaactatggcgtgatgtgacaggtaatcaagctattacacaagttcatgttcaaaaggttaagcaaaacaataataaagaactttatgaaatggctaaatattccggtaaagatagcgattatctcgttaatcaaaaagtattcgacgcattttataaagcattaaaaggcaaacaggtacttgtctattctggattgtttaaagatgcacgcaaaaagctaaaaaatggcgagttggattatctcaaagaaagtgatccgacagaatatatttaccaaatcttttatgtgtggaatcaaaaagagtatctagcaagtgagatttacgacttaaccgaagaagaaaaacgagaagtaaacaaccaaatgattaacgaaattgaagaagagtaa

SEQ ID NO: 416999 - DNA, 537 bp, Staphylococcus aureus
atgattcaaaggaatttgtttgctttacaaatgaatccagttattttctttattataaacttcattctcatatcctatttatatgataaacagtatgttcagtttcaagctattactggaatgagtctattttattgtttagtgatttttccaatgactattgttgtatacctaagggtgtctcaaaaaaattacttgcgtagtaataaaatagaaatgattatgggtacaattatcgctatcatatccttgttattaattatattacaagcatttaatattacttggggcgttataccaattacaaattttggacatcaatttttctttttcattggtattattttagtaattgccggcatattttataagcgacttgagttttcgggaatcggcttattattttgtcaaaaaaccgtcgatgcaatgattcataatccacaatcagcacagattttttcattaattatatggatattattagtagttctagttatatatttcacaattagattatcttcacgtacaagattataa

SEQ ID NO: 417000 - DNA, 258 bp, Staphylococcus aureus
gtgtataagagacagttttataaagcattaaaaggcaaacaggtacttgtctattctggattgtttaaagatgcacgcaaaaagctaaaaaatggcgagttggattatctcaaagaaagtgatccgacagaatatatttaccaaatcttttatgtgtggaatcaaaaagagtatctagcaagtgagatttacgacttaaccgaagaagaaaaacgagaagtaaacaaccaaatgattaacgaaattgaagaagagtaa

SEQ ID NO: 417001 - DNA, 459 bp, Staphylococcus aureus; identical to SEQ ID NO: 416962

SEQ ID NO: 417002 - DNA, 315 bp, Staphylococcus aureus; identical to SEQ ID NO: 416965

SEQ ID NO: 417003 - DNA, 693 bp, Staphylococcus aureus
atgtatagtataaaaatgcgttctagcaatcaagatgttcatattagtggtgctgaaacgatttgtgagtttgacaaaatagaacagacggtacgaaggttttataataaaggtttttttcatgaaaatgggcaaccggattttctcaatataaaaatacaaaaaatcatggaaccgattcaacaaataaaagcattacaaattactgaggatgataaagcaaatctccaacatttaacacaagaatgtggtgtcactgaacaagcgctaaatcaagggatgacatatattaaaaatgaaacggtttatacaggagctattattctatctgctatatctggtaaacgtttagattcatttggacaaagagggattagggcaacgcatttttcgtttgaagatataaataataaaggtgatcttaatgaaagagtgactgatgccttagcaattgctagttgtatcaatgcgcatccatatgtcaaaggagaactttgtgtgtccgatgacttaacgtatacgacaggttattttgcctctgctaaaattggttaccatcgattatttgatattaaaccagttaatacgagatatggaggcagaataatatttgtggacgatcgtattgatttaaatcattacatatcatttttagaaagcacaccgaagcaagttgtttatgaaacggtatag

SEQ ID NO: 417004 - DNA, 912 bp, Staphylococcus aureus
atgaaaagattaattggaattttattatgtaatttatttattttgactgcgtgttcagcatctgtcgataaaacaagtaactcgacaaagactacagactataaaattgaaaatggtgaaacactgaaagtaccagagaaacctaaaagagttgctgtattaactggattttatgttggtgattttataaagttaggaatcaaaccaattgctgtttcagatataactaaagattcttcaattttaaaaccctatttaaaaggggttgattatattggagaaaatgatgttgaaagagttgctaaagcaaaaccagatttaattgttgtagatgctatggataaaaatataaaaaaataccaaaaaatagcgccaacaatcccatatacatacaataaatacaatcataaagaaatattaaaagaaataggcaagttgactaataatgaagataaagctaaaaaatggattgaagagtgggacgataaaactagaaaagataaaaaagaaattcaaagtaaaattggtcaagcaacagcatctgtgtttgaaccagatgaaaagcaaatatacatatataactctacatggggtcgtggtttggatattgttcatgatgcattcggtatgccaatgacaaagcaatataaagataaattacaagaagataaaaaaggctatgcttccatttcaaaagaaaatattagtaaatatgctggtgattatatatttttaagtaaaccttcgtacggaaaatttgattttgaaaaaacacatacatggcagaatattgaagctgtaaaaaaaggacatgtaatttcatataaagcagaagattattggttcacagatcctattacattagaacatttgagaagtaaattaaaaaaagaaattttaaataaaaaataa

SEQ ID NO: 417005 - DNA, 546 bp, Staphylococcus aureus
atgatttcacacttgataacggatacttcgaagaagatacatcagacagtgattcagactcagacagcgattcagactcagatagcgattcagactcagatagcgattcagactcagacagcgattcagattcagacagcgactcagactcagatagtgattcagattcagatagcgactcagactcagatagcgactcagattcggacagcgattcagactcagatagcgactcagattcagacagcgattcagactcagatagcgactcagattcagacagtgactcagactcagatagcgactcagactcagacagtgactcagactcagacagcgattcagattcagatagcgactcagactcagatagcgactcagattcggacagtgattcagactcagatagcgactcagattcagacagcgactcagattcggacagcgactcagactcagatagcgactcagattcggacagcgactcagactcagatagcgattcggactcggatgcaggaaaacatacacctgttaaaccaatga

SEQ ID NO: 417006 - DNA, 903 bp, Staphylococcus aureus
atgagtagggaattaacttcttttaaacaggatgtatttagcgcaattgatgatgtcaaaaaaaatcttgttgtaataatcttaatagctccagcagctggagtccttattcttgaattaaatactattgaagaaattcttgaagatttagataaaaaattacaacgtggcatagaaagtttacatgattcacttgataacgtaattaaagaaatgtttaaaaatttagatcatgattttgaagatggcgtgacagaggaaatgatgaagcatttaaatgttgtgaataataatataaattttgtgaaaaagcaaaatgatgtatatggagagcagataaccgatattaaaaatataatgtctcatcaagatgcaacggtaatggatggaaacttatctattaattatagcggtgaacatatgatttcgggtcaagtacaatcttctaattatttaaccagaaaaatgacaattttaaaaaaccatattgataatgcagttaacaaaattagtgattatgttcaagaaacttacaataattattttgaaccagtattaaactacattcttgaagttatacattcggtagaaacagctgtgagacatatttatgaaataagcagtttaatatacaaatcaggaatgaaaataaagataaaggcaatgggaataaatgttgacgaaattgataaaatgcttgaagttttaaaaaataaacttaaaaacttagacgaatttttaaataatttaaaaatagcttcgccgattttagaaaatcacttagatgatatagttagaaatatgaaaccgttaattgttaatcagatttttgaaccatctcattatgatgatatgtttatttcaagaaaagctttaacgccagtgttctcaagcgttttataa

SEQ ID NO: 417007 - DNA, 312 bp, Staphylococcus aureus
atgaagaattataattgggaatactttaaagcccaaattaatcaaaagctttctaaaccagaaacgaaaaaaatctatagtcaaagaaaaattgatgtagagcctgtttttggatttatgaaggctattttgggtttcactcgaatgtcagttcgaggaataaataaagttaaacgagagctaggttttgtattaatggcacttaatataagggaaatagcagctcaacgagctgtacattataaaatacatatcaaaaaagctgatttctatcaaataattaatagaaatcagcttttttacattgcctaa

SEQ ID NO: 417008 - DNA, 192 bp, Staphylococcus aureus; identical to SEQ ID NO: 404921

SEQ ID NO: 417009 - DNA, 126 bp, Staphylococcus aureus; identical to SEQ ID NO: 409030

SEQ ID NO: 417010 - DNA, 198 bp, Staphylococcus aureus; identical to SEQ ID NO: 407449

SEQ ID NO: 417011 - DNA, 501 bp, Staphylococcus aureus; identical to SEQ ID NO: 410878

SEQ ID NO: 417012 - DNA, 3144 bp, Staphylococcus aureus
ttggatactcattttatggcaaagattatggccaatattagagactttcaaaacaacgtgagaaaagctcagcgattagcgaaaacatctgttcccaataatatcgaaacagacgtaaaggcggatatatcaaaattccaaagagctatgcaacgtgctaaagctatggcgcaaaagtggcgaggacatgatgttaaattattcatgaaaacagaagagtataaagcaaatttagaacgcgcaaaagcacaagcagaacgattcaagcaacacaaagtagatttaaagttaagtgacgctgagttaatggctaaatacaagactactaaagctactgttgaagcttggagaaaacacgttgtgaagctagacttagatgctagcgccgcaaaaatggcggttaaaggattcaaagaggatttgatagatcttaataagcacagttttgatgttgattctagtagatggaagttaggtaataaattcacaaaagaattcaacgaagttgaaggagcagttaaacgttcttttggaagaattggtcagattatgagaaaggaagttaatggaacaagtagtatttggggcaaacttaataacgcattggaagattacggtaaaaaaatggacgcgctagctactaaaattcgtacgtttggtacaatttttgcgcaacaagttaaaggtttaatgattgctagtatacaagcattgataccagtaattgccgggttagtacctgcaataatggcagtacttaatgcggttggtgtattaggtggtggcgttttaggtttagttggcgcattctctgtcgcaggtcttggagttgttggctttggtgcaatggctattagcgctcttaaaatggttgaagatggtacgctagcagtaacaaaagaggtacaagacttcacaaaagccagcgatcaattaaaagatacatggcgtgatattgttaaagagaatcaagctaaaatatttaacgctatgtcagcaggattaagaggtattgcaagcgcgttaactaaaatgaaacctttcttgtctgaggtatcaatgttagttgaagcgaatgtgcgtaagtttgaagaatgggtcaaaacgtctaacactgcaaaaaaagcgttcgagtcattgaataccatcggcggggctatatttggtgatttattgaacgctgcaggacgatttggtgatggattagtcaatatctttactcaattgatgccgttatttaaattcatgtcacaaggtctgcaaaacatgtctatagatttccaaaattgggctaatagtgtagcaggacaaaatgcgatacaagcgtttatcgagtacactaagacaaatctacccaagataggtaaaatattcggaaacgtttttaaaggtattggtaatttaatgattgcgttcagtcaaaacagttctaatatttttgactggctcgtcgaattgacaaataagtttagagaatggtctgaacaagtagggcaatctcaaggttttaaagatttcatcaactatgttcaagagaatggcccaactattatgaaattaatcggtaacattgttaaagcgttagtagcgtttggtaaagcaatggcacctatagctagtaaattactagatttcatcaccaatctagctgattttatcggtaagttatttgaaactcatccggcagtagctcaggctatgggcattttaggtatattaggtggtgcattctgggctttgatggctccgattgcagcagtgagtagtgttttaagcaatgtatttggtacaagtttattaagaataataaagaaaatgttagatttaacagggataccgaaattgttatctaaagcttttgcgccattagctggtgtatttacaagtatttcttggcctgtattactagttattgcaattatagctgcgttcatcggtattgtcgtttacttatggaaaactaacgagactttcagaaagaatatgacaaaagcgtgggaagatatcaaaagcgctgtttctgaagcgattcaaggcgtaattgattggttaagtgaactatgggataaaatacagaccacaatagaaccaatcaaaccgatattagaagcgttaggtaaagtttttatgactgtgttaggcgttttagtgataggtgtcatagtaaacgtaatgaatgtcattcaaggattatggacagtgataaaaatagcattcgaagctataggaacagtgatatctgtagcagtccaaatcatagtaggtttgttcactgctttaattcagttgcttactggcgacttctcaggtgcttgggagactattaaaactacggttaccaatgtacttgatacgatttggcaatacatgcaatcagtttgggagtcaattattggctttttaactggcgtaatgaatcgaacgctttcaatgtttggtacaagttggtcacagatatggagtacaatcactaattttgttagcagtatttggaacactgttacaagttggttcagtcgtgttgcttggagtgtagctgaaaaaatgggacaagcattaaactttattatcacaaaaggttctgaatgggtttctaacatttggaatacagttacaagtttcgcgagtaaagtagctgatgggtttaaaagagttgtctcaaatgtaggtgacggtatgagtgatgcacttggtaagattaaaagtttcttcagtgatttcttaaatgccggagcggaattaatcggcaaagtagctgagggtgtagccaatgctgcgcacaaagtagtcagcgcggtaggcgatgcgatttcatcagcttgggactctgtaacttcattcgtaagtgggcacggtggaggtagtagcttaggtaaaggtttagcggtatcacaagcaaaagtaattgctacagactttggcagtgcctttaataaagagctatcctctactttgacagatagtatagtagatcctgtaagtacttctatagacagacacatgactggcgatgttcaacatagcttaaaagaaaataatagacctattgtgaatgtaacgattagaaatgagggcgaccttgatttaattaaatcacgcatcgatgacatgaacgctatagacggaagtttcaacttattataa

SEQ ID NO: 417013 - DNA, 396 bp, Staphylococcus aureus; identical to SEQ ID NO: 415992

SEQ ID NO: 417014 - DNA, 690 bp, Staphylococcus aureus; identical to SEQ ID NO: 413589

SEQ ID NO: 417015 - DNA, 537 bp, Staphylococcus aureus; identical to SEQ ID NO: 414173

SEQ ID NO: 417016 - DNA, 492 bp, Staphylococcus aureus
atgactttcgaagaaaaattaagtgaaatgtacaacgagattgcgaataaaattagtagcatgataccagtagaatgggaaaaggtatatacaatggcatatatcgatgaagaatgtggagaagtgttttacaattatactgaaccaagcagtgatgaattattttactatacaagtgtgataaagaagtataatttattgaaatcaagctttatggattcagtatatgagttgcatgatcaatttgaggaactaagggaaatatttaaagaagaaggtcttgaaccatggacatcatgcgaattcgactttacaagcgagggtaaattaaacgtatcttttgattatattgattggactaaattagaatttggacaaatagcaaaagaaaattattatatgtacataaaatttggaattttaccagaaacggaatatgaaattaataaagtaaaagaaatcgagcaatatattaaagagcaagaagaataa

SEQ ID NO: 417017 - DNA, 333 bp, Staphylococcus aureus
gtgaacgagatagcaccaaggcctcacaattccggacattattcaattgaagcatgtgattattcacaatttgatactcatattttagcagttaccggacaatcattaccaaattcaattgaattattaaagcctgcagtcatgatgaacttactaggtaaagacttagatttattggaaaatgaatttaatgaacatccagagtggcacttacatatttatggtaagtctgagcgtaaagatagcagaaaaatggggcatatgactgtactaacgaatgatgtaaaccaaactgaacaagatatgtacgctaaatttgaggggagtaattaa

SEQ ID NO: 417018 - DNA, 492 bp, Staphylococcus aureus
gtgcaattatgtatcggcccacattccgtaaatgagcgtaaagaatatggacattatgaaattgatacgattttaagtaagcgtccttctcttgcgtgtttggttacaattatagagcgtaaaacaagatatttatatgcttgtcgtttagattcaagatgttctaaagatgtatgtgatgcgattgttgaattaatgcgtgatttaagcccaaaaacaattactgtagatagaggtaaagaattttctaattacttattgttagaaagcgaacttaattgtcgtgtgtattttagtgaccctggttgtccaggtcaaagaggttcgattgaaaatgtgaatggcttgttacgtcaatattttccaaaaggtacagattttaaaaatatttctgatgatgcattatataaagctgtggaaagaataaatacaagaccgcgtgcagtattgaattatttaacgagtgaggaagttattcaagtgtatcgctaa

SEQ ID NO: 417019 - DNA, 507 bp, Staphylococcus aureus
atgactaaaaagcgaaaaaaacgacgtcctgtagatttaactacacgtttagctattgcgaaatatctttatgacggtgttcctattgcagatatagctaggcttttggatagagattattcagtgattttaaatgaattaaagcgatatacatttgatgatatttatgaccctgttttagcacaagaatatgcttcggtaacttataatcattctgaagaacataaagagaaatctcgaaaattagatgaaaaatctaaagtatatatcgaagagaggttagcatgtcaatggtcaccacgacaaatagcagaaagaatcgaaaaggatattggtgtatatataagctatcctactatatatcgttatatacgtgaaggattggtcaaatatgtaaagaaagatttaaggcaaggtggtaagaaatttaataaatctacagagaagcgcggtaaaattaaagtaggcgatcgtgcaattatgtatcggcccacattccgtaaatga

SEQ ID NO: 417020 - DNA, 249 bp, Staphylococcus aureus
atgaaaagttataaagatattatgtatgtatcagaagatatttatcaatattttagtaaagtaactaaagaagaagctagaaatgcaagtgaaaaatggaatatttctgaagctcgttctcagtctggtactttagcattgtgcttagaaaacatttctaaaaatattaatgattattcacaggaagagttaggaaaaatgatttattctatttctaaagctcaaagagaaatatttaaattattatag

SEQ ID NO: 417021 - DNA, 2496 bp, Staphylococcus aureus
atggagttaaaagccccttatgcagggataaaaaataatttgttattaacgaaaagcggtgaagtttgggcgtattatcgtattcgttctgaatctatttcaacagctaattacgataaaaaagaagcttcaaaaaaacgtatgaaatattttcttgaatcgattaaaggttatcaggattttcattttgaaatgtatgagcatgatttagatttacgtaataaatttaaagaaattagtcaagactttgatgattcagcgtttgatgtagctaattattatgcccaagaaacgattgatgtgttagaacaagaattacaaatgattacacgtaactcgtttgtcatgggtgtgaaacttcgagaattaagtgatgatgcgatttcgattaaagaaattcttaagagtacattatcagatacagcggagcgtatgatatcgaattttggttttaatgtttcattagatgaaaaagtattaagtcgttatgaagtgtttgaacgcgagcttgcggatagttttttgagtattgagggtgaacgtttaactgaaaatgaacttgcttatattgtgagaaaaccttttatttcaaatgcgacgcatgacgtacaagaagaatcatcaagacgagcagtgacagatgtatgtaatgtggtcattgaccctacaaatatgcgtgtattgaaagtgacaaatgaaaatgaaacattttatacaacaaccattgttgttgatgattttccacttgatatggaatttacgcatatatatgaaaaagcacaaaatatgcccttccctgtggaatgtcatgtgaaagcaaaaatcattgaaaatgataaagtgaaaaagaaatttgatcgtgcaaaaattaatcataaagcacaagcaagagaaaaacaatcagctggtgataatgcatctgaggacattcaagataatttattcgtattagaacaaatggaaaaagaagtgacaggctcaggtgtatttatggaatggtcttgttcatttgtgattaagagtgatgatttaaaagattgtaagcgtaaagcgaaacgtttaattaaacgtttgaaagaaacaaatatttatgcagttaatcccctagctgaccaattacaactatattatcaaattttacatggtaatccattgtttattaacaaatattgggtacaacgcacgacagcgacagggattgcagaaaatttatttggtgtatctcaaagtttaggtacgaaaacgggtttttatattggacgtattgataagtttatacgttctgtttcacgtgaggaagctgttgcaagttcaagagatattattttatttagtttattattagcagccaaaggtatatcaggagcagtcagtgatagcccacacgtattaatcacaggtcaaacaggtaaaggtaaatcattcttagctaagttactttggatatatacatcattctttaaaggtcaaatgatttattgggacccgaaaagtgaatttgcagactggtttaataaaattacagaaagtgaagatatgcaacgtaaatatcccctattcgtcaatcatttaaaaacatttaaatatgtcacattggattataaaaatcctagtaattatggttgtttagaccccattgtttttcttgacggtattgaagctaatgaaatgttgaaatcagtgtttgatgaaattaaatcctttgaaaatgaacatcgtgttgaaacagcgatttatagagcgattactgaaacagttgaggaacgtgaaaaaggtcaacaagttgggtcattagatgtaattaaaaagcttcaaaatgatgaagatgaacatgtaagtcaagctggtgatttactttttgaaaaaacacaaaataatatattaaagcttgtgtttagtgatggtagtaatccagctttgaatattcaagaaaaagcaacgatattacaagttcaaggtttagatatgccgaaagctggtgatgacccatctggctattcaacaggtgagaaaaatggcattactttaatgcttttaatcggtaaattcttacagaaatttggttcacgtagacaaatacaaacaactttatttattgatgagggttgggcatttagtgcttcgcgacaaggtaaaaaagtagctaaaggtattaaacgtatgggtcgatcagaaaataattcgcttgtctttattacccaatctgttaaagataaagccgacgaagacggcggtaactttggttgtcattttgcgtttgatgaaaaagatgaacgtgaggacatcttaaaatctcttggtttagaatattcaaaagaaagtcctgagaatatggaaatgttgaaagacttgaaaaaaggtcaatgtattttcagtgatttctatggacgtgtgggtaaaatggttgtgcattgtcctttcgaagaaatgacggaagcatttaaaacacaagaagattcagcaagctctatagctgaagaaaaatttgcgatatag

SEQ ID NO: 417022 - DNA, 285 bp, Staphylococcus aureus
atggcagagtttacaccttatttttatgattttaagcgtttagattatagaaattttgttattttaagatttcatggtatttcaaaacgtcatatttgtaagatgtataaaattgcatatttttgtatattggatgtgtgcaaaaaagcgaaaaataatgactatcaatttacttataaggattatgtgtttttaaaaaaatatggtgtgtctaacgcatttatatgcaagatgtatcatattgataaattagacctagaattctttgaggtgatgaaccgatag

SEQ ID NO: 417023 - DNA, 1242 bp, Staphylococcus aureus
atgatgaactatgagtctaattcacctgacctttgtcgtttccttctttcccattctgaaaataactatattaaaagttatccaataaataatagtgacttagaaaagtttcatttctttcctaggatagtacataacaatatagtccttagacttaaaaaatggaagttcaagtcacatatatcaacatatgccaaaataatagaactttataaccaaggtcatattgatcgatttgttaacttagtacaattagataattttatattgttagatcttgaaaatatttattcagaaaaaattttaaaaaaggaattgctaaaaaatgaagattatattgaattggaagaagccgaacacttgataaataacagttctatttataaggagtatgaatttgtagtaccaatcaatatacaaagtaagagtcatgaagaacgtataaacaatgtcacactatttaaagattcgaaaaaaagaattttgacgattaatgattcgttgatttatattaaaatctacttctctctaggatatcgcgaagaaatattacaagaattacatatgtatttgactaaagaaaacatatcagattacttttttattcagtacaatgatcctaagccacacatcagattacgtttgttttcttctccagaaaatttaatccatgatttaaaaataatagaatatttacatagttttgaatttgtcaaaaaaattgatattgcagattatgaaagagaaatagaaaggtatggtggagaggaaaaaattgaacttgcagaagaaatatttaaaaaggattcgaaaaacatcttacaattaataaataagaaaaataaagaacatttagctttcgtattagggttgaattttttgaagaccttttacgaaggattaaatgtagaagaattatcaaatttattacaaattaatataaataaatcagatcaaaaattttatagaaaatggattaagtgtaatgaaaatttggaaaatgaaaccgaacaaattaatgatgtttttgaaaaaagtatgatcaaaaaaaatattagagatttcaaacgcgatttcaaaggaatgctacaaactccatactttttaaatattgtatttagtttcatgcatatgtcttataatcgcttaggaattgataacaatacagaagaacaaattaataaaagcatttatctttatttaaaagaggaatattacaaatggaaaaatttgagaaattaa

SEQ ID NO: 417024 - DNA, 858 bp, Staphylococcus aureus
atggaaaaatttgagaaattaagcaatccttcacaaaatttcgaacaaatttataaaaaaaacataataaataatcccaaaataattatcgatatgtattaccatccgtattacttcacattagcaaacggacttttaccttggattataatcatgcgaaatagagaattaaataatttaggaaattatgatatagagatacataacttattaaaaaataaaattaatagaactattatagagcaaattaaagatcccggattgtttaatggtttatcaggtctgacatatatcttagctatatcatcgaaaaatggacgctatgataatctaatagaaggaactttaccttatttggaatatcaaacatacgataagataagcgagtgtattagaaataaaaacaataaaacagttaatgattatgattacgatttaataagtgggctgagtggaatcttaaaatgttatctaaataaacatgtaatcaagtacatacaagataaaaaagtaatagatgatatcgctatatgtttagcagactattttaactttaaggaatacaacaatttacaaagcttacctttttatatcaaaaatcaaaaaaatgaatatataaatagtgaaggtgaaatgatcaacctatcacatagtcatggaattatggggattcttagtgctttaaatcaatattataaaacttatcatcaaaatgatataaaaaaaacaatcgaaaaaatttgtgactttgtcgctcaatattattgtaaaaaaagtagaacatggatcaaaagacattataataaccaaaaaaaatatttggagatccaaactatacatggtgttatggagatttaa

SEQ ID NO: 417025 - DNA, 369 bp, Staphylococcus aureus
atgcaggaattcattgttaatacagataaatcatgtaaaaattattctctattaaataatttatatgaaattatatttgaaaacattgatgataatcaaaataataatattactagtaagtaccctgaggaaattttagaatttttattgaaaactccggaattctattctgaaatttataatactaaggagtctgtaattgaattaaaagccataagtttgcgtttgagcagacaccatatgaagagagcgaactttatagaacaagttgctcgattagttgcggaaatgatgtatatgtctgatattaaaataactataagacactttgaatatgctgatagaccatcaattatggttattaattga

SEQ ID NO: 417026 - DNA, 870 bp, Staphylococcus aureus
gtgatacatacaaatagaataatacgtatggactttggtgaacctaagggactgagtataagtagaaatacactatcttgtgcagcacattatttattagaggggaaaaatgaatattctcctttaaaaggtgaaggctacttacttgagaaaattaacagtttcattaatgaatattattcgataaacacaaataaagaagaagtgttagtaactaatggaggattatttggaattcaattagtcgttgaatatttaaggaataaaggtatttcaaaaatatatataccaaaccctggatttcccccatatcaacatttaaatgttgatcaattaaatataataccatatcaagcaactagttcagatattatgtttaaagagataaaccgtattaataatagtgaagatggtattgttataattatcacctctcctaataatcctaatggggtaatgttgaatccagtaagtttcaacaaaattgatttatctaaaaagaacaacttctttattttagataattcatttcataattatagttataagtatcaacctagaattattcatgacgataatgtatttaatgttttcagcttttctaaatctcatgctttagcagcatatagaattggtttcattttaaataaaaatgttaatcatattaatgatttagctaaaatacagtggaataaaactcttagcgtatcgggaatttcacaaatgatggcttatggagcattagatagtaaaaatgacttgattgaaaataacgaaaaagtaaaatctcagattaaatatgctgaaaaatttttgaattcaaaagggattgttactaacaatcctgatggaggatttttttatggttga

SEQ ID NO: 417027 - DNA, 1473 bp, Staphylococcus aureus
atgaattacattttaggaacaattttagaaagtaaaattacaggtgtagaaaaagcgcaaataaatagactgaagttgttcaaacaacacggcatatcttcaaaatgtgtatatgttaaatggaatccttattcatacacatatgcgaagcaacatcagattgaaaatgatctgtttacaatgtatgactattttcaaaaagcaatcaattataaaaagacaaagcaagttaactggatacagtattgggaaaagtcatgtaggtacacattgaaatttgtggaaaattcaaatgatgtcagaatatatgatgaagagcaatttataatgtatgctcattttttagataaacagtatcatcaattaaactatgtgaattattttgatcaacaaagaagaaaaattaaacgcgaattgtatgatggaagaggctttttaagttgctctcgaattttaggtgaaggacaacggattgtactcgaaaattactatacacctaatggggaaatcgtcatccaaaaatatttcgacgatataaaagggaaaaccacgctcacaaaggttatcttaaatgaagaccagcatcaacaattttttgatacagaagatgaattagttcaatattttctccatcaattatgtaaaaataatgatcaaatcatattagaccgtcctcatgaattaggaaatgttattgcgggattaaatcaaagtattccagttattgttgtgctccacagtacacatttatccggcaccggtaatgatataaaaagtttttataaaacagtgtttaataatttaacacgttataaagcgattgttgtatcaacagaaaagcaatgccaagatatttcacaatatattgaaaataaaataccagttatcaatattccggttggctacgtggcaaacttaaagtatcaatttgacagcaatcaaaaggataaaaatcatatcatatcaattgctcgcctcgttgaaaataaacaaattaaacatcaaattgaagtgatcaagcaattagtaacaaaacatcccaatattcaattgaatatttatggacatggaaatggtttgttagaatatcgacaacttgtagaagattatcatttatcggaacatgttaaatttcatggttttaagacgcatattaatgaagagattgctaaagcagaactgatgttatcgacaagtaaaatggaaggttttggattagcaattttagagtcgctttcattaggtacaccagtgatcagttatgatgtagattatgggccatcagaactgattcaagatggatttaatggctatttagtacctccaggtgacatcaatcaaatggttgaaaaggttgaccaattattaaataatagccaaatgatgcaacaattttcaattaatagcatagaatctgcacaacagtacaatgcaactactatcagtataaagtggcaaaatattttaaactaa

SEQ ID NO: 417028 - DNA, 309 bp, Staphylococcus aureus
atggcaaaacaaaaaatcagaatcagattaaaagcttatgatcaccgcgtgattgatcaatcagcagagaagattgtagaaacagcgaaacgttctggtgcagatgtttctggaccaattccgttaccaactgagaaatcagtttacacaatcatccgtgccgtgcataggtataaagattcacgtgaacaattcgaacaacgtacacacaaacgtttaatcgatattgtaaacccaacaccaaaaacagttgacgttttaatgggcttaaacttaccatctggtgtagacatcgaaatcaaattataa

SEQ ID NO: 417029 - DNA, 624 bp, Staphylococcus aureus
atggctaattatgatgttttaaaattagacggaactaaatcaggttcaatcgaattaagcgatgcagtattcggtattgagccaaataatagcgttttattcgaagctattaatttacaacgtgcttcattacgtcaaggtacgcatgctgttaagaatcgttcagcagtaagcggtggcggacgtaaaccatggaagcaaaaagcaccaagtcgtgctcgtcaaggtacaatccgtgctccacaatggcgtggcggtggtatcgtattcggaccaactccaagaagttatgcatacaaaatgcctaagaaaatgcgtcgtttagctttacgctcagcattatctttcaaagctcaagagaatggcttaactgtagttgacgcattcaacttcgaagctccaaaaactaaagaattcaaaaatgtattatctacattagaacaacctaaaaaagtattagtagttactgaaaacgaagatgtaaatgttgaattatcagcacgcaacatccctggcgttcaagtgacaactgctcaaggtttaaatgttttagatatcactaatgctgacagcttagtaattactgaagctgctgctaaaaaagttgaggaggtgctcggataa

SEQ ID NO: 417030 - DNA, 237 bp, Staphylococcus aureus
gtgtcgtatggtggtaccggtcaaacatatgactggactattttgaagcacataaaagacataccttacttgatagcaggaggcattaactctgaaaatattcaaacagttaatcaacttaaattatcacatcaaggttttgatcttgcatcaggtatagaagtaaatgggcgaaaagatatagaaaaaatgacggcaattgtaaatattgtgaaaggagatagagacaatgaataa

SEQ ID NO: 417031 - DNA, 342 bp, Staphylococcus aureus; identical to SEQ ID NO: 416932

SEQ ID NO: 417032 - DNA, 642 bp, Staphylococcus aureus
atgaatatagaaactatcgtaaaccaatttgaaacacgagcaggcacgttactaaggtactacacgggattattagaacatagtaaagtgcaaccgtattgctttaagttatataatgatccgtttgatatgtgttatgtggtgatgaatagtaagttgtttggtcatgtatatattaaagattgtaaagtaaggcaatcatttgaattagcgtcacctaagcacactgaggggcttataagaagcatagaaggtcattatgtaggttatgaattacatgacggtaaacagctttctattagtgatatgatggctagtcaattatttgaagataactattttatgtatggattacaaacatatgcagaatcaaataatagtgatgtgtttgagtacctagaaaatggatttgatacagatacacttgagggcattcaatcgagtaatactgatgtgatagcgaatattgaaatgttatatcagttagctacgggaatcaatgaaccagaaccagagttagttgagggattaaaattagtaactgagtttgtacaagatgagaatgcgacacaagaggattacaaggctttagaacgtaaattgaatgatctaaaagagtcttactatagcttgagtaaataa

SEQ ID NO: 417033 - DNA, 363 bp, Staphylococcus aureus
gtgttatttgctgcagctatgtcatcagtaattggctcagcatacacaagcgcaacatttttaaaaacacttcataaatcatttaacgaaagaagtaatttaattgtgattgtgtttatcgttatttcaacaatgattttcttatttattggaaaaccaatcagccttttaattatagcaggcgcgataaatggatggattttacctattacgttaggtgcaattttgattgcaagtaaaaagaaatcaattgttggtgattataaacacccaaattggatgttcatctttggtatcgttgcagtacttgttacaatattgacaggtatattctcattcaaagaagtacttcagttattttaa

SEQ ID NO: 417034 - DNA, 783 bp, Staphylococcus aureus
atgacgattttagcagaaattgttaaatataaacagtcacttttacaaaatggctattatcaagacaaacttaataccttgaaaagtgtgaagattcagaataaaaaatcttttataaacgcaattgagaaagaaccaaagctagcaattattgcagaaattaaatcgaagagtcctacagttaatgacttacctgaacgagatttatcgcaacaaatctcagattatgaaaagtacggtgcaaatgccgtgtccattttaactgatgaaaagtactttggtggtagttttgaaagattacaagcattgacaacaaaaacaacattacccgtattatgcaaagactttattatagacccgcttcaaattgatgttgctaaacaagctggtgcatctatgattttattgatcgttaacatcttatcggataaacaattgaaagatttatataactacgctatatcgcaaaatctagaagtgttaattgaagtacatgatcgccatgaattagaacgtgcctataaggttaatgctaaattgattggtgtaaataacagggacttaaaacgatttgtcacaaatgtggaacatacaaatactattttagaaattaaaaaaccaaatcatcattatatttctgaaagtggtattcacgatgcatctgatgtaagaaaaatcttgcatagtggtatcgatggcttactaataggtgaggcgcttatgcgttgtgacaatctatctgaatttttaccacaactgaaaatgcaaaaggtgaagtcatga

SEQ ID NO: 417035 - DNA, 1698 bp, Staphylococcus aureus
atgagtcaattgctaaatgatacgttatcggcttggttgttaattgaatctttaagtccaggagaagtaaattttacagcggaagatatactctcagctgaacattttaaaaatggtgcaaagcaagcacaacttcaaagttttgatgaatattttgaaatatggaattctgaacgctttattatatcagaagaaaaatcagagactggggaacttatatttaaattttatagacattgcttccgctataatgaaattaatttgaaaattcaggatatttttgatgattattctgatattcataatccaaatgggacacactgttatggttacacatttaacacagataaacacggcaaagtgatagttgattctatacatattccgatgattatgagtgcattaaaagaaattgaaaagaacaaaaatgccaatatagaagaaaaatttaatgattctgttgaaaaatttgttcaaaaagtaaaagaaattttagcagatgaaccaattaatgaatttaaattgaagaagatggacaaagcttatgatgagtacttttctgtattaaattcaaagaaagatggattatttggacattatgtagcaatagaatatgtgaaagatagtgatttaccacagccggaatttaacagtttcttcataagtgatattgaggaagcaagaaaatctcccaaccaaactttaattgattacattgaaggtgtagaagaaagtcagcgcatagaagtagatgaaaataaagaaatgtttgacaaatttttacatccttcacgtttgcctgatggacgatggccatcacagactgagtttagattgtctttaatgcaacaacttgctgtaaaccaaattacgagtggtaatgaaagaataagttcagttaatgggccaccagggacaggtaagactactttattaaaagatatatttgctcatctagtagttgaaagaggtaaagagttagctaaactaaataatcctaaagatgcatttgtcaaaacaaaaattcatgaaacggatgataaatacgtatacttactaaaggaatctattgccaaatataagatggtagtcgcatctagtaataatggagctgttgaaaatatatctaaagatttaccgaaaattgaagaaattataagaaatcccgaaaaatgtaaattccctaaatatgaacagaattatgcaaatttagcacatgaattaaaagattttgctgaaatagctgaaggtttgattggtgaaagtgcctggggcttattttctggagtatttggaaaaagcagtaacattaataaagtattggagcacatgctaaaaaaagatgggaatgatattggctttgctagattacttcaaaatgaaaataatcgtatgagttatcacgagttaatgactgaatggcaagcacatcaacgtgcatttttagaagagttgaggcatgttgaaatgttaaaagaagaatctattagagcatatgatgtttataaaaattgtgagtctttctctaagattgaacatgaactaaatagcgaaaaaatgaatgttaaggaaaagttgaatcatttagaaattcaaatatcttgtgacaataaagaaattgaagatttgggtgatcgaattaattataatacaaagcaaatagaaactttaaatgagttaattaaatccatcaaataa

SEQ ID NO: 417036 - DNA, 426 bp, Staphylococcus aureus
atggacgaaaacgactgggatggttggaaacaacttacagaacgtatcggtgaccgtgtacaattagtaggtgacgatttattcgtaacaaacactgaaattttagcaaaaggtattgaaaacggaattggtaactcaatcttaattaaagttaaccaaatcggtacattaactgaaacatttgatgcaatcgaaatggctcaaaaagctggttacacagcagtagtttctcaccgttcaggtgaaacagaagatacaacaattgctgatattgctgttgctacaaacgctggtcaaattaaaactggttcattatcacgtactgaccgtattgctaaatacaatcaattattacgtatcgaagatgaattatttgaaactgctaaatatgacggtatcaaatcattctataacttagataaataa

SEQ ID NO: 417037 - DNA, 660 bp, Staphylococcus aureus
gtgttgattatttttggcgtaccgatttatgtcgtcacattctttttctgcattattattggcgcttgtaatttattcgtactcaatagttacaatgttaaaacacaagctgcatttatcagcactatcgttacaacaatattgttgattacactcatttatttatcggtctacttcggtcatctacaaggcttttcaaccgaacaacaagatgaaacatatgtgtattcaatgaatattggcattgatatggttcaatttatggtgttcactattattcttgctgttattgcagctgtgatagatttaacgattaccattagttcacccatttatgaattgcatcaagtgaatccaacacttacgcaatacgaattattccaatctggcatgcgtgttggtagagaaattttagcgacatctgcgaacacgatttaccttgccttttttggtggccaacttgctttatttatttggtttttcaaacttaaatattcatttggtcatattataaactcgaaaatatttgcccaagaatttatttctattattttaggcggtattgccgttgcaatcagtattccgattacggcttggattacggcatttttaataaaaagaccatctcgacagcgcaaaaatgatgagtctatcaattaa

SEQ ID NO: 417038 - DNA, 366 bp, Staphylococcus aureus
atgattaaaacattttcggtttataagcagaaaattactaaattaacatacgtccatagcgaggatgtttttcgctttgaaaaagttgaacaattaaggaatggacatttcgatgtcatttttactacgacaatattagaacgtggatttacaatggcaaatttggatgttgttgttatcgatgcacatcaatatactcaagaggctttaatacaaattgctggacgtgttggacgaaaattagaatgtcctactggaaaagtattgtttttccatgaaggagtaagtatgaatatgattcaagctaaaaaagagattcaaaggatgaacaaattagcattaaaaagaggttggattgatgaataa

SEQ ID NO: 417039 - DNA, 879 bp, Staphylococcus aureus
atgtatgaaggtaaaggattagtcgataaagacactttaattaaaggtgttaaaaacgcgactgccttaattagtttattatctacaaacgttgataaagatgttatcgatgctggtaaagacttaaaaatcattgccaactatggcgctggttttaataatattgatatcgagtatgcccgagaaaaaagtatagatgttacaaacacacctaaagcatcaacaaacgcgactgctgatttaacaattggattagtacttgcagtagcgcgtcgtattgttgaaggggaccaattatcacgtacaactggatttgacggatgggcacctttatttttcagaggtagagaagtatctgggaaaacaatcggcattatcggtttaggtgaaattggtagtgcagtagctcgtcgtgcaagagcatttgacatggatgtgctatacactggacctaatcgcaaagaagaaaaagaacgagaaatcggtgcaaaatatgtagatttagatacactattaaagaatgcagattttatcactatcaacgctgcttataatcctaaaatgcatcatttaattgatacagaacaatttaaaatgatgaaatctacggcgtatttaatcaatgcctctcgtggtccaatcgtgcacgaacaagcactagtgcaagcattgaaagataatgaaattgaaggtgctgcacttgatgtatatgaatttgaaccagatattaccgatgacttaaaatcacttaataatgtagtattaacaccgcatattggtaatgctacatttgaagcacgtgacatgatgtctaaaattgttgctaatgctgcaattagtgccgttcaaggtgagaaaccacaatttgtcgttaactaa

SEQ ID NO: 417040 - DNA, 303 bp, Staphylococcus aureus
atgaactcagggacaattagtgctaaagaggcagctaatctaattgatttagattcgaatcctacaaagttaatagaggttgtaaaaataggcaaacaattattaatgacgagaggtgcattaacgacatttagtgaagtcatttctggaattgttgacatcattagtgcaggtaaaattgcaaagtattttgctacgtcattagccaaactaaatgtcgttaatgcacctctcgtcattaataattgttgccttaattccaattgccatgaaaggtgtaaaagtaaagggttacagcattga

SEQ ID NO: 417041 - DNA, 399 bp, Staphylococcus aureus
atgcattatttagttgtgacacgtattgatgaacatgatgattttgtgaaagacgtttcagattatgaagacatttcggatttatacttaatcagcgatgcgttagttaccgactactcatctgtcatgttcgacttcggtgtattaaagcgtccgcaaattttctatgcgtatgacttagataaatatggcgatgagcttagaggtttttacatggattataaaaaagagttgccaggtccaattgttgaaaatcaaacagcactcattgatgcattaaaacatatcgatgagactgcaaatgagtatattgaagcacgaacggtattttatcaaaaattctgttcattagaagatggacacgcgtcacaacgaatttgccaaacgatttttaagtga

SEQ ID NO: 417042 - DNA, 933 bp, Staphylococcus aureus
atgattttaactttaacattaaatccatccgttgatatttcatatccattaacagcattgaaattagatgatgttaatcgtgttcaagaagtaagtaaaacagctggtggtaaaggtttaaatgtaacaagagtacttgcgcaagtaggcgagccagtccttgcgagtggttttattggcggtgaattaggtcaatttattgctaaaaaattagatcatgccaacatcaagcatgcattttataacattaagggtgaaacacgaaactgcattgcaattttacatgaagggcaacaaacagaaattttagagcagggaccggagattgataatcaagaggctgcaggatttattaaacattttgaacaattattagaaaaagttgaagcagttgctatttcaggtagcttacctaaaggattaaatcaagattattatgcacaaattattgaacgatgccaaaacaaaggtgtgcctgtgatattggactgctcgggtgcaactttgcaaactgttttgaaaaatccatacaaaccaacagtcattaaaccaaacatttctgaactatatcaattgcttaaccagccacttgatgaaagtttagaaagtttgaaacaggcagtgtcacaacccttattcgaagggattgagtggattattgtgtctttaggtgcacaaggtgcattcgctaagcacaatcatacattctatagagtgaatattccgacaataagcgtattaaatccggttggttcaggtgattctacagttgctggaattacttcagcaattctcaatcatgaaaacgaccacgatttactaaaaaaagctaatactttaggcatgctgaatgcgcaagaagcacaaacaggatatgtcaatttaaataattatgatgaattattcaatcaaattgaagttttagaggtgtaa

SEQ ID NO: 417043 - DNA, 1203 bp, Staphylococcus aureus; identical to SEQ ID NO: 411643

SEQ ID NO: 417044 - DNA, 564 bp, Staphylococcus aureus
atgtctgtcgtgttaagacctaacgttgcattctcaatgatatctaaatttaatttatttattgcattagggataagagatgcgattcaacattttagtcaagatgaagtcaaagtgaaatggccgaatgatatatatattgataatggtaaagtgtgtggtttcttaactgaaatggttgctaataacgatggtatagaagcaataatatgtggtataggtattaatttgacgcaacaactagaaaactttgatgaaagtattagacatagagcaacaagtatacaattacatgataaaaataaattagatagatatcaatttttagagagattacttcaagaaattgaaaaaagatataatcaatttttaacgttacctttttctgaaattcgtgaagaatatattgcagcttctaatatttggaatagaacgttgctatttacagaaaatgataaacagtttaaaggacaagcaattgatttagattacgatggctatctaattgttagagatgaagcgggtgaatcacaccgtttaattagtgcagatatagatttttaa

SEQ ID NO: 417045 - DNA, 624 bp, Staphylococcus aureus
atgaaaacaacgattaaacaagcgaaagatcatttaaaccaagacgttacaattggtgcttggctaacaaataaacgttcaagtggtaaaatcgcctttttacaattacgtgatggaacaggctttatgcaaggcgtagtagttaaatcagaagttgatgaagaggtattcaaacttgcgaaagaaattactcaagaatcatctctatacgttacaggcacaattacagaagataatcgttctgacttaggatacgaaatgcaagtgaaatcaattgaagttatttcagaagcgcatgactatccgattacacctaaaaatcatggtacagaattcttaatggatcaccgtcatttatggttacgttctaaaaaacaacatgctgtaatgaaaattagaaatgaagttattcgtgcaacgtatgaattcttcaacaaagatggatttacaaaggttgatccaccaattttgacagcaagtgcgccagaaggtacaagtgaattattccatactaaatactttgatcaagatgcgtttttatctcaaagtggtcagttatacttagaagctgcagcaatggcacacggaaaagtatttttcatttggtccaactttcagagctga

SEQ ID NO: 417046 - DNA, 192 bp, Staphylococcus aureus
atgattggctattgcaaattggatcaatgtagacggaagtatttattagaatttttcggtgaatatccaccggcacaagatcgatgttgtgacaatgattctaatataactgatatcgcaattttaaataagaagaaggtaattagaagtattggatttgatgaaaagttgcaaaatttatttctcagatag

SEQ ID NO: 417047 - DNA, 249 bp, Staphylococcus aureus
gtgaatcgacaaggaaatgatattggagaaaagtatcgaacgggtttatatagttgtgtagatgaccacttaattgaagctcgtcagttcattgaacgacgtaaagacagagatcaaattgcagtggaagtcttaccgctgtctaattacattaaaagtgctgaagaacatcagcaacatttagaaaaatatccagaagatatgcatatgtgtcatatttcaaaagatttgctaaataaatacaagtga

SEQ ID NO: 417048 - DNA, 612 bp, Staphylococcus aureus
atgtatacgtttgatgcacaatcattaactgctagagaaaactataaattattaattggttcaattattccacgacctatagcttttgttacaacattaaatcaagatgcatcagtaaatgcagcaccatttagcttttttaatattgttaataaccatccgccaatggttgctattgcagttcaacgtgcaggaggtaagagaaaagatactgccttgaatatagagcggactggagactttgttgtgcatattacagacgaagataacgttcaagatattaatgagactgcagcgccgttagcatatggtgacagtgagttgagtcgtacagaattatcacttttaacatctacaacgattaagacgccaggaattaaagacgcgaaaatgagattcgaatgtaaactatcgcaaatgatattgcttggagatgtattagatggggctgatttaataataggtgaaattgtaacttatcatattgatgacagtatttatgagggtgattttaaaatcaatccacacgcattacaggctgtttctcgtttagccggaaatgattatgctaaattagggggaatatttacgataaagagaccagaaaaataa

SEQ ID NO: 417049 - DNA, 279 bp, Staphylococcus aureus
gtgctcattgaactacttacagacattgatttactgtctgatgcagataatgacccacttgtactgatagagtcacttactatctctgaagtactcatcgagtctgatgtacttgttgagacactttgtgatgctgctatgcttagtgatccagaaacagaaccacttatgctcgtcgaatcgctcaatgattctgatgtactcatcgattttgaatcacttgtacttaatgatattgatgtactttgtgaatctgatttgcttgttgacgcactttga

SEQ ID NO: 417050 - DNA, 963 bp, Staphylococcus aureus
gtgcccaacaacaagaaagatctaacaataaagaatcagaatgatattgatgagtatatcgacagtctaatctctaaagctgagaagcctatagaacaactatttgctaatcgacttaaagagataaaacaaatcatcgcagatatgtttgagaagtatcaaagtgatgatgtgtatgttacatggactgaatttaataaatataacaggctcaataaggagttaactcgtataggtacaatgttgactgatgactataggcaagtagctaagatggttcagaagtcgcaggaagacgcttatatagaaaagttccttatgagcctttatttatacgagacggcaagtcaaacatctatgcaatttgatgttcctagcaaagaagttatcacatcggctattgaacaacctattgagttcattcgattagtaccgacactacagaagcatcgtgatgaagtactgaaaaagatacgcttacatatcacacaaggcattatgagcggagagggctactctaaaatagcgaaagcaatccgtgatgatattggtatgtctaaagctcaatcgttgcgtgtagctcgtacagaagcgggcagagcgatgtctcaagctggactcgatagtgcattggtagctcaaaagaatggcttacagatgtataagtattggcaagctactaaagatacacgtacaagagacacacacagacatctagacggtgctaagaagaaaatagacgaaccgttcaagtcgagcggttgcgttggacaggcgcctaagttgtttgttggtgtgaatagtgcaaaagaaaacatcaactgtcgttgtaagcttatgtattacattgatgaagatgatttgcctagtacaacgagagtgcgtaaagatgatggcacaaccgaagtaataccacaaatgacttatcgtgagtgggagaaatataaacgtaaaagaaagtag

SEQ ID NO: 417051 - DNA, 4500 bp, Staphylococcus aureus
atgcacaatgagaaattaattaaaggcttatatgactatcgtgaggaacatgatgcgtgtggtattggtttttatgcgaatatggataataaaaggtctcacgacatcattgataaatcgcttgaaatgttgcgacgcttagatcataggggcggggtcggcgcagatggcatcactggtgatggcgcaggtattatgactgaaataccttttgcatttttcaaacaacatgtaacggactttgatatcccaggtgaaggtgaatatgccgtggggttatttttttccaaagaacgcattttaggttctgaacatgaagtagtttttaaaaaatattttgaaggcgaagggttatcaattcttggttatcgtaatgtaccagttaataaagatgccattgctaaacatgtagcagatacgatgccagtcattcaacaagtgtttattgatattagggacattgaagatgttgaaaagcgtttgtttttagcgagaaaacaattagagttctattcgactcagtgcgatttagaattgtattttacgagcttatcacgcaaaacaattgtatataaaggttggttacgatcagaccaaattaaaaaactatatacagatttatcggatgatttatatcaatcaaagctagggttagtgcattcgagatttagtacgaatacattcccgagttggaaaagggcacatcctaaccgtatgttaatgcataatggtgagattaacacgattaaaggtaatgtaaactggatgcgagcacgccaacataaattaatcgaaacattatttggcgaggatcaacataaagtgtttcaaattgtcgatgaggatggtagtgactctgctattgtagataatgcgctagagttcttatcgttagccatggagccagaaaaggcagcgatgctactcatacctgaaccttggttatataatgaagcgaatgatgcaaatgtacgtgcgttttatgaattttatagttatttaatggaaccgtgggatggtcctacaatgatttcgttctgtaacggtgacaaacttggcgcgcttacagatagaaatggattacgtccaggtcgttatacgattactaaagataactttattgtcttttcatctgaagtgggtgttgtggacgtacctgaaagtaatgttgcttttaaaggtcaattgaatcctggaaagttattgcttgttgattttaaacagaataaagtcattgaaaataatgatttaaaaggtgcgattgctggagaattaccatataaagcgtggattgataaccataaagttgactttgattttgaaaatatacaatatcaagattcgcaatggaaagatgagacgttatttaaattacaacgtcagtttgcatacacgaaagaagagattcataagtatattcaggaacttgtagaaggtaagaaggatcctatcggtgcaatgggatatgatgcgccaattgcagtgttgaacgagcgaccagaatcactatttaattactttaaacagctgtttgcacaagttacgaatccaccaattgatgcgtatcgtgaaaaaatcgtaacgagtgaactttcttatttaggtggcgaaggtaacttactagcacctgacgaaacggttttagatcgtattcaattgaaaaggccggtattgaatgaatcacacttagcagcgattaatcaggaacattttaaattaacttatttatcaacggtatatgaaggggatttggaagatgcgttagaagcattaggacgagaagcagtggatgctgtaaagcaaggcgctcaaattctagtgttagatgatagtggattagttgatagcaatggctttgcaatgccgatgttactcgcaataagtcatgtgcatcaattacttattaaagcagatttacgtatgtctacaagtttagtcgctaaatctggtgagacacgagaagtgcatcatgttgcttgtttactcgcatatggcgcgaatgcaattgtgccatacctagcgcaacgtacagttgaacaactgacattgacagaagggttacaaggcaccgttgtcgataatgttaagacatatacggatgtattgtcagaaggtgtcattaaagtaatggctaagatgggaatttcgacagtgcaaagttatcaaggtgcacaaatatttgaagcgattggcttgtctcatgatgtgattgatcgttattttactggaacacagtctaagttatcgggtatttcgattgatcaaattgatgctgaaaataaagcacgtcaacaaagtgatgataattatcttgcatcaggtagtacatttcaatggagacaacaaggtcaacatcatgcttttaatccggaatctattttcttattgcagcacgcatgtaaagaaaatgactatgcgcaatttaaagcatactctgaagcggtgaacaaaaatagaacagatcacattagacatttacttgaatttaaagcatgtacaccgattgacatcgaccaagttgaaccggtaagtgacattgtcaaacgctttaatacaggggcgatgagttatggatcgatttcagcggaagcacatgaaacgttagcacaagccatgaaccaattaggtggaaagagtaatagtggtgaaggtggcgaagatgcaaaacgttatgaagtacaagttgatggaagcaacaaagtaagtgcgattaaacaagttgcttctgggcgttttggtgtaactagtgattatttacaacatgccaaagaaattcaaattaaagttgcgcaaggtgcaaagcctggtgaaggtggtcaattacctggtactaaggtatatccgtggattgcgaagacaagagggtcaacgccaggtatcggtctgatttcaccaccgccacatcatgatatttattcaatagaagatttagcgcaactgatacatgatttgaaaaatgcgaataaagatgcagatatcgcggtaaaattagtttcgaaaacaggtgttggtaccattgcatctggggtggcaaaagcatttgcagataaaattgtcatcagtggttacgatggtggtacaggggcttcacctaaaacgagtattcagcatgccggtgttccttgggagattggtttagcagaaacacatcaaacattaaaactaaatgacttaagaagtcgtgttaagttagaaacagacggtaagttattaactggtaaagatgtagcgtacgcatgtgcgcttggagcggaagaatttggatttgcaactgcaccattagtggtgttgggctgtattatgatgcgtgtatgccataaagatacatgtccagtaggagttgcaactcaaaacaaagatttacgtgctttatatagaggtaaagcacatcatgttgttaattttatgcattttattgcacaagaattaagagaaattttagcatctttaggtttgaaacgtgtagaagacttagttggaagaactgatttattacaacgatcatcaacattaaaagcgaatagcaaagcggctagtattgatgttgaaaaactgttatgtcctttcgatgggccaaacacaaaagaaattcaacaaaatcataatcttgagcatggatttgatttaacaaatttatatgaagtaacgaagccatatattgctgaaggacgtcgctatacaggtagctttacagtaaataatgaacaacgtgatgtaggagttattacaggtagtgagatttcgaaacaatatggagaagcaggacttcctgaaaatacaattaatgtttatacgaatggtcatgctggtcaaagtcttgcagcatacgcaccgaaaggcttaatgattcatcatactggagatgcgaatgactatgttggtaaaggattatctggtggtacggtcattgtcaaagcaccttttgaagaacgacaaaatgaaattattgctggtaacgtctcattctatggtgcgacaggtggtaaggcatttattaacggtagtgcaggagaaagattctgtattagaaatagtggtgtagatgttgtcgttgaaggtatcggtgaccatggattagagtacatgactggtggacatgtcattaatttaggggatgtaggtaagaacttcggtcaaggtatgagtggtggtattgcttacgttatcccgtctgatgtagaagcttttgttgaaaataatcaactagatacgctttcgtttacaaagattaaacaccaagaagaaaaagcattcattaagcaaatgctggaagaacatgtgtcacacacgaatagtacgagagcgattcatgtgttaaaacattttgatcgcattgaagatgtcgtcgttaaagttattccaaaagattatcaattaatgatgcaaaaaattcatttgcacaaatcattacatgacaatgaagatgaagcgatgttagctgcattttacgatgacagtaaaacaatcgacgctaaacataaaccagccgttgtgtattaa

SEQ ID NO: 417052 - DNA, 339 bp, Staphylococcus aureus
atgaataataaacgacattcaacaaatgaacaattaagtttagacgaaataaacaatacaattaaattcgatcatcgcagttcaaataaacagaaatttttatcatttcttggacctgggttattagtcgctgttggttacatggatcccggaaactggataacatcaatgcaaggtggcgcccaatatggctatactttgctattcgtaattcttatttcaagtttatcagcaatgttacttcaaagcatgacagtgagattaggaatagcaacaggtatggacttagctcaaatgacacgacattatttatcaagacctattgctataatcttttga

SEQ ID NO: 417053 - DNA, 483 bp, Staphylococcus aureus
atgaagaaatttaacagctggatattaaatgcaataagtggatctcaaacagacaagaatggaacaactaaagaattaaaaggggcaaaatttatcattttatatgcatattcaatgctcgttttgcttgcgttagtaatttctaacatattcattcacattttggagcctaaactatcaatcaccactcaaatcatcatcgttttaattttaattgaagcactaattggactacgtttcttgaaagcgtacgatgttaagcgtggcaaagataaagaaaataagaaaaatagtaaggatttcgttaaactaaaatcaattttagtagcaattttatttacatcattggcgctgacagcaggcactgtagctgatatatacggtatcactgacttaggaaatactaggagtgatttaatcgtttggagtataggtggcattctatttggcctcgtatgttacacaatggaagataaaaaataa

SEQ ID NO: 417054 - DNA, 927 bp, Staphylococcus aureus
atgttagcagtcattgtttttgcagcagcatgtggaaactcaagttctttagataatcaaaagaacgctagtaatgattcggattctaaatcaggaggatacaaacctaaagaattaacagtacaatttgtaccttcgcaaaatgctggaacattagaggctaaagcaaaaccattagaaaaattactatctaaagaattaggaattccagttaaagtgtctgtatcaactaactacaatacaattgttgaagctatgaagtctaaaaaagttgatgttggtttcttaccaccaacggcatacacattagcacatgatcaaaaagcagctgatttattattacaagcacaacgttttggtgtaaaagaagatggttcagcaagtaaagaacttgtagatagttataaatcagaaattcttgttaaaaaagactcaaaaattaaaagcttgaaagatttaaaaggtaagaaaattgccttacaagatgtaacatcaactgctggatatacattcccacttgcgatgttaaaaaacgaagcaggtattaatgcaactaaagatatgaaaattgtgaatgttaaaggtcatgaccaagcagttatctcattattaaatggagatgtagatgctgcggctgtatttaacgatgcacgtaatactgtgaaaaaagaccaaccaaatgtatttaaagacacacgaattttaaaattaacacaagctattccgaatgacacaatttctgtaagaccagatatggataaagattttcaagaaaaattgaaaaaagcttttatagacattgctaaatcaaaagaaggtcacaaaattattagcgaagtttattcacatgaaggatacacagaaacgaaagattcaaatttcgacattgtaagagagtacgaaaaattagttaaagatatgaaataa

SEQ ID NO: 417055 - DNA, 1002 bp, Staphylococcus aureus
atgaaaaatttacgaaacagaagttttttaactttattagacttttcacgacaagaggtagaattcttattaacactctccgaggatttaaaacgtgctaaatatattggcactgaaaagcctatgttaaaaaataaaaatattgcattgttatttgaaaaagattctacaagaacgcgatgtgcatttgaagttgcagcgcatgatcaaggtgcaaatgtaacttatttaggcccaactggatcacaaatgggtaaaaaagaaacaactaaagatactgcacgtgtgcttggtggaatgtatgatggcattgaataccgtggtttttcacaaagaacagtagaaattttagctgaatattcaggcgtaccagtgtggaatggtttaactgatgaagatcatcctactcaagttcttgctgatttcttaacagcaaaagaagtcttaaaaaaagattatgcagatattaactttacatatgttggagatggtcgtaataacgttgcaaatgcattaatgcaaggtgctgccattatgggtatgaacttccatttagtttgtccaaaagaattaaatccaacagatgaattattaaatcgctgtaaaaatattgccgctgaaaatggtggcaacatattaatcacagatgatattgaccaaggtgtaaaaggttcggatgtaatttacactgatgtttgggtatcaatgggtgaacctgatgaagtatggaaagaacgacttgaattattgaaaccatatcaagtaaataaagaaatgatggataaaactggtaatccaaatgttatttttgagcattgcttaccatctttccataatgctgatacgaaaattggtcaacaaatttttgaaaaatatggtattcgagaaatggaagttacagatgaagtattcgaaagtaaagcttcagttgtattccaagaagctgagaacagaatgcatacaatcaaagcagtcatggttgctacattgggtgaattttaa

SEQ ID NO: 417056 - DNA, 192 bp, Staphylococcus aureus
atgaaatttagagaattagtaaaacaatcatatgaggatttgaaaaatttgactgtaacttggtataacgtcattgctttagcaatgattgttattgtcttaagcgtagttacaacaccaattataggtattccagctggtttattaggtggcgcttattatttaaaaagccgtgaagaaaaaggtaaataa

SEQ ID NO: 417057 - DNA, 474 bp, Staphylococcus aureus
atgtctaaaatcaggtcttttacaatattaagtctacttatttacttagctatgatgtgctatacagtagtgacctattcaaaattaccaaccaaagtacctattcattataatttagcagggaatgctgataactttgctgataaatgggtgctgcttttgattaatagcgcatttatagtgatttggcttatatttttcattgcaggtagatactatgaacgatttgccaaatggtcacattataatcatacaccacgtgaaattcgagcgattaaattatttttaagtacgttaaatttagagattatgagctatatgtctatcttcacagtattagaaatttggcaaatacaacaccaacatcaattcaatttactatggtttaatatgatatttatcattatcattggtttgacgcttgtcatattttgtttacttcctacaattcataaaatgagagattctcaataa

SEQ ID NO: 417058 - DNA, 213 bp, Staphylococcus aureus
atgtatagtgcatatgtgaatgtaaaaacactcgcaataacaccaacaaacacgatagctatcattgaaatcaaactaaattgggataattgtccagtttgtgttaatgcatctaaaaacatttctttacttaaaaatccatttaaaaatggtactccagccatagatagagccgctatcgtcatgactagattcattttaggaaatagttga

SEQ ID NO: 417059 - DNA, 669 bp, Staphylococcus aureus
gtgaaccaggctattaatgtggttcgtcattttaatcaaattcaaacgaaagtgcgagagcatgattttagatgggaacctactattttatcgaaatccattaaagatttaaaagtagctgttattggtacaggtcgaattggccgtgtagtagccgatatatttgccaatggttatcaaagtgatgtggtcgcatacgacccgtttcctaatgctaaaattgcaacgtatgtcgattacaaagatacgattgaggaagcggttgaaggtgctgatatcgtgacattacatgtacctgcaacgaaatataatcattacctatttaatgctgaattatttaaacattttaaaaagggcgcagtatttgtcaattgtgcgagaggttctttagtagatactaaggcgttattagacgcattagacaatggtgtgattaaaggtgcagcacttgatacgtatgaatttgaacgcaaacttttcccaagtgatcaaaggggcaaaacactgaacgatccattgttagaatcgttgattgacagggaagatgtcatattaacaccacatattgcgttttatactgaagctgcagttaaaaatctaattgtcgatgcattagatgcaacattagatgtattgcagactggagatactaggttacgagtaaattaa

SEQ ID NO: 417060 - DNA, 1674 bp, Staphylococcus aureus
atgattaaacagataaatgtttctaatatgcaaaagtttgaatctcaattaatgaaagctcaatctgaaggttatacacatgtcgttccatatgccaatgagataatgatttatcaatctatgttagatgcggttcaattatatcctaagtctatcgtggttgattatactgtggatggacaatacaaaaatgattgtcactatttcggtcaatcatcgatcaacattgccgattgggctcaaaacaataattattatcctaacctgatatatgcgattcaacagactcttgatttaatacattattactctgtagaaacgattttcgatttagctttattgacacttctgaaaggtgatttatcaatcgatggtcatgtcgtttttgattttaaagcccctttagcaacaagtgcttcaatatgggaaactattaaaactattgaagattttgatatgatgtctcagttttatttgaataaaatggcttatattgatcatcatcctataccttttcgcaacctttttatcgaggattcacaacaacttaattcgccagataattggttgtattctaccaagtttatgctacctaaatggttatataaaatagcaaagcaacgtgctgataacaaacaattacaaaacttcggcttgtatacgaagcaaccaaatgttttaaaagatcacatcgtttttatcggtgatcatcatcaatatataggtaattcaaaatatttatttacttacttcgttaaacataatccaatgactgcctgttattttgttactgacgatcgtcgcggaccacatttcatatcacctaagtctgaaagagctgacgaattgattaacagcgcacgcgtagttatagttgaaaatgatatacctgaaacgttacaaccaaacggtactttaattcaattacatcaaggcacaccaataatgcaattatttttagatagtaaagagcctattaaaaatatagaaacacctttttatcgtgctaaaaggtataatcgctggttgcaattcgattatgttatacattctgctgatgatattagccacttttatcaaacggcttttcctagtcaccaagcaaatgtattggcttatggtaatcctaaacaccaatatttactacaaaagcgtaacgaaagtactactcaacaacagtataagaaatcgtttaaaataaatgatcaaaaaccagttttattatacgcacctattggattagtgagtgcgcaacaattaccactatcagatgctttattcaaagcctatcatgttgtggttcagggtgttgatgaagcgatgttaccagaagaggcgcttgttgcaccaaagtatcttagtgctcaagacttaattctaatgtctgatgtcgttatcactgattactcaaatataatatttgatgcgatggctatagacaaaacagtagcattatacactccaaatcacagtcaatacattgtgtctcaaggtgttaacgaagatatttggcgtcatctatcaaaaatttggtatacagaccgacaattattaattaataatttaatttcccaggcaataccagtgattaaatatccacaaatacaacataaagaacaaccattagaatctatttcacaacttatattgtctaagatgacatctaatcaatag

SEQ ID NO: 417061 - DNA, 1287 bp, Staphylococcus aureus
gtggaaccacttaaagatattgatccacttaatgagtcggagtcacttgtactagtagaatcactcattgatattgaatcacttagcgaggtagactcgcttacgctttctgaaccacttaatgatgttgaggtactcaatgaaccagatgtacttgttgaagtcgaaccacttgtcgattttgaatcacttaatgaatcagattcactcacgctttccgaacttcttagtgacgtcgatacacttaatgatgacgaatcgcttgtgcttactgaatcgctcatcgattgtgagccactcaatgaactagactcgcttacactttctgattttcttaatgacgttgagacgctcaatgagccagaatcacttacgcttgttgaaccactcatcgattttgagtcactttcagaattagattcgcttacactttctgaatcatttacagattctgacatactttgtgaatcagatatgcttgcgctcattacttcactagccgatgttgatgtgcttgtcgaatcacttaacgatatagacacactcatcgaaccagatgtactcgcacttgttgagtctgatgttgaatcactaacactatcagataatgacgttgaatcactcatacttgttgatgtacttgttgaaagcgacatactttgtgaatcacttgtacttgtacgcatcgaagtactagttgaagctgatgtactacgagagtcacttgttgatgttgatgtacttgctgatccagatgcacttgtacttcttgatgtgctttgtgaatcgcttaatgatgttgatgttgaatcggattcacttgtactttctgatgttgagccagattctgatgtacttaccgatgttgataaacttgcaatggtcgacatgcggtttgaagttgatgtacttagcgaatcacttaatgatgctgatgtgctttgtgaatcggattcactgctttgcattgacgcagatgttgaatcacttaaagatgttgacgacgaatcggattcacttgcgcttgctgagttactgagcgatgttgacgtacttgctgatcctgagttacttgtacttgttgagtcactgagtgatgttgacgcactttctgatgttgattcacttgcacttgttgagatactttgtgaatcagattcactctctgaaccacttaatgacgctgatgtgcttaccgaacctgattggctcgtacttctagacatacttgttgaatcgcttagtgacgttgatgtcgatgttgattcactttggcttgttgactga

SEQ ID NO: 417062 - DNA, 759 bp, Staphylococcus aureus; identical to SEQ ID NO: 410468

SEQ ID NO: 417063 - DNA, 288 bp, Staphylococcus aureus; identical to SEQ ID NO: 404919

SEQ ID NO: 417064 - DNA, 276 bp, Staphylococcus aureus; identical to SEQ ID NO: 409377

SEQ ID NO: 417065 - DNA, 1251 bp, Staphylococcus aureus
atggcgcttggctttattattcaaaagttttcaatgcgatatttactaggtgatcatcattatagacattactttccattgttcactgcgattacgtcgtttgcatctttagcatggatgtctgaagacttaagactgatggcactctgctggggtatgacattattatgtttaacattgctgatgaacgttaatcgtttttggaaagtgccacgtgagtctgcgaaattatcaagtatgacatttttatgtggttggcttgcattcgttggagcaattgtaactatttatattgcgactggcgagtggcgggtaccacaacatatagcgcatccgacatggtcattgttgacgaatgtactacttgtattagctgtcatgataccggcagcacaatttccatttcatcgatggttgattgaatctgtaacagcaccaacgccagtatcggcaattatgcatgcaggaattgtgaatgcaggtggtgttattctaactcgttttgcgccgatatttgataatggatttgcattatcattattacttatcctttctagtatttctgtattgttaggatcgggtattagcttggttcaagttgactataaacgccaattagtgggctctacgatgagtcaaatgggctttatgttagttcaatgcgcacttggtgtatattcagcagcgattatacatttaatattgcacggtatttttaaagcaacattatttttacaatcaggttctatcgtgaagcgattcaatattccaaaacaagcatctgctaaagacgcttatggctggattgtcatggggcgtgtattagctattatcgtggcatttctgttttggatgagtagtgacagaagtgcatatgaagtgttaagtgcactcattctagcatggtcattacttgtatcttggaatcaaatggtagcctttagtaaagggcgtatggcacgtctggttggcatgattttgatttcaattgtgacatttatctacatcatcacacataattatttttacgatgtattacaaaatataacaacacatgcgacaacgccgcctacaattagtgtcatcattagtgttgtcatattaatatttggtagtttattgagtatctgggtagcgcgtcatcgatactctaagacttttgcggtattgtacgtgtggttagttaatctaggtgaagcacgctcgaaagcgatagaaagtcatccgaattatttgaagaagtatttatag

SEQ ID NO: 417066 - DNA, 1545 bp, Staphylococcus aureus
atgaaaaaaatatataagtcattaactgtctctgcaattgttgcaacggtatcattaagtgctttaccgcaatctttagctataacgcatgaatcacaacctacaaagcaacagcaaacgatattattcgatcgttcccatggtcaaacagctggtgctgcagattgggttagtgatggtgcattttcagattatgcggattcaatacaaaaacaaggttatgacgttaaagctattgatggtcattcgaacataacagaagcaagtttgaaaagttccaaaatatttgtaattcctgaggctaacattcctttcaaagaatcagaacaggcagcaattgttaactatgtgaaacaagggggaaatgttgtctttatttcagatcattacaatgctgaccgaaatttaaatcgtattgattcatcagaggcaatgaatggttatcgacgtggagcgtatgaagatatgtcgaaaggtatgaatgcagaagaaaaaagttctactgcaatgcaaggtgtgaaaagttcagattggttatctacaaactttggcgtacgttttcgatataatgcactaggtgatttaaatacgagcaatattgtttcttcaaaagaaagtttcggtattactgaaggtgtgaaatctgtctctatgcatgccggatcgacattagcaattactaatccagagaaagcaaaaggtattgtgtatacaccagaacaattgccagcgaaaagtaaatggtcacatgctgtagatcaaggtatttataatgggggcggtaaagcagaaggcccctatgtagcaatttctaaagttggaaaaggtaaagcagcatttatcggtgactcatcacttgtggaagatagttcgcccaaatatgtaagagaagataatggagaaaagaagaaaacatatgatggttttaaagaacaagacaacggtaagctattaaataatataacggcttggatgtctaaagatagtgatgggaaatcacttaaggcgagtggactaacattagatacaaagactaagttgcttgattttgaacgaccagagcgttcaactgagcctgaaaaagagccatggtcacaaccgccgagtggttataaatggtatgatccaacaacatttaaagcaggtagttatggcagcgaaaaaggcgcagatcctcagccaaacacaccagatgatcatacgccaccaaatcagaacgaaaaagtatcatttgatatcccgcaaaatgtttctgtaaatgagccatttgaagtgacaatacatttaaaaggatttgaagcaaatcaaacacttgaaaatcttagagttggtatttacaaagaaggcggacgtcaaatcggacaattttcaagtaaagataacgattataacccgccaggttacagtactttgccaacagttaaagcagatgaaaacggaaatgtcacaattaaggtcaatgctaaagtacttgaaagtatggaaggttcaaagattcgtttaaaactcggtgacaaaaccttgattacaacagacttcaaataa

SEQ ID NO: 417067 - DNA, 1059 bp, Staphylococcus aureus
atgtcaacttcattgtcagaagaagatattgctgaagttattgcaggatggacaggtatcccattaactaaaatcaatgaaacagaatctgaaaaacttcttagtctagaagatacattacatgagagagttattgggcaaaaagatgctgttaattcaatcagtaaagcggttagacgtgcccgtgcagggttaaaagatcctaaacgatcaattggtagctttatcttccttggaccaactggtgttggtaaaactgaattagctagagctttagctgaatcaatgtttggcgatgatgatgcgatgatccgtgtagacatgagtgaatttatggaaaaacacgcagtgagccgattagttggtgctcctccaggatatgttggtcatgatgatggtggacaattaactgaaaaagttagacgtaaaccatattctgtaattttatttgatgaaattgaaaaagctcatccagatgtatttaatattctattacaagttttagatgatggacatttgacagatacaaaaggacgtacagttgatttcagaaatacaattatcataatgacatcaaacgttggggcacaagaattacaagatcaacgatttgctggattcggtggttcaagtgatggacaagattatgaaacaattcgaaaaacgatgttaaaagaattaaaaaattcattccgtccagaatttttaaaccgtgtagatgatatcattgtattccataaactaacaaaagaagaattaaaagaaattgtaacaatgatggttaataaattaacaaatcgattatctgaacaaaacataaatattattgttactgataaagcgaaagacaaaatcgcagaagaaggatatgatccagaatatggtgcaagaccattaattagagcgatacaaaaaactatcgaagataatttaagtgaattaatattagatggtaatcaaattgaaggtaagaaagttacagtagatcatgatggtaaagagtttaaatatgacattgctgaacaaacttcagaaactaaaacaccatcgcaagcataa

SEQ ID NO: 417068 - DNA, 1578 bp, Staphylococcus aureus
atgacgtttcttacagtcatgcaatttatagttaacattatcgttgtaggcttcctgcttacggttattgttatcgggcttatttggttaattaaagataaaagacaatcacaacatagtgtattaaggaattatcctttactagcacgtattagatatatttcagaaaaaatgggaccggaattacgtcagtatttattttctggggataatgaagggaaacctttttcacgtaatgattataaaaatatcgttttggctggaaaatataactctcgtatgaccagcttcggtactactaaagattatcaagacggcttttacatacagaacacaatgtttccgatgcaacgtaatgagatttcagtagataatacaacattgttatcaacattcatttataaaatcgcgaatgagcgtttatttagtcgtgaagaatatcgtgtgccgacaaagattgatccgtattacttaagtgatgaccatgcaataaaattaggtgaacatttaaaacatccatttattttaaaacgtatcgtaggacaatctggtatgagttatggagccttaggaaaaaatgccattacagctttatctaaaggtctagctaaagcgggcacttggatgaatacaggtgaaggtggcttatcagaatatcatttaaaaggtaatggggatatcattttccaaattggtcccggtttatttggtgttcgtgataaagaaggtaattttagtgaagatttatttaaagaggttgcacagttatctaatgtacgcgcatttgagctgaagttggcacaaggtgctaagactcgtggtggtcatatggaagctgaaaaggtaaacgaagaaattgctaaaatccgaaatgttgaaccttataaaacgatcaattcacctaaccgttacgaatttattcataatgctgaagatttgattcgtttcgtcgatcagttgcagcaattaggtcaaaaaccagtaggattcaaaattgtagtaagcaaagtttcagaaattgaaacacttgtacgtacgatggtggaattagataagtatccaagctttattacgattgatggtggtgaaggtggtactggtgcaacattccaagaattacaagatggtgttggcttaccgctatttacagctctacctattgtgtctggcatgttagaaaaatatggtattcgagataaagtgaaattggcggcatctggtaagttagtgacaccagataaaattgcgattgcactaggtttaggtgcagattttgtaaatatcgcacgtggcatgatgattagtgtcggttgtattatgagtcaacaatgccatatgaatacatgtcctgtaggtgttgcaacgacagatgcgaaaaaagaaaaagcattgattgttggagaaaagcaatatcgtgtcacaaactatgtaacaagtttgcatgaaggcttattcaatattgcagcagctgttggcgtatccagtcctacagaaattactgctgatcatattgtatatcgaaaagtcgatggtgagttacaaacgatacatgattataaattaaaactcattagttaa

SEQ ID NO: 417069 - DNA, 1032 bp, Staphylococcus aureus
atggatttaatgataggtactttatttttatttttggtcttagtgatttttacattatttacatataaagcacctaatggtatgcgtgccatgggagcattagctaatgcagcaatcgcaacatttttagtggaagcatttaataaatatgttggtggcgaagtattcggtattaaatttttagaagagctaggagacgctgcgggaggtctaggtggtgtcgctgccgctggattaacagcattagctatcggtgtatcaccagtatatgcattagttatagcagccgcgtgcggtggtatggatttattaccaggtttctttgcgggttatatgattggatatgtgatgaaatatacagagaaatatgtgccggatggtgtcgacttaattggatcgattgtcatcttagcgccattagctcgtcttattgcagtattattaacgccagtagtgaatagtacattgattcgaattggtgatattatccaaagtagtacgaatacgaatccaattatcatgggtatcattttaggtggtattatcacggttgtcggcacagcgccattgagttcaatggcattgacagcattattaggtttaacgggtgtacctatggctattggtgccatggcagcatttagttcggcatttatgaatgggacgctattccatcgcttaaaattaggtgatcgtaagtctacgattgcagtaagtattgaacctttatcacaagcagatattgtatcagccaatccaattccaatctatattacaaatttctttggtggtgcgattgctggtttaattattgctatgtcaggtttaattaacgatgcgacaggtacagctacaccgattgcaggatttttagtaatgtttggatttaatcatccaatgactattgtaatttatggtgtagtaatggcgattgtaggtgcgcttgcaggttatcttggttcaatcgtatttaaaaaatatccaattgttactaagcaagacatgattaatcgaggtgcagttgacgcatag

SEQ ID NO: 417070 - DNA, 1593 bp, Staphylococcus aureus
atgggagacgggcttcaagcatcagcaggagacaggctacgagatattttaaacaaatttacatcaaatccagtattaggtgttattgcaggtatcattgtaactattttaatacaaagtagttcaggtacgacagttatcacaatcggactggtaacagctggatttatgacattgaaacaagccattggagtgataatgggtgctaatatcggaacaacggtaactgcatttattatcggtatagatttaggcgaatatgcaatgccaattttagcattaggtgcatttttaatctttttctttaaacgctctaaaatcaataacattggccgcatactattcggtttcggttctctattcttcggtctagaatttatgggtgatgccgttaaacctttagcatcattagatggatttaagcaattaatgcttgatatgtctacaaatccaatacttgctgtcattgtcggcgcagggttaacagcactagttcaaagttcaagtgcgacgattggtattttacaagaattttatcaacaagatttaattagcttaaacgcagcaatccctgtgttactaggcgataatattggtacaacgattacagctatcttagctagtttagctggctcaatcgctgcaaaacgtgcggcgcttgtacacgtcatctttaacttaatcggtgtaattatcttcacaattttcttgccagttgtgattcatttgattagtttgttacaagatgtatggcacttaaaaccagcgatgacgattgcagtatcacatggtatcttcaacataacaaatactttgattcaattaccatttgtagcaggtttagcatggatagttacaaagcttgtcccaggtaaagatattgctgatgactataaacctcagcacttaaacaaagatcttgtttatcacgcacctggtgttgcattacaagaaactcaaaaagaattacaaaatgttggtcagattgtcttatcaatgtttgaagacattcgcgaaattacaaaagacgataaaaaattgatcaaaaagcttgaacaaaagcatcaagctgttgaaacaatcaatgatagtattcgaaattatttagttagaatttctacaaaagccattacgaaggcagacgttgagcgtttagcagttatgtttgatgtcaatcgttctattttaaaagtagcagagctaacagaagagtatgtcgctcaattaaaacgccaacatgatgaagatattcgcattacagaagatgcacaacgcggtatggataaattattcaaccatgttgctgagtcatttgataaagccattgacatgttagatgtttatgacaaaacgaaaaaagatgaaattgtagaacgtagtagagaatcatttaatattgaacataaactacgcaaaggtcatattaaacgccttaatcgtggtgaatgtacaacaaaaggcggattactatatatcgatatgattggtgttcttgaacgtatcggttatcattcacgaaatgtttctgaagcacttgttggccttaacgatgatgtacctacagatgaagaaattgcaacaactgaaatttaa

SEQ ID NO: 417071 - DNA, 657 bp, Staphylococcus aureus
atgaaccgaaaaatattaccagttaaacctatcagtcagctatttcctatccctatggtcatggggtgtgaaggtgtttccgcagccatgatgttgcaatacaataaccaacatatccctgctacagaaattatgagacattggccgacacatccgaacaatccacataaaggttatgttggacatcacttatttattaagcttggcaattatcatcaaacgatatttccagaagcatatgtaccatttttacaaaaatacaatcctaatatcgtagacggcactggtaaatccttagaagatcttaaaggtattatcgatcaaggtcaacctgtgttaatataccatactaatcttggctctaaaccattactacgtgttttccgctttgataacaagccagcgaaacaagtttcaaatattcacgtaacgttactcattgggtacgatgattactattactattatatcgatccactttggagtcatattcgtcgtggcctagttttacctgccatcattccaaatcgcaaacaaattattaaaattcgtaaagagaaaatggaatacagctttaattcaccaggaagaaagtgcatttatgtgcaaccacattcatatacaattgaaaatcaacaacaaaataaacacacgtaa

SEQ ID NO: 417072 - DNA, 297 bp, Staphylococcus aureus
atgttaaaacaagaaggtattgatgaattagaaatacaaattcgagatttgttctttggtggagaagtacaaaatcaagatatgacttatgtttctaattcaagacatatttcattattaaaacaagcaagacaaacgatacaagatgcgattgatgcagcagaatctggtgtgcctatggatatggtacaaattgatttaactagaacttgggaaatattaggagaaattattggtgagactgcaagtgatgaactcatcgatcagttattcagtcaattctgcttaggtaaatag

SEQ ID NO: 417073 - DNA, 1155 bp, Staphylococcus aureus
atgatctctaacaaattagcaaatatccctgatagttatttcgggaaaacgatgggacgtaaaatcgaacatggaccattgccattaattaatatggcagttgggatccctgatgggcccacgccacaaggtattattgatcattttcaaaaagcactaactattcctgaaaatcaaaaatatggtgcttttcatggtaaagaagcgttcaagcaagctattgtagatttttatcaaagacaatataatgtgacgttagataaagaagatgaagtatgcattttatatggtacaaaaaatggattagtggcagtaccaacatgtgttatcaatccaggagactatgtattactacctgatccaggctacacggattatttagcaggtgtacttttagctgatggcaagcctgtcccgcttaatttagaaccgccacattatttgccagattggtccaaagttgattcacaaataatagataaaacaaaactcatttatttaacgtatccaaataatccaactggatcgacagctacgaaagaagtttttgatgaagcgatagctaaatttaaagatacagacactaaaatcgtgcatgattttgcttatggtgctttcggtttcgacgctaaaaatcctagtatacttgcttcggaaaatgggaaagatgttgcgattgaaatttattccttgtctaaaggttataacatgtcaggttttagagtcggttttgcagttggtaataaagatatgattcaagctttgaaaaagtaccaaacgcacacaaatgctgggatgtttggtgcattacaagatgccgcaatatatgctttgaatcattatgatgattttttagaagaacaaagcaatgtatttaaaacacgtcgtgaccgattcgaagccatgcttgcaaaagctgatttgccatttgttcatgctaaaggtggcatatatgtatggttggaaacaccgcctggttatgacagcgagcaatttgagcaatttttagtgcaagagaagtcaatacttgttgctccagggaaaccatttggagagaatggtaatcgttacgtgagaatttcattggcgttagatgaccagaaattagacgaagctgcaataagattaacagaactagcatatttatatgaataa

SEQ ID NO: 417074 - DNA, 711 bp, Staphylococcus aureus
atgaatatgtcatttgataaaggcaataaatattctttaccttatttctttggaactgtaggtattttatataataaagaaaagtatccaaatgaatcatttgatagttggaagtcattgtataatcctaaatttaaaaaccaaattttactagttgacggtgctagagagattataggcatgagtttgaataaacttgggtataatcttaatgaccgtaattcgcaccatttaaaagaagcagagcgagatttaaccaaactagcaccacaagtaagaggtgtcgtaggtgatgaaattaccatgatgcttcaacaaaatgaaggtaacatagcggttgtttggagtggtgttgcagcacctctagtgcaagaaggggataaatataattatgttattcctaaagaagggtcgaatttatggttcgacaatatggtaattccaaaaacggcacaaaataaagagggtgcatataaatttatgaattttttattagatgctaaaaataacaagcaaaatacagaattcgtaggctatgcaacgccaaacaaggctgctcgacaattgttgcctaaagagattaaagacgaccatcgtttttatccgactaagaaagagcaagaacgccttgaagtttataaagatttaggacctgaagttttaagtgaatacaatgaaaactttttgaatttcaaaatgtcattaaaataa

SEQ ID NO: 417075 - DNA, 690 bp, Staphylococcus aureus; identical to SEQ ID NO: 413589

SEQ ID NO: 417076 - DNA, 651 bp, Staphylococcus aureus
atgacacgctttagtcataagctggattatgagaatttccaagatttaaaatttaatattcaacaagaaatgacagagacagttattgaaaatagcccaattattcaaagaattcataaatatcatcaacaaatcattcaacaaactggtgaatttattgataacgacattatccaaacctttatcgacaaacttcaatcaagtcgacatatactctttgctggactaggtagctctggtttatcagcgactgaattttattatcgtatgattcgtatggggctaaaaggtaatgttactaccgattcacatttaatgaaaatatcggcatccctactatctcattcggatatgtttattgctatgtcaaatagtggtaatacttcggaattaatttctgcagcggaagtcgccaaatctcatggtgcatatgttgttgccatcacaaatttcgaaggtagtaaacttacagattgtgcagatttagtacttttaacaacggatcaatcgcgcaataccgaccatcaatttatcaacacacaaattgcgacactctttttaatcgatatcgtgagttatcatttattagaaaatacgaatctgagtcaaacttatcaacatactaaatctattatcctagacaacaaataa

SEQ ID NO: 417077 - DNA, 378 bp, Staphylococcus aureus
ttgtatcgtccaactgaaaatacaacgtttgagcaacgtgctgcaacgagtgcattgaaaaagcgcatgattgccggaggatttacgagaagcacacatgtgccagtattgtttgaagcagctgaagaaggtgatgatattgcaaaacaaatattgaatgagtgggcagaagatgtagcagaagggattgcccaaatacaagtcatgtatgatccagggcttatattaattggtggcggtatatctgaacaaggagacaatctcattaaatatatcgagccgaaagttgcacactatttaccaaaagactatgtttatgcaccaatacaaacgactaagagtaaaaatgatgcagcattatatggctgtttgcaatga

SEQ ID NO: 417078 - DNA, 864 bp, Staphylococcus aureus
atgacaatgatggatatgaattttaaatattgtcataaaatcatgaagaaacattcaaaaagcttttcttacgcttttgacttgttaccagaagatcaaagaaaagcggtttgggcaatttatgctgtgtgtcgtaaaattgatgacagtatagatgtttatggcgatattcaatttttaaatcaaataaaagaagatatacaatctattgaaaaatacccatatgaacatcatcactttcaaagtgatcgtagaatcatgatggcgcttcagcatgttgcacaacataaaaatatcgcctttcaatctttttataatctcattgatactgtatataaagatcaacattttacaatgtttgaaacggacgctgaattattcggatattgttatggtgttgctggtacagtaggtgaagtattgacgccgattttaagtgatcatgaaacacatcagacatacgatgtcgcaagaagacttggtgaatcgttgcaattgattaatatattaagagatgtcggtgaagattttgacaatgaacgggtatattttagtaagcaacgattaaagcaatatgaagttgatattgctgaagtgtaccaaaatggtgttaataatcattatattgacttatgggaatattatgcagctatcgcagaaaaagattttcaagatgttatggatcaaatcaaagtatttagtattgaagcacaaccaatcatagaattagcagcacgtatatatattgaaatactggacgaagtgagacaggctaactatacattacatgaacgtgtttttgtggataagtggaaaaaagcaaagttgtttcatgaaataaatagtaaatatcatagaatatag

SEQ ID NO: 417079 - DNA, 267 bp, Staphylococcus aureus
ttgttaggcgtaagtgaattacccgtggaagtgaatacacgattagtacttgaaaaaggattaacgttgattggtagtagtcgaagcggctctaaagattttgagcaagttgttgatttatatcgtaagtacccagacattgttgaaaaattagccttattaaaaggacatgaaattaatgtatgtacgatgcaagatatcgtccaagcgtttgaaatggatttatcgacatcttggggaaaaacagtattgaaatggacgatttaa

SEQ ID NO: 417080 - DNA, 486 bp, Staphylococcus aureus
atggttttaaatctggatagaaatactcgaacggctaagggatattattttgttaagaaattttatgaaaaggataaattttcagatagaaaaaattataaagttgaaatgaaaaacaataaaattattttattagacaaagtaaacgatccaaaccttaaagaaagaatagaaaattttaagttttttgggcaatatgcaaattttaaggatttggaaaattacaacaatggcgacgtgtcgataaattggaatgttccaagttatgacgtggaatataaaatgagcaataaagatgaaaatgttaagcaattaagaagtcgttataacattcctactgataaagctccaatgttaaaaatgcatattgacggtgacttaaaaggtagttctgttggatataaaaggttagaaatagacttttcaaaagaagatagggatatttcagtcattgattatttaagttataagccagcgaaaaaatag

SEQ ID NO: 417081 - DNA, 531 bp, Staphylococcus aureus
atgcgtcgtcaagcaaaagcagttaactttggaattgtttatgggataagtgattatggtttaagtcaaagtttaggtattactcgtaaaaaagcaaaagcattcattgatgattatttagctagtttcccaggtgtaaaacaatatatgtctgatattgtaaaagatgccaaagctttaggttacgtggaaacattgctacatcgtcgacgctatattcctgatattacgagtcgtaactttaatttacgcggctttgctgaacgtactgctatgaatacgccaatacagggcagtgctgcagatatcattaaactggcaatggttaaatttgctcaaaaaatgaaagagacaacatatcaagctaaactattattacaagtacacgatgaattaatttttgaagtacctaagtcagaagtagattcatttagtgaatttgtagaagagataatggaaaatgcattgcaattagatgttccattaaaagtagactcaagttatggtgcaacttggtatgatgcaaaataa

SEQ ID NO: 417082 - DNA, 933 bp, Staphylococcus aureus
atgttttatacacaaatattcggcataccagtctttttatttttaaatctcatcatcatattattgtgtattattgttggttcggtactcgcatacaaaatcaatcagcaaaatgattggattaagacgcaaattgagcgttcaatggaaggcgaaacagttggcattaatgatcaaaatatagaaatatatagtgaaacgttagatttataccatacactcgtacctttaaatcaagaattgcataagttgcgacttaaaactcaaaatttaaccaatgaaaattataatattaatgatgtgaaagttaaaaagattattgaagatgaacgtcaaagactggctcgagaacttcacgattctgttagtcagcaactttttgcggcaagtatgatgttatctgctatcaaagaaacgaagttagaaccaccattagaccaacaaattccgattttagagaaaatggttcaagattcgcagttagaaatgcgtgctttgctgttacatttaagaccgcttggtttaaaagacaaatctttaggtgagggtattaaagatttagttattgatttacaaaaaaaagtgccgatgaaagttgtgcatgaaatacaagattttaaagtgcctaaaggtattgaagatcatttgttcagaattacacaggaagcaatttcgaatacattgcgtcattcaaacggtacaaaagtgacagtagaattgtttaataaagacgattatttattgttgagaattcaagacaatggtaaaggttttaatgttgatgaaaaattagaacaaagttatggacttaaaaatatgcgtgaaagagctttggaaattggtgcaacgttccatattgtatcattgccagattcaggtacacgtatcgaggtgaaagcacctttaaataaggaggattcgtatgacgattaa

SEQ ID NO: 417083 - DNA, 270 bp, Staphylococcus aureus
atgaagcaacctattttaaataaattagaaagtttaaatcaagaagaagcgatttctttgcatgttccgggtcataaaaatatgactatcggtcatttatctcaattatcaatgacaatggataaaactgaaatacctggattagatgatttacatcatcctgaagaagtcattttggaaagtatgaagcaggtggagaaacattcagattatgatgcttatttcttgccattaagatatcgccttttttctgtgaaaaagactggatga

SEQ ID NO: 417084 - DNA, 402 bp, Staphylococcus aureus
gtgtttacgtatcaaaatgttgagagacaaaaaggagaatctaagtggtcctttaaaaagttatttaattatggtattgatggattgatttcctttaatagtaaacctttgagaatgatgatttatcttggcttgtttatcttttcaataagcgtgctatatattatctatttattcatcaatattatgatatctggtgttaatattccgggatatttttcaacgattgcagctattttattattaggcggcatacagttaatttcaattggtgttgtaggtgaatatattggcaggatatattatgaagttaaggcacgtcctaaatatattattcaagctacaaatctttcaagtattgaaaatgatgagaaggatacccataaagtttattctaaataa

SEQ ID NO: 417085 - DNA, 189 bp, Staphylococcus aureus; identical to SEQ ID NO: 406989

SEQ ID NO: 417086 - DNA, 330 bp, Staphylococcus aureus
atgcgatgttcgatataccatactaatcttggctctaaaccattactacgtgttttccgctttgataacaagccagcgaaacaagtttcaaatattcacgtaacgttactcattgggtacgatgattactattactattatatcgatccactttggagtcatattcgtcgtggcctagttttacctgccatcattccaaatcgcaaacaaattattaaaattcgtaaagagaaaatggaatacagctttaattcaccaggaagaaagtgcatttatgtgcaaccacattcatatacaattgaaaatcaacaacaaaataaacacacgtaa

SEQ ID NO: 417087 - DNA, 384 bp, Staphylococcus aureus
ttgaaggccatttcagatgaatcgacatcatggtatgaaccatcatataatttagctttaacatcacttaaagaagctgctaaaaaatgtgatcctgtaatcttagaaccaatgatgaaagtaactattgaaatgcctgaagagtacatgggtgatatcatgggtgacgtaacatctcgtcgtggacgtgttgatggtatggaacctcgtggtaatgcacaagttgttaatgcttatgtaccactttcagaaatgttcggttatgcaacatcattacgttcaaacactcaaggtcgcggtacttacactatgtacttcgatcactatgctgaagttccaaaatcaatcgctgaagatattatcaagaaaaataaaggtgaataa

SEQ ID NO: 417088 - DNA, 396 bp, Staphylococcus aureus
atgatggcaaagattaaaaaagaaaagaagatgacactacctgagttaatacaatggggatgggataatcctgaacaagttaaaagtaaagtgtttcaaccagatagcatagattgttttgaagagtatagagaagcaattttttcagctgatggtcgtgggttttattttggtttaataaaagacaaggatatctttactgtagaaattgaagaggaagtcactgaagatactgagtttgattgtctagtagaactcaatgatattgatggtgttcaattatatgaaaatgattcaatcagggagttgatagacggtacttccagagcgttttatatactaaacgaagataaaactatgacgttaatctggaaagatggggagttggtagtatga

SEQ ID NO: 417089 - DNA, 162 bp, Staphylococcus aureus
atgacaaaactaactaaagaagatttgttaagttactttaagaaatacggagcagaaaaagtagattcaattactgatgcacagagtgcgataaatcatttcagagtccagtcacagttctataaagaacaacgtgatgagtacaagaagcaacgagattag

SEQ ID NO: 417090 - DNA, 867 bp, Staphylococcus aureus
atgtttatcgttacatttggtggtacgggtgcaacattggtcgtgccatttatgtttatgtggatgacgaaatctaaacgaaacaaagcgattggacgtgcatcagttgtaccaacattctttggtgtaaacgagccgattttattcggggcaccactagtattgaatcctgtgttctttattccatttgtattagcgccaattgtgaacgtatggatatttaaacttttcgttgaagtgttaggaatgaacagttttagtgtgaacttaccatggacaacaccaggtccactcggaatcatcatgggtactggatttggtttatggtcattcgtactagcgattactttaattgttgtagatattattatttactacccattcctaaaagtttatgacagtgaaattcttgatgaagaagaaggacgtaaagaaagtaattcagatttaaaagaaaaagttgcagcaaactttgatacgaaaaaagctgattcaattttagcggcaagtggtgtatcagacgatgcagctaaagcttcaaatatcacagaacaaacaaatgtcttagtactttgtgccggtggtggtacaagtggattattagccaacgcacttaataaagcagctgaagaatatcatgtgccagtgaaagcagcagctggcggatacggcgcacatatggacattatgaaagagtaccaattaatcattttagcgccacaagttgcgtctaactatgaagatattaagcaagatacagatagattaggtattaaattagcgaagactcaaggtgctgaatatatcaaattgacacgagatggccaagcagcccttgatttcgtacaaaaacaatttgaaaattaa

SEQ ID NO: 417091 - DNA, 294 bp, Staphylococcus aureus
atgaatttagtaaaattcagtaggataaagaaagcgggtgaaacaatggcaacttggttagcaattatttttatagtagctgcattaattttaggtttaattggaggtttccttttagctagaaaatatatgatggactacttgaagaaaaacccaccaatcaacgaagaaatgcttcgtatgatgatgatgcaaatgggtcaaaaaccttctcagaagaaaattaagtttattaaaattaaagttaacaaaatgacgaatagactgagaaatgctataattcattttgtatga

SEQ ID NO: 417092 - DNA, 501 bp, Staphylococcus aureus; identical to SEQ ID NO: 407664

SEQ ID NO: 417093 - DNA, 408 bp, Staphylococcus aureus; identical to SEQ ID NO: 407717

SEQ ID NO: 417094 - DNA, 483 bp, Staphylococcus aureus; identical to SEQ ID NO: 407718

SEQ ID NO: 417095 - DNA, 846 bp, Staphylococcus aureus
atgaatattatgttaacaggtgctacaggtcatttaggcacacatattacaaatcaagccattgcaaatcacatagatcattttcacattggtgttagaaatgttgagaaagttccagaagattggcgcggaaaagttcctgttcgacaattagattattttaatcaagaaagcatggtagaagcatttaaaggaatggataccgttgtgtttattccaagtattatccatccatcatttaaacgtattcctgaagtggaaaatttagtatatgccgcaaagcaaagtggcgttgctcatatcattttcataggttattacgcagatcagcataataatccattccatatgagcccttatttcggatatgcatcacgtttattggcaacaagtggcattgattatacgtatgtaagaatggcaatgtacatggatccacttaaaccatatttaccagaattgatgaatatgcataaactgatttatccagctggtgatggtcgtattaattatattactagaaatgatattgctagaggtgtcattgctattattaaaaatccagatacttggggcaaacgttatttattatcaggctacagttatgatatgaaggaacttgccgctattttatctgaggcatcaggcacagaaattaaatatgaacccgtttcattagagacatttgcagaaatgtacgatgaacctaaaggctttggtgcattattggcatcaatgtacgacgcaggagcaagaggactattagaccaagaatccaatgatttccaacaattagtcaatgatcaaccacagacactgcaatcatttttacaagaaaatatttaa

SEQ ID NO: 417096 - DNA, 681 bp, Staphylococcus aureus; identical to SEQ ID NO: 407719

SEQ ID NO: 417097 - DNA, 702 bp, Staphylococcus aureus; identical to SEQ ID NO: 407720

SEQ ID NO: 417098 - DNA, 1032 bp, Staphylococcus aureus
atgaaaataagaacaattgtgaaagcgagtttagcgttagggcttgtaacaacaggtgcaagtatagtaacaacgcaatcggccaaagcagaagtagcatcagcacttaaatcagaacagttagcaatgataagcgtatcaccaagcgcaatcacaactacaacgcaagcagtgaacgcagaacaaaatcatacggctaatcctgaacaggcggcaaagtctaacacagaaaatgtatcaacatcgccttcaactaaaacagaacagacaccaaaatctaacatacaaaaagcaacccaacaaacaccaagcgtaactacaacacctccaccaaatgcacaaccgcaatcaacacaaccaacaccaaaaccaacaacaccgccttcatctagtgtagaaacgcctcaaccgcaatcgcctaccacaaaacaagcacaaaagaaaataaaccctaaatttaaaggtttaagatcatattatacgaaaccaagtttagaatttaaaaatgagttgggtattattatcaaaaaatggacaacaataagatttatgaatattgttccagattatttcatatataaaatagctttagttggaaaagatgataagaaatatggtgaaggcgtgcaccgacatgtcgatgtatttatcgttttagaacaaaataaatatggcgtagacaaatactcggtcggtggtatcacaaaagcaaatagaaagaaagttgattacaaagcaggaatcagtattactaaagaagataaaaacggtacaatctcacatgatgtttcagaatacaagattactaaagaagagatttccttgaaagaacttgattttaaattgagaaaacaacttattgaacaacataatctgtacggtaatattggttcaggaacaatcgttattaaaatgaaaaatggtgggaagtacacgtttgaattacacaaaaaattacaagaacatcgcatggcagatgttattgatggtacaaatattgatagaattgaagtgaatctaaaatcatcgtga

SEQ ID NO: 417099 - DNA, 189 bp, Staphylococcus aureus; identical to SEQ ID NO: 413154

SEQ ID NO: 417100 - DNA, 501 bp, Staphylococcus aureus
atgactttcgaagaaaaattaagtcaaatgtacaacgagattgcgaatgagattagcagtatgataccggtagagtgggaaaaagtatatacaatggcttatatagatgatgaaggaggagaagtgttctactattacacagaacctggaagtaatgaattatactactatactagtttattaaataaatatgatatatcggaatcagaatttatggactcagcgtatgagttgtataaacaatttcaaaagttaagaaatatatttaaagaagaaggacatgaaccattgacatcatgcgaatttgattttacaaaagaaggtgaattaaaagtttcatttgattatatagattggataaatacagagtttgatcaattgggccgtcaaaattattatatgtacaaaaaatttggggttataccagaaatgaaatatgaaatggaagaaattaaagaaatcgagcaatatattaaagagcaagatgaagctgaaatatag

SEQ ID NO: 417101 - DNA, 903 bp, Staphylococcus aureus
atgtctcataatgaaaatcttaaattggcgcaacgcggtgcttatttgagtttaattgtatatataatcttatctattgttaagtatgtcacgggttttgtctttaactctgcagctgtaagagccgacgcattaaacaatatgacagatattatcgtttctttagctgttattattggattgaaaatttcaattaaacctgccgatcgaaatcatccttatggccatttgaagtctgaaaatatttcttcattattggtgtcatttgtcattatgtttgtaggtatccaagtagttattcaaaatgcacctcgtttgttcaaagaagatgacgttgtacctaacgcaataacaattatcgtcagcttaatcagtggtcttgtaatgttgattgtatttgcagtcaatcaaagactagcgaaaagaacgaaaagtagttctttaaattcggctgccaaagataatttatcagatagtttagtcagcattggaacagcgataggattaatttttacgcaaatcggtttcccaattgtcgatattattttagcaacattactaggcttactaatcgtttatactggttttggtatttttaaagaagcaatttttatgttgagtgatggtttcaatgaaactgaattagaagcgtatcgcaatgatattttagaagttgatgaagtacaagaagttaaaagtattaaagggcgttaccatggaagtagtgtgtttattgatgtcacaattgttgtagatgctaacctttccttagtagaagcgcatcaaatttgtgacaatgtcgaacatcatttgcacaaaaaggtatttcctcagtatacgttcacccagaaccagaccatctataatgtatttaaacgtcttcatagatatataaatatctga

SEQ ID NO: 417102 - DNA, 1611 bp, Staphylococcus aureus
atgagcacaaatcaaacatttttaatatttgttatagcaattattctacttacatctgtaataggaattgttggacgatacatgagtcgtcaacgtctattaaaatctatggaaacattatggcaaacgatttctccattagaagcttttatcagaccgaactcacatttcgactatgagtataagctctacaaggaaaaatttgaatcacattcattagttgatgataaaacttggtccgacttaaatatgaatgcaatctttcataagatgaattataatttaacagctattggtgaaatgaagctatatgcctgtttacgtggaatgctttcaattacgaacaaatcattacttagtttatttaatgataatgctgaatttagaaaaaacgtaacatatcatttagctttgattggtaaaactgtttatccaacatttccagaccaaatcacaccagtaaaacgtcataatatattgtttctatgcccgtttttaccagttatctcatttgcagttatatttattaattcacaagttggtattttattatttcttatgagttgcctatttaatatcattttatcagcaactttaaagcgtacatatgaggatgacttaaaatctatcttttatgcatccaatgttttaaaacaaggctatactatctcaaaaattaaacatgctccacaacctgaagtcaattttaagcaatttagaacagcacgtcatttaacgagtgttttagctgaagttaatgatgaagatatcggagctatggtaattaaactagttaaacttattttcatgcttgattatgttttatttcattcaattcaaaaaagctatacaacacatatgaatgagcttaaaaattgtttcgattacatagctgaattagataatcattatgcattagcaatgtatcgtagaacgctagaatgttatactgaaccacaaattgatgattcaaatgatggcatagtattctctgagttaacacatccactcatagcagatgcagtagccaatgatttctcactatcacaaaatatactgttaactgggtctaatgcttcgggtaaatcaacatttatgaaatccatagcaataaacattattcttgcatcggctatacaaacagttaccgcaagcaaatttgtatatcaacctggaattgtgttcacgtcaatggcaaattccgatgatgtgttatcaggcgatagttattttatggctgaattaaaatctattaagcgtattgttgaaattccagataatcaaaaaatatactgctttatcgatgaaatttttaaaggtaccaacacaactgaacgaattgccgcttctgaatcagtactatcatttttacatgaaaaatctaactttagagttattgcagcaacacatgatattgagttagctgaactcttaaaacaacgttatgaaaattatcatttcaatgaggtaatagaaaataataacatacattttgattacaaaattaagcctggcaaagcaaatactcgtaatgccatcgaattattaaaaatcacttcatttccagcaaaaatatatgaacgagcaaaagataatgtcccgaaaatttag

SEQ ID NO: 417103 - DNA, 372 bp, Staphylococcus aureus
gtgaaagcaaattcattcgttacaccgaatggtcaagtatctgcatatgatcaatacttatttgcccaagacccaactggtccagcagcaagagactatttcgtcccagataatcaactacctcctttaattcaaagtggctttaatccatcatttattacaacattgtcacacgaaaaaggtaaaggtgataaaagcgagtttgaaatcacttacggcagaaacatggatgctacatatgcttacgtgacaagacatcgtttagccgttgatagaaaacatgatgcttttaaaaaccgaaacgttacagttaaatatgaagtgaactggaaaacacatgaagtaaaaattaaaagcatcacacctaagtaa

SEQ ID NO: 417104 - DNA, 150 bp, Staphylococcus aureus; identical to SEQ ID NO: 411733

SEQ ID NO: 417105 - DNA, 987 bp, Staphylococcus aureus
atgcaaaaagttgaaagtatcataattggtggagggccatgcggattaagtgcggctattgaacaaaaaagaaaaggtattgataccttaatcattgaaaagggtaatgtcgttgaatcaatatataattatcctactcaccaaacatttttctcatcaagtgataaattaagtattggggacgtaccgtttatcgttgaagaaagtaaaccaagacgtaatcaagcgctagtttattaccgagaagttgtaaaacatcatcaattaaaagtaaatgcatttgaagaagtattaactgttaaaaaaatgaataataaatttacaattactacgacgaaagatgtttatgaatgtcgatttttaacaatcgcgacaggctattatggtcagcataatacattagaggttgaaggtgcggatttacctaaagtgttccattattttaaagaggcacatccgtattttgatcaagatgttgttattattggtggtaagaattcggctatcgatgctgctttggagttggaaaaagctggtgctaacgtgacggttctatatcgtggtggagattattcgtcttcaattaaaccgtggatacttccaaatttcacagcattagtaaatcatgaaaaaattgacatggaatttaatgctaatgttacacaaataactgaagatactgtgacttatgaagtaaatggtgaaagtaaaacgatacacaatgattatgtatttgcgatgattggttatcatcccgattatgaatttttaaaatctgtaggcattcaaattaatacaaatgaatttggaacagcgcctatgtataataaagaaacatacgaaacaaatatcgaaaattgctatattgcaggtgtaattgctgcagggaacgatgcgaataccatttttattgaaaatggtaaattccacggtggcattattgctcaaagcatgctagctaagaaacaaacgcccttagaatcataa

SEQ ID NO: 417106 - DNA, 1176 bp, Staphylococcus aureus
atgactgaagaattcaatgaatcaatgattaacgatattaaagaaggtgacaaagtcactggcgaggtacaacaagttgaagacaagcaagttgttgttcatatcaacggtggtaaatttaatgggattattcctattagtcaactatctacgcatcatattgatagcccaagtgaagttgtaaaagagggcgacgaagttgaagcatatgtcactaaagttgagtttgatgaagaaaatgaaactggagcttacatcttatctagaagacaacttgaaactgagaagtcttatagttatttacaagaaaaattagataataatgaaatcatcgaagcgaaagtaacagaagtagttaaaggtggtttggttgttgatgtaggacaaagaggttttgttccggcttcactaatttcaacagacttcattgaggatttctctgtgtttgatggacaaacaattcgtattaaagttgaagaattggatcctgaaaataatagagtcattttaagccgtaaagcagttgaacaagaagaaaacgatgctaaaaaagatcaattattacaatctttaaatgaaggtgatgttattgatggtaaagtagcgcgtttaactcaatttggtgcatttatagacattggcggtgtcgatggtttagtgcatgtatctgaactttctcacgaacatgttcaaacaccagaagaagtagtttcaattggtcaagatgttaaagttaaaattaaatctattgatagagatacagaacgtatttcattatcaatcaaagatacgttaccaacacctttcgaaaatattaaaggtcaattccacgaaaatgatgtcattgaaggtgtcgtagtaagattggcaaactttggtgcatttgttgaaattgcaccaggtgtacaaggacttgtacatatttctgaaattgcacacaaacacattggtacgccaggtgaagtgttagaacctggtcaacaagtaaatgttaaaatattaggtattgatgaagagaatgaaagagtatcactatctattaaagcaacattaccaaacgaagatgttgttgaaagtgatccttctacgactaaggcgtacttagaaagcgaagaagaagataatccaacaattggcgatatgattggtgataaacttaaaaatcttaaactataa

SEQ ID NO: 417107 - DNA, 1311 bp, Staphylococcus aureus
atgactaaacctatagtagctattgtaggtaggcctaatgtaggtaaatctacaatttttaatagaatagttggagaacgtgtttcgattgtggaagacacgccaggtgtaacacgagatcgtatttattcttcaggtgaatggttaacacatgatttcaatattattgatacaggtggtattgaaattggtgatgcaccattccaaacacaaattagagcgcaggcagaaatcgccatagatgaagcggatgttattatttttatggttaacgtgcgtgaaggattgacacaaagcgatgaaatggtcgctcaaattttatacaaatctaaaaaaccggtcgtattagcggttaacaaagtagataatatggaaatgcgtacagacgtatatgatttctattcattaggatttggtgaaccgtatccgatatcagggtcacatggtttaggtcttggtgacttgttagatgcagttgtttctcattttggtgaagaggaagaagatccttatgatgaagatacaattcgactatccattattggacgaccaaacgtaggtaaatcaagtttagtaaatgctattttaggtgaagatcgcgttatcgtttctaatgttgcagggacaacgagagacgctattgatacagagtatagttatgatggacaagattatgttttaatcgatactgctggtatgcgtaaaaaaggaaaagtatatgaatcaactgagaaatattcagtattaagagctttaaaagcgattgaacgttcaaatgttgttttagtggtcatagatgcagaacaaggcatcattgaacaagataaacgtgttgcaggatatgcacatgaacaaggtaaagcagtcgtgattgtcgtaaataaatgggatactgtggaaaaagatagtaaaacgatgaagaaatttgaagatgaagtacgtaaagaattccaatttttagattatgcacaaattgcttttgtgtctgctaaagaacgcacaagattacgtacattattcccttacatcaatgaagcaagtgaaaaccataaaaaacgtgttcaaagttcaactttaaatgaagttgttactgatgcaatttccatgaaccctacaccaacagacaaaggtagacgtttgaatgtcttttatgcaacacaagttgctatagaaccaccgacatttgttgtatttgttaatgatgtagaattaatgcatttttcttataaacgctatttagagaatcaaatccgtgccgcttttggttttgaaggtacaccaattcatattatagctcgaaagagaaattaa

SEQ ID NO: 417108 - DNA, 999 bp, Staphylococcus aureus
atgactaaaattaccgtttttggtatgggaagttttgggacagcccttgccaatgttcttgcagaaaatggacatgatgttttgatgtggggtaaaaatcaagatgctgttgatgaattaaatacatgtcatacaaataaaaagtatttaaaatacgcgaaattagatgttaacatcatcgctacttcagatatgaccaaagcaattcaatttgcagatatttacttaatggctttacctactaaagcaatgcgagaagttgcttctcaaattaatgataagctgacctctaaaaagacttttatacatgttgctaaaggtattgaaaatgggacgtttaaacgtgtgtcagaaatgattgaagattctatttcacctgaatataatgcaggtattggcgtgttgtcagggccaagtcatgcggaagaagttgtagtcaagcaaccaactacagttgctgcttcatcaaaagataaaagtgtaagtaaattaacgcaagatttatttatgaatgattatttgcgtgtgtacacgaatgatgacttgattggtgttgaacttggtggtgcattgaaaaatatcatcgcagtagcaagtggtatcgtagctggaattggctacggtgataatgcaaaagctgcattaatgactcgtggtttagcggaaattagtagattaggtgaaaagttaggtgccgatcctatgacatttctaggtttaggtggtatcggtgacttaatcgttacttgcacatcaacacattctcggaatttcacattaggatataaacttggacaaggtgaatcaatggatcaagcattatctgaaatgaatatggttgttgaaggtatttatacaactaaatctgtttatcatttagctaaagaaaaaaatgtggatatgccaattacaaatgcattatatagagtattatttgaaaatatctcagtaaaagaatgcgtaaaagatttaatggagcgcgataaaaaatctgaataa

SEQ ID NO: 417109 - DNA, 273 bp, Staphylococcus aureus; identical to SEQ ID NO: 406404

SEQ ID NO: 417110 - DNA, 573 bp, Staphylococcus aureus; identical to SEQ ID NO: 414740

SEQ ID NO: 417111 - DNA, 726 bp, Staphylococcus aureus
atggctgacaataaagcaaataaagagcaagtacatcgcgtttttcaaaatatttcaaaaaaatatgatagattaaataatattattagttttgagcagcataaagtatggagaaaacgcgtcatgaaagacatgggcgttagaaaagggacgaaagcattagatgtttgttgtggtactggtgattggacaatcgcattaagcaaagctgtaggaccaacaggtgaagttactggtattgactttagtgagaatatgttagaagtaggaaaagaaaaaactgcttcaatggaaaatgttaaacttgttcatggtgatgcaatggaattgccgtttgaagacaattcttttgattatgtaacaattgggtttggattaaggaatgtgccagactatttagtcgcgttaaaagaaatgaatagagtacttaaaccaggtggtatggtggtatgtcttgaaacgagccaaccaactttgccagtctttaaacaaatgtatgcattatactttaaatttgttatgcctatttttgggaaattatttgcaaaatcaaaagaagaatatgaatggttacagcaatctacgtttaattttccaggaaaagaagagttgaagcgcatgtttgaagaagcgggtttcataaatgtaagagtacgtagttttacagggggcgttgctgcaatgcaccttggctataaagaaaaagataataccaaaggtgattaa

SEQ ID NO: 417112 - DNA, 960 bp, Staphylococcus aureus
gtggcaaagttaaacatgaacaatgaaattaagaaagtggaacaacgacttgaaaaggcaataaaaagtaaagattctgtattagaacaggcatcattacacttattgtcttctggtggtaaaagagtacgcccagcatttgtaattctgagtagccaatttggcaaagatgaacaaacgtctgaacaaacgtatcaagttgcagtcgcattagagttaattcatatggcaacacttgttcatgatgacgttattgataaaagcgacaagcggcgaggcaagttaaccatatcaaagaaatgggatcagacaacggctattttaactgggaattttttattggcattaggacttgaacacttaatggccgttaaagataatcgtgtacatcaattaatatctgaatctatcgttgatgtttgtagaggggaacttttccaatttcaagaccaatttaacagtcaacagacaattatcaattatttacgacgtatcaatcgcaaaacagcactgttaattcaattatcaactgaagttggtgcaattacatctcaatctgataaagagactgtacgaaaattgaaaatgattggtcattatataggtatgagcttccaaatcattgatgatgtattagacttcacaagtaccgaaaagaaattaggtaagccggtcggaagtgatttgcttaatggtcatattacgttaccgattttattagaaatgcgtaaaaacccagacttcaaattgaaaattgagcaattacgacgtgacagcgatcgaaaagaatttgaagaatgtattcaaattattagaaagtctgacagtattaatgaatctaaagcagtaagttcgaagtatttaagtaaagctttggatttgatttctgagttaccagatggacatccgaaatcactacttttaagtttgacgaaaaaaatgggttcaagaaacacgtag

SEQ ID NO: 417113 - DNA, 450 bp, Staphylococcus aureus
gtggaacgtacatttttaatgattaaaccagatgcagtacaaagaaatctaattggtgaagtaatttcaagaattgaaagaaaaggactaaaacttgtcggtggtaaattaatgcaagtaccaatggaacttgctgaaacacattatggtgaacaccaaggcaaaccgttttataatgatttaatttcatttattacatcagcaccagtgttcgcaatggtagttgaaggtgaagatgcagttaatgtatctagacatattattggcagcaccaatccttcagaagcttcaccaggatcaattagaggtgatttaggtttaactgttggtagaaatatcattcacggttcagattcattagagtctgctgaacgtgaaattaatctatggtttaatgaaaatgaaattactagctatgcttcaccacgtgatgcatggttatatgaataa

SEQ ID NO: 417114 - DNA, 201 bp, Staphylococcus aureus; identical to SEQ ID NO: 406409

SEQ ID NO: 417115 - DNA, 1167 bp, Staphylococcus aureus
atgagatatctaacttcaggagaatcacatggacctcaattaacagttattgtcgaaggtataccagcaaatttagaaattaaagttgaagatattaataaagaaatgttcaagcgtcaagggggttatggtcgtggccgacgcatgcaaattgagaaagatacagtagaaatagtatcaggcgttagaaatggttatacattaggtagtccaattactatggttgtaaccaatgatgactttacgcattggagaaaaattatgggagcagctccaataagtgaagaagaacgtgaaaatatgaaacgtactattacaaaaccaagacctggtcatgcagatttggttggaggtatgaaatataatcatcgtgatttacgaaatgtgctagagcgatcatctgctagagaaacagcagctcgagttgcagtcggtgccttatgtaaagtgttattacaacagttagatatcgatatatacagtcgtgttgttgaaataggtggaattaaagataaagatttttatgattcagaaacatttaaagcaaatcttgatcgtaatgatgttcgtgtaattgatgacagtatcgcacaagcaatgcgagataaaattgacgaagctaaaaatgaaggagattcaattggcggtgtcgttcaagttgtagttgaaaatatgcctgttggtgttggtagttatgtgcattatgatcgtaagttagatggtaagattgcacaaggtgttgtcagcataaatgcttttaaaggtgtaagctttggtgaaggatttaaagcagctgaaaagccaggtagtgagattcaagatgaaattctatataatagtgaaattggttattatcgtggatctaatcatttaggtggtttagagggtggtatgtcaaatggtatgccaattattgtaaatggtgtaatgaaacctattcctacgttatataaaccattaaattcagttgatataaatactaaagaagactttaaggcaacaattgaacgttctgatagttgtgctgtacctgcagcaagtatagtgtgtgaacacgttgttgcatttgaaatagcgaaagcattacttgaagagtttcaatcaaaccatattgaacaacttcaacaacaaattgctgaccgcagacaattaaatgttgagttttaa

SEQ ID NO: 417116 - DNA, 1065 bp, Staphylococcus aureus
atgaaattacaaacaacctatccttcaaacaattatccaatatttgttgaacatggtgcaattgaccatattagcacgtatattgatcagtttgatcaaagttttatattaattgacgagcatgtaaatcaatattttgctgacaaatttgatgatattttatcatatgaaaatgtgcataaagtcattattccagctggtgaaaagacgaaaacatttgagcaatatcaagaaacattagaatacattttgtcacatcatgtaacgcgtaatacagcgattatagctgttggtggtggtgcgacaggagattttgcaggatttgtagcagcaacactattaagaggtgtccattttatacaagttcctacaacgattttggcgcatgattctagtgttggcggtaaagtgggtattaactcaaaacaaggtaaaaaccttatcggtgcattttatcgtccaactgctgtgatttatgatttagattttttaaagacgttaccatttgagcaaatattaagtggctatgcagaagtttataagcatgcgttattgaatggtgaatcaacgacgcaagatatcgaacagcactttaaagatagagagatattacagtcattaaatggtatggataaatatattgctaaaggtattgaaacgaagctggatattgttgttgcagatgaaaaagaacaaggtgtacgtaaatttttaaatttaggtcatacatttgggcatgctgttgaatactatcataaaatacctcatggtcatgcagtgatggttggcattatctatcaatttatagttgcgaatgctttgtttgattctaagcatgatattaatcattatattcaatatttaatacaactcggttatcctttagacatgataactgacttggattttgaaacgttatacgaatatatgctaagtgataaaaagaatgataagcaaggtgtacaaatggtcttgattagacaatttggagatatcgttgtacaacatgttgatcaactaacatttcaacatgcatgtgaacaattaaaaacatattttaagtag

SEQ ID NO: 417117 - DNA, 1299 bp, Staphylococcus aureus
atggtaaatgaacaaatcattgatatttcaggtccgttaaagggcgaaatagaagtgccgggcgataagtcaatgacacaccgtgcaatcatgttggcgtcgctagctgaaggtgtatctactatatataagccactacttggcgaagattgtcgtcgtacgatggacattttccgactgttaggtgtagaaatcaaagaagatgatgaaaaattagttgtgacttccccaggatatcaatcttttaacacgccacatcaagtattgtatacaggtaattctggtacgacaacacgattattagctggtttgttaagtggtttaggtattgaaagtgttttgtctggcgatgtttcaattggtaaaaggccaatggatcgtgtcttgagaccattgaaacttatggatgcgaatattgaaggtattgaagataattatacaccattaattattaagccatctgtcataaaaggtataaattatcaaatggaagttgcaagtgcacaagtgaaaagtgccattttatttgcaagtttgttttctaaggaaccgaccatcattaaagaattagatgtaagtcgaaatcatactgagacgatgttcaaacattttaatattccaattgaagcagaagggttatcaataactacaacccctgatgccattcaacatattaaacctgcagattttcatgttcctggcgatatttcatctgcagcgttctttattgttgcagcacttatcacaccaggaagtgatgtaacaattcataatgttggaatcaatccaacacgttcaggtattattgatattgttgaaaaaatgggcggtaatatccaacttttcaatcaaacaactggtgctgaacctactgcttctattcgtattcaatacacaccaatgcttcaaccaataacaatcgaaggagaattagtgccaaaagcaattgatgaactacctgtaatagcattactttgtacacaagcagttggcacgagtacaattaaagatgccgaggaattaaaagtaaaagaaacaaatagaattgatacaacggctgatatgttaaacttgttagggtttgaattacaaccaactaatgatggattgattattcatccgtcagaatttaaaacaaatgcaacagttgatagtttaactgatcatcgaataggaatgatgcttgcagttgcttctctactttcaagcgagcctgtcaaaatcaaacaatttgatgctgtaaatgtatcatttccaggatttttaccaaaactaaagcttttagaaaatgagggataa

SEQ ID NO: 417118 - DNA, 1245 bp, Staphylococcus aureus
atggaagatatctataaattaatagacgatatcaatctacaaaaactagaaaatttagactctcgtgttaatgaagcaataactactgacaacgatgacgcattatttattctaggagagacactttacaattttggattaatgccacaaggtttggaagtatttcgcgtgttatatcacaaatatccagacgaaagtgaattgctgatttattttattgaaggtttaatgtctgaaaatcaaactgacgaagcgttagaatatttaagttatgttgaaccatcacctgaaaagttgatgttagaagcagatttatatcaacaaattaatatgatggaagttgctattgataaattacaagaagcacttgaactagagccaaatgatccaataatccattttgcattggctgaaatgttatattatgatggtcaatatttacgtgctacctctgaatacgaaaccgttttagaaactggtgaatatcaagttaatggtgtaaacttattctctcgtatggcagattgtagtttacaaagtggtaactatagtgatgcgattcgcctatacgatgaaattaatgaagatgaaatgacttcagaagattatctcaaaaaagccatttcttacgataaaaatgacatcactcaagaagcaattaaaataatgactacattactttctaaagatcctgattatattcaaggctacttgtatttacaatcattatatgaaaatgaaaaaaattatccagatgccattgagacgggtaaagaaggattacgactaagtcaattttataaagagttaatgtatacaactggatgtttggaaatagaacatggcgatgctaatgaaggtgtattattgttaagacaagcattagaggttgataatgcttaccaagaacctttattgattttaagcgatttatatcgtaatgaagaagattatgaagcaatcattgaattattaacatatgtagatgaagaagatttggatcctacattcatgtggcatttagcgttcgcctatggtcaagaagagcgagataaagaagctcaacatttctttgaattagcatatccaacgatgaaaacaaatattgattttatgagtgattattatttctatttaattgaaattggtcaaaaggaacaagcaattactattttaaatcaattgttggaactagagccaagtaacgaaaattggcatgacgaattatcaagattgcaatcttaa

SEQ ID NO: 417119 - DNA, 588 bp, Staphylococcus aureus; identical to SEQ ID NO: 414978

SEQ ID NO: 417120 - DNA, 588 bp, Staphylococcus aureus
atgacgattaatacattttggcaatatacactttatcaacgttcttggttaatgatgctactcatttgtaatatattagggatgatttatggttatatatggtatggtgaacaattaagtcatacgccgtggcattttaagatttttgttccagatagcccaactgcaatattattcttagttatttctatctcattgatattaatacgaaaacaaaatagtattatcgatgcactggcatttgtaacattattcaaatatgggatttgggcagttattatgaatatattatttattattgaacaaggtgatattacagtaaatggcctggtattaatgttttcccacagtataatggctgttcaggcaatttacttctatcctaggtttaaacgttctatgattggaatcagtgtagcgatgacttgggtatttttgaatgattatattgactattttcaccttcaatttccatattatgattttataactacacatgtgtggcaaattggtgtattatcatgttgtctgagtgtttttggacttttgctttatattgaattaaacaaattattaaagtgtaaatga

SEQ ID NO: 417121 - DNA, 699 bp, Staphylococcus aureus; identical to SEQ ID NO: 406416

SEQ ID NO: 417122 - DNA, 318 bp, Staphylococcus aureus; identical to SEQ ID NO: 410927

SEQ ID NO: 417123 - DNA, 1143 bp, Staphylococcus aureus
atgaagataggtataacatgttacccgtccatgggtggttctggaattattgccacagaattaggaattaaattagcagagcgaggtcacgaagtacattttatcacttcaaatattccgtttagaataagaaaaccattaccgaatatgatttttcatcaagttgaagtgaatcaatatgcagtatttcagtatccaccgtatgatattacattaagtactaaaatcgctgaagttattaaagaatatgatcttgatttgttgcatatgcactatgctgtacctcatgcaatttgtgggattttagctcgtgagatgtcaggtaaagatataaaaattatgacaacgctacacggtactgatattactgttttgggctatgatcattcactccaaggtgcaattaaatttggcattgaaaaaagtgatattgtgacaagtgtgagtaaatctttagcacaagaaacacatgaaattatcgaaactaacaaagaaattataccgatttataattttgtacgtgaaaatgagtttccaactaaacataacacagcattaaaatcacaatttggtatagcaccagatgaaaaagtgttaatacatgtatcgaattttagacaagtaaaacgcatagatactattatagaaacatttgcaaaagtacgtgaaaagatacctagtaaattaattttacttggagatggtcctgaattagtgccaatgcgtcaattgacgaaagagttaaacgtagaagaggatgttttatttttagggaaacaagattgcgtaagtgaattttatcaattatctgacttagtattattattaagtgaaaaagaaagctttggactaactttacttgaggctatgaaaacaggcgtcgttccaattggttcaaatgccggtggaattaaagaggttattaaacatggtgaaactggatttgttgtagatgtgggtgattgtgattcagcgagtgactatgctatccgtttacttgaagataaggcgttatacaacaaacttcagaaaaacatgctagcagatattgctgaacgttttggatcagaacttattacagatcaatatgagtattattatcaaaaaatgctaaatgagcataacaaaagtaaaggcgagtaa

SEQ ID NO: 417124 - DNA, 1203 bp, Staphylococcus aureus
atggataaatcattatttgaacaggcaaggcctatattagaacaaattcaagacaatggttttgaagcatattatgtaggtggctctgtaagagattatgtcatgggaagaaatattcatgatatagatatcacaacaagtgcaacgccggatgaaatagaatctatctttagtcatacgatacctgtaggtaaagaacatggcaccataaatgtagtttttaatgatgaaaattatgaagtgacaacattccgggctgaagaagattatgtcgatcaccgtagaccaagtggtgttacatttgttcgggatttatacgaagatttgcaacgaagagatttcacgatgaatgcgatagcaatggatacagcatacaaattgtatgattattttgatggtcaacaagatattaataatcgaataataagaactgtaggtatagctgaggaacgattccaagaagatgctttacgtatgattcgatgtttaagattccagtcacaattatcatttgatattgcaatggaaacatttgaagcgatgcgtacacaaatggcagatattaaatttttatcaattgagcgtatagtgattgaactaactaaattaatgcgaggtattaatgttgaagagagttttaatcatttaaaatcgctgaaagcatttaattatatgccatatttcgaacaacttgatatgaatcaaattaatgtaactgaaccaattgatttagaattgttgattgctatagtgtcagttaaatttgatattaattactcattgaagcctttaaagctaagtaaccgacaagtaaaagatatcaatcaatatattcaaattatgaatgcattaccaagtattattacaaaagaacaattaaaaatgtttgtttatgattatgatacgaatctcattaaaaatgtaatggttgcagcagacgtgttaaaggcaaatgatattcaaggacatgaaccattaatcgttaaccttcaaacgattgatgaaacattacatcgtttacctatgcataatagaaaagacatgatggttaatggcggtgtacttatggcacatttaaatgccaaaagtggtccgtggttaaaagatgtgctaagacaaattgagatagcgattgtaacaggtaaagtaagcaacgaagaaactgaaattttgaaatgggtggataatcatgtcaaaatatag

SEQ ID NO: 417125 - DNA, 972 bp, Staphylococcus aureus; identical to SEQ ID NO: 410929

SEQ ID NO: 417126 - DNA, 2694 bp, Staphylococcus aureus
atgggtatggcaacctatgccgttgtggatttggaaacaacaggcaaccaattagattttgacgatatcattcaaattggtataacgtttgtgcgcaataaccaaattattgatacatatcattctatgattagaacaaatttagagattccgccattcattcaagcgttaacatccattgaagaaaacatgctacaacaagcgccatattttaatcaagttgcacaagaaatctacggtaagataaaagattgcatttttgtcgctcataatgtagattttgatttaaattttattaaaaaggcatttaaagattataatattcaatatcgtcccaaaaaagttatagatacactagaaatctttaaaatagcttttcctacagataaaagctatcaattaagtgaattagcagaggcacatggtattaccttagcaaatgcccatcgagctgacgaagatgccgctactactgctaaattgatgatattagcttttgaaaaatttgaaaagttacctttagatactttaaagcaattatattatttaagtaaacagttgaaatacgatttgtatgatattttctttgagatggttaggcaatatgatgcaaagccattggataaatcgtacgaaaagttcgaacagattatatatcgtaagcaagttgattttaaaaagccgacaacaaattataatggcagcttgaagtctttatatagcaaagctgtagatcaacttggcttaacatatcgaccgcagcaattatatttagcggaaactatattagatcagctcatgcatagtgaaaaagcaatgattgaagcatcactaggcagtggtaaatcattagcatatttacttgcggccttgatgtataatattgaaactggaaagcatgttatgatttctaccaatactaaattactgcaaagtcaattgttagaaaaagatattccagcaatgaatgaagcgttgaattttaaaattaatgcactattgattaaaagtaaaagtgattacatttcattgggacttattagtcaaattttaaaagatgacacaagtaattacgaagtgaatatcttgaaaatgcaattgttgatttggattacagagacgccgtccggagatatacaggaattaaatttaaaaggtggtcaaaagatgtattttgaccagaaaattgaaacatatgtaccggcacgtcacgatgttcattattataattttattaagcgaaatgcacagaacattcaaattggtattacaaatcatgcacatttaattcattctgatgttgaaaattcaatatatcaattgtttgatgattgtatagtggatgaagcacatcgcttaccagactatgccttaaatcaagtgacaaatgagttgagttatgctgatattaaatatcagcttggtttgattggtaaaaacgaaaatgaaaaattgttaaaggcaatcgatcaactggaaaagcagcgaattttggaaaaattagatattgcaccaattgatatttttggcttgaaggctagtatgaatgagattcatgagttaaatgagcaattgttctcgacgatatttacgattatcaatgattctgatgtttatgatgatgatattcatcgcttccataatgtatttacttttgaaacaaaagacattttgaaggatttacatgcaattatcgataagttaaataaaacgctagaaatattcaatggcattagtcataaaacagttaaatcattacggaaacagttgttgtatttaaaagataaatttaaaaatatcgaacaaagtttaaaagctggacatactagtttcatttcgattaaaaatttatctcaaaaatcaacaatacgtttatatgtgaaagattacgctgtaaaagatgtattaacgaaacaagtattggaaaaatttaaatcactcatttttatatctggtactttaaaatttaatcattcgtttgaagcttttaaacagttattcaacaaagatgttcactttaatacatttgaagttaacacgtcgttacaaagtgcaaaaaatacaagtgtatttataccgagtgatgtagcatcttatcaatataaaaatatagatgagtatgtagcatcgattgtaagctatattattgaatatacgactataacgtcatcaaaatgtttagtcttatttacgagttataaaatgatgcatatggtacaagatatgctaaatgaattgccagaatttgaagattatgttgtattaacacaacagcagaaccaaaattataaaatagtacaacagtttaataattttgataaggccatactgcttggtacgtcaacattttttgaaggttttgattttcaagcaaatggtattaaatgtgtgatgatagcgaagttaccgtttatgaacaagcataatgcaaaatattggcttatggattctgaattcacttcaactttcaaggaatatgtattacctgatgcagttacacgttttagacaaggacttggaagattaattagaagtgaaaatgatcgcggcataatagtttcatttgatgatcgacttataaacagtaattataaaaacttttttgaacaaacacttgaaaattatcgtcagaaaaaaggcgacattcaacagtttggaaaattattaagacaaattcaaaaaaagaaaaagtga

SEQ ID NO: 417127 - DNA, 1293 bp, Staphylococcus aureus
atgaaaacaacgattaaacaagcgaaagatcatttaaaccaagacgttacaattggtgcttggctaacaaataaacgttcaagtggtaaaatcgcctttttacaattacgtgatggaacaggctttatgcaaggcgtagtagttaaatcagaagttgatgaagaggtattcaaacttgcgaaagaaattactcaagaatcatctctatacgttacaggcacaattacagaagataatcgttctgacttaggatacgaaatgcaagtgaaatcaattgaagttatttcagaagcgcatgactatccgattacacctaaaaatcatggtacagaattcttaatggatcaccgtcatttatggttacgttctaaaaaacaacatgctgtaatgaaaattagaaatgaagttattcgtgcaacgtatgaatttttcaacaaagatggatttacaaaggttgatccaccaattttgacagcaagtgcgccagaaggtacaagtgaattattccatactaaatactttgatcaagatgcgtttttatctcaaagtggtcagttatacttagaagctgcagcaatggcacacggaaaagtattttcatttggtccaactttcagagctgaaaaatcaaaaacacgtagacacttgatcgagttctggatgattgaaggagaaatggctttcacaaatcatgctgaaagtttagaaattcaagaacaatatgtaacacatgttgtaaaatcagttttagaaaattgtaaactagagttgaaaattttagagcgtgatacatcaaaacttgaaaaagttgcgacaccattccctagaatttcatatgatgatgcaattgaattcttaaaagcagaaggctttgatgatattgaatggggtgaagattttggtgcgccacatgaaactgccattgctaatcattatgatttaccggtgtttattactaattatccaactaaaattaagcctttctatatgcaaccaaatcctgagaatgaaaaaactgtcttatgtgcagacttaattgcacctgaaggatacggtgaaattatcggtggatctgaacgtgtggatgacttagaattgttagaacaacgcgttaaagaacatggattagacgaagaagcatatagttactacttagacttacgtcgttatggtagtgtgccacactgtggatttggtttaggtttagagcgcacagtagcatggatttctggtgttgaacacgttcgtgaaactgcgccattcccaagattattaaaccgtttatatccataa

SEQ ID NO: 417128 - DNA, 687 bp, Staphylococcus aureus
atggataaatatcaattaaaagcaagacctgtagtgatacgaagagaattattagaccattacagtgacttaggtttagatgagcaagatttagtcattttgcttaaattgatttatgcttccgaaacatcaaataaacagccttcaattgaattacttcagaagggctcaactatgcaaccacgcgatattacaatggttattcaaaatttgatacaacgtgaattgctagaattacaagttcaaaaagatgaagaaggtagatttaccgaatatatgaatctagatccttttttcgaaaaattaagtcatatattgaagcaacaaagtatggaaacgaaagagcaaaatagtaaagaaaaatttaaacaattatttagagttttagaggatacatttgcaaggccgttatctccatatgaaatagaaacgttaaatcaatggattgatgttgataaacacgatagtgcaattatacaagcggcattagacgaggcgaatagtttgaataaacttagctttaaatatatggatcgtattttacttaattggaagaaaaacaatgtcaaaacaattgacgattctagaaaaataagagaaaaatttaataaaccgaaaatgacgcacacagttaaaacggtacctaaatttgattggttaaacggggagaaccttgatggtaagtaa

SEQ ID NO: 417129 - DNA, 660 bp, Staphylococcus aureus
atggtaagtaagaaaaaagcattagaaatgattgatgttatagcaaatatgtttccggatgcagaatgtgaattaaaacatgataatccgttcgaattaactattgctgtattattgtcagcgcaatgtacagacgttctagtaaatagagtaacaactgagctgtttaaaaaatacaaaacgcctgaagattatttggcagtcagtgatgaagaacttatgaatgatattcgttctatcggtctgtatcgtaacaaagctaagaatattaagaaactttgtcaatctttgattgatcaatttaatggagaaataccacaaacacataaggaattagaaagtttagcaggtgtaggacgtaaaacagctaatgtagtcatgagtgtagcatttgatgaaccttcattagctgttgatacgcatgtagaacgtgtttctaaacgcttaggtattaatcgttggaaagataatgtgagacaggtagaagaccgtttatgttctgtcatacctagagatagatggaataggagccatcatcaactcattttctttggaagataccactgtttagcccgaaaacctaaatgcgatatttgtccattattagaagattgtagagaaggacaaaaacgttataaagctagtttgaaagaagcgtga

SEQ ID NO: 417130 - DNA, 342 bp, Staphylococcus aureus
atgacaaaaattacaaaagaggtatttgataatttagaacaagagattgatgtatttgccaaaaataaggcattaggttctagtgaagcaaagccctacttggatgaataccatagtaaaattattgattattttaagcaagttaatgacataactggcaatattgattttgataatttaaatcaatatcctgttgtgccaatgaattttaaagaaagatatgattatatgattgaacgtaaatatcattttatgggctatcgacaaatgaagacctttaaaactgaattgattaaaatgaatgctagttatcaaacaaggttaaagaataagcaggtatag

SEQ ID NO: 417131 - DNA, 2184 bp, Staphylococcus aureus
atgacggaaaacaaaggatcttctcagcctaagaaaaacggtaataatggtgggaaatccaactcaaaaaagaatagaaatgtgaagagaacgattattaagattattggcttcatgattattgcatttttcgttgttcttttactaggtatcttattgtttgcttattatgcttggaaagcacctgcttttaccgaagctaaattacaagatccgattcctgcaaagatatatgacaagaacggagaacttgttaaaacattagataatggccaaagacatgagcatgtaaatttaaaagacgtgccgaaatcaatgaaagacgcagtacttgcaactgaagacaatcgtttctacgaacatggcgcacttgattataaacgtttattcggtgcaattggtaagaacttgactggtggatttggttctgaaggtgcctcaacattaacacaacaagttgttaaagatgcatttttatcacaacataaatctattggacgtaaagctcaagaagcatacttatcatatcgtttagaacaagagtatagtaaagatgatatcttccaagtatatctaaataaaatttactattctgatggcgtaacaggtattaaagctgctgctaagtattactttaataaagatttaaaagatttaaacttagcggaagaagcttatttagccggtttacctcaggttccaaacaactataatatttatgatcatccaaaagctgctgaagatcgtaaaaacactgttttatacttaatgcattatcataaacgtataacagataaacagtgggaagatgctaagaaaatcgatttaaaagcgaacttagtaaatcgtactgctgaagaacgtcaaaacattgatacaaatcaagattctgagtataattcatacgttaactttgtaaaatctgaattaatgaataataaagcattcaaagatgaaaatttaggtaatgtattacaaagtggtattaaaatttatacaaacatggataaagatgttcaaaaaacattacaaaatgatgttgataatggtagcttctacaagaataaagaccaacaagttggtgcaacgattcttgatagtaaaactggtggtttagttgctatatctggtggacgtgatttcaaagacgtcgttaacagaaaccaagcaacagatcctcaccctactggttcatctttaaaacctttcttagcgtatggacctgccattgaaaatatgaaatgggcaacaaaccatgcgattcaagatgaatcttcatatcaagttgatggttctacatttagaaactatgatacgaagagtcacggtactgtatctatttatgatgctttacgacaaagtttcaatatcccagctttaaaagcttggcaatcagttaagcaaaatgctggtaatgatgcacctaagaaattcgctgccaaacttggcttaaactacgaaggcgatattggtccatctgaagtacttggtggttctgcttcagaattctcaccaacacaattagcatcagcatttgctgcaatcgctaacggtggtacttataacaacgcgcattcaattcaaaaagtagttactcgtgatggtgaaacaatcgaatacgatcatactagccataaagcgatgagtgattacactgcatacatgttagctgagatgctaaaaggtacatttaaaccatatggttctgcatatggccatggtgtatctggagtaaatatgggtgctaagacaggtactggtacttacggtgctgaaacttattcacaatataatttacctgataatgcagcgaaagacgtgtggattaacggctttacacctcaatacactatgtcagtgtggatgggcttcagtaaagttaaaccatatggtgaaaactcatttgtgggatatagccaacaagaatatccacagttcttatatgaaaatgtgatgtcaaaaatttcatctagagatggcgaagactttaaacgtcctagctcagtaagtggtagtatcccatcaatcaatgtttctggtagtcaagataacaacactacaaatcgtagtacacacggtggtagtgacacatcagcaaacagcagtggtactgcacaatcaaataacaatactagatctcaacaatctagaaacagcggtggattaacaggtatattcaactaa

SEQ ID NO: 417132 - DNA, 627 bp, Staphylococcus aureus
atgaattatccaaatggtaaaccatatcgtaaaaatagtgctatagacggagggaaaaagaccgctgcctttagtaatattgagtatggtggacgtggtatgtcacttgaaaaagatatcgaacattcaaatgctttttatcttaaaagcgacattgcagttattcacaaaaagcctacgccagtacaaatagttaatgtcaactatcctaaacggagtaaagctgtgattaacgaagcttattttcgtacaccttcaacaactgattacaacggcgtttatcaaggttattatattgattttgaagcaaaggaaactaaaaacaagacgtcctttcctttaaataatattcatgaccatcaagtcgaacatatgaaaaatgcatatcaacaaaaaggtattgtgtttttaatgattcgttttaaaacgctagatgaagtttatcttttaccctattcaaaattcgaagtattttggaagagatataaagataatattaaaaagtctataacagttgatgaaatacgaaaaaatggttaccatattccttatcagtatcaaccaagattagactatctaaaagcagttgataagttgatattagatgaaagtgaggatcgcgtatga

SEQ ID NO: 417133 - DNA, 402 bp, Staphylococcus aureus
atgacgaatacagtatattgtgataaattaaaaaatgtaggaggcgtcctcatgaatgatgtagtcgaatcactaatttatgaagttaacaacatgcaacaaaattttgaaaatgtgaaatcacaacaacaagatcatgatttttaccaaactgtaaagccatatactgaacatattgatagcatgctcaatgagatcaaattacatcgtgaatttattatagaaataccttatatgaattcaaggaaatttgagctactgattgctaacattgaacaactttctgtcgaatgtcattttaagcgaacaagtcgaaagttatttatagaaaagcttaaaagtgttcaatatgatttacaaaatatattagatggcgtaacaaaagagggtacttatggttaa

SEQ ID NO: 417134 - DNA, 564 bp, Staphylococcus aureus
atggttaaaacagtttatgtaacaggttacaaatcattcgaattaaacatttttaaagatgacgcacctgaagtacattatttaaaacaatttataaaacataaaattgaacaactgttggatgaaggattagaatgggtgttaatacaagggcaaatgggtatagaattatggactgcagaagttgttattgaattacaacgaacatatgattcgttaaagtttgctgtaattacaccgttccaaggacatacagaaaagtggaatgaacataatcaaagtaagtatgccaacataattaagcatgcagattatgttgatagtatttttcatacgtcgtatcagggtccttttcaatttaaacaagcagatcaatttatgcttgaacattcggatcaaacattgcttatttatgatgaggaacaagaggcaagtcctaagttcttcaagcagatgttagttgattttatggataaaacaaactatacttgtgatattgtgacgttcgatgaattaacagcattcatcaatgacttacagtggtctgaagatcaaagtttctaa

SEQ ID NO: 417135 - DNA, 345 bp, Staphylococcus aureus; identical to SEQ ID NO: 406430

SEQ ID NO: 417136 - DNA, 1146 bp, Staphylococcus aureus
atgtttcaattacttgcagtttgtccgatgggattagaagctgttgttgctagggaaattcaagaattaggctatgaaacaaatgttgaaaatggtcgtatattttttgaaggagacgcaagtgcaattgtaaaggcaaatttatggttgcgcacagcagaccgaatcaaaattgttgttggacgttttaacgcaacaacgtttgacgaattattcgaacaaaccaaagcgctcccttgggaatctattattgataaagaaggtaacttcccagttcaaggtagaagcgttaaatcaacactacatagtgtgccagattgtcaggcgataactaagaaagctattgttgaacgattacgtcgcgcatataacgaaaaaggttggttaaatgaatcaggtgcgaaataccctgttgaagttgccattttaaaagataatgtattattgactatagacacatcaggttctggtttgaacagacgtggatatagattagcacaaggtgaagcaccaattaaagaaacgttggcagcaagtttaatccgtcttgcaaactggaaaggtgatacacctttaattgatccattttgcggttcgggtactatagctatagaagcttgtttaattgctcaaaatatcgcacctggttttaatcgcgagttcgtatcagagcaatggaacatcatgccagcaaatatttatgatgattaccgtgatgaagcggataagatggctgattatgataaagaaatcgaagtatatgcttctgatatcgatccagaaatggtagagattgctaagcgtaacgctgaagaagttgggttgtctgatattattaaatttagtgtaaaagatgtcaatacattaacaattgatacagaagaaccggtggcgttaattggaaatcctccatatggtgaacgtattggtgatcgtgaagaagttgaagaaatgtaccgttatattggtaaactaatgaaacaacatccatttttatctacatacattttaacaagtaataaagaatttgaatatttagtagatcgtaaagcaacgaagcgacgtaagttatttaatggatatatagaatgtacttattatcaatattggggtaaaaagacagaacgtaaaactatcgaaaactaa

SEQ ID NO: 417137 - DNA, 333 bp, Staphylococcus aureus
atgggtaaaaaaatgggtctaggtttatctattgcattggttgttattggtattgccgttgtatgtttaatgattttttctagtcaaaaaacgacttattttggttatatgaatagtaatacaaatgcagaaaaagttgtcagtgaaaaagatggattagtcaaacataatatcaaagtagaaccatcaaatgatttcaagccgaaaaaaggagactttgtaaaattagtttctaaagatgatgggaagacattttataaacaagagattgttaaacatgatgacgtcccacacggtttaatgatgaaaattcacgacatgcatatgaattaa

SEQ ID NO: 417138 - DNA, 1341 bp, Staphylococcus aureus
atgaaaaatacatttaatccattacaaagattacatttctatgcagcaatatttattgctccactgttaatcactttaaccatttcgggcattggttacttgttctttccagaagttgaaaataatatttataagaatgaattttttggtgacagtgatgtaaaaacgcatcaaacattaaatgatgcagtacatcaagttgaacaacaatatgaaggattctttgtaagtaaagttagcatacttgatgaaccatataacaaacgaattacactgagtgatatggcaggaaatcaacgttacgtctttctagatcataacaatcaatttgttgcagatcaaaatgcgaaacatacgtattctaatgtgatgcgaagtatacatagttctttgtttactgaaaatactattattaattatttagtagagttaaccgcatgttggacgatattcatgattttatctggtacttatttactcattaagaagcatttaatttctaacaaaagtaaggcacttcgttggcaaaagtggcacgcaatgattggagttatcattgcaattccagtatttgtattagtcttaactggattgccatggtctggttttatgggcagtaaaattgccggtatgatggacacaaacggtgaccttggtcaaggtgaattagcgattaatccacctaaatcagatttgaacgaattaccttgggctacacgtaaaaataaacagccagcttcatccgaaaaaggttcaagtggtcatcatggtaatgcagcaatgcctcaaaccaaattagattatcaaatatctattgataaggtcgttgaacaggcgcaaaaagctggtattaaaaagccgttttcaatcgtatatccaagtgataaaaatggtacctttattgtatctaatactagtaattcaggtgttactgggctagatgtatcaccatacaaggaacaaacactttatttcgatcaatatagcggtaaaaagctaggtacgattaaatatgatgactacggtattattgctaaatggtttacatggggcattccgcttcacgaaggtcatttattcggcattttaaataaaatcattaatttatttgtatgtatcgctttattagtagccattggcatggggtttgtctcttggataaagcgtacaaaaaatactgcagtaaaagtaccacatcgcgtaaaaaaaccagcatctatatcactcataatatgtttaattgtattaggattattaatgccattatttggattatcacttatccttgtatttataattgaattaatattatatattaaagatcgtcgtgctaaacaataa

SEQ ID NO: 417139 - DNA, 3441 bp, Staphylococcus aureus
atgattaataaagaacaattagatcttttatataaattaaaaaaagaagttgaaaagtcgcgaaatgaagcacttttacatacaattaaccaagtaattaagaaagtatatttgcagcaatatacatgttcgttcgttggacatttttctgcaggtaaatcgacaatgataaatttattaattgaacaagatatcttaccaagttctcctgtaccaacgacaagtaatactgctattgtgtcagtttcagacaatcacgatattattgctaatttgccgaatcaaacgtatgccaaattatctaattatgatgaagtaagggaaatgaatcgccaaaatgtcgacgttgaatctgtagaaattaattttcaatcagctaaatttgaaaatgggtttacgctgcaagatacaccaggtgttgattcaaatgttgtatcacatcagtcaataacagaacaatatatgtatacaagtaatatgatattttatacggttgactataaccacgttcaatctgaacttaactttaagtttatgaagcatataaatgatgttggaatacctgttgtgtttatcattaatcaaattgacaagcatcaagacgatgaattgtcattcgctacgtttaaatcacgagttgaaaaatcaattgcagattggggcattaaattagaacgtaccttttatgtatctaaatttgatcaccctgaaaatgaacttgaagtattatcaacgtatctagtttcattagatcaacatagagagacaatagaggattatacatcaagaacggttgaatacattaccgaagctcagctagattacattcagtctgaaattcaggaagtactagaagatttaggtatcgaagaagcggagtttgaacaagcatttttaaatagtcaacaacatcaagcaattagtgaagaggcacaacttttaaataatccagatgaattaatggcatttttaaagaataagcgtaaaaatattttagaaaatgcatacattatgccgcataatatgagagaaatgttacgaagttatttggaaagtatgtctcaagactttaatgttggtgggttttttaataaaaagaagaaaaagctacaaattcaacaacagcgattattaacagcgacagatgcgttacaagaacatgttaatcaacaaattcgtcaaccaatgcgagaagatatgtcatttgtaacgcgttttatcaataaaaaagaagcttcagataaagtattaaatcagcattatgacgttaagccggaaatgattgaagatttatatcaaccacaaacatcaatcagcaatacttatgtacttacattttcagacgaagtggttaaagccattaagaaatatgttgaacaacaatcaacaccaatttttaaagaaataatagaaaatgtgcaggcagatgaattaccaacagaagaaagtgatgatttaaaagaatatcaacgttatacagaattaaatgagctgcgtcagtcattgacgactaagaattatcgtcactactatattcatttagatgaatctctagataaattaataggtcgacaagagacaacatatcaagtggctactgataatgctcaggataatcgtgataatcagcagctaaatcaaaatacagctacaacaaatatgtctatagatattcaaaaagcgcttgatataatttcggatgtgcctttgttcaagcgtacaaagcaagatatccacgaaacattaacacgtatagataataaattaataaaaataggtgtatttggaacatttagtgctggtaaaagtagtttgataaatgcattattaggcgagcatattttagtcagttctccaaatcctactacagcagctactacagaaatatcttatggagacgagagttatataacgctaaaatcacaatcgcaattattagatgaaattaatgcagtagttgaataccaagatatgtcttattcgactatagaagactttattaattcagatttagaaaagttaaaatcacatttaaataaaaatcaactcgcttttattcaggcagttgaaaaacattataaattgtatgtcaatatgttggaaaatggagaaaaacatgccattaatcaacaggaattgaaaaagtggagtgcagaagatgaatatgcaacatttgttaagacagtacacattgcattaatgcatgattggttaaaaggtaaaataattgttgattcattagggctacactcaaataaccaaaggcatacaaatgaaaccgaacaaattttaacttcttcagacttaatattgtatgtaagttattttaatcattcatttactgataatgacaaagcgtttatagaacacatgaaagatatgaaccagttgaatgaaaaccaagcatttaaaatggtaattaatgctgctgatttagcagaaagtcaagatgatcttgaagcagttgaaacatatgtatcagatgcattaagacaagtacacttacaatcagacatttttgctgtatcaagtcgaaatgcattgcaagctgaagataagggcattgatcaattaaaacaaagcatacaacaatttgttgatgttgaatctaaatcaattttagaacaacaaatgattcatcagcttcaacaaatggatcgttcttatgtagagatgattacagaatttgaaacaaataaagctgatatttcacgtcgccaacaaaggttaacagattataaagataaacagcgtttacaacatcaattaattgatgcgacgttacaacatacagacaacgaagttgaagaacaagtttatcatttaaatgcccgtttaaaactacaactacttgacgatgttaaatcagtgtttaattctcaaatgacgcaaaatagtgattttaatgaagaaaagaaagtgtctacgagagtatacttagatcaaattcatcaacgattgtttttagagcaatctttaattacagaacgtataaaaaaatactttaataagcaactcactgagcaaattgcaccaatcgttcaacaattagcagatttacatgtcattattaatcctcagtttaactttgaatcagctaatatagagcaaccattattgcacatcgatttcaatgatatgctaaatgcattgcctaaacaattaacaaaacgtaaaattttgaatccaaatgggcaaagagatatacatgaatcaatttgtcaaagtacgttaggattattacaaccacaaatgggattattgaggcaacagcttgaattatatgtaaagcaaatggctgtagaagctgaatcgcaatttgaaagttttgaagctaatattcaaacgcaaataaacgatttattagcatttgatttagatacaacacttatcaatcaattgaaagataaacatcaacaactgaaaactattttatattaa

SEQ ID NO: 417140 - DNA, 879 bp, Staphylococcus aureus
atgcctaataaaatattacttgtagatggtatggcgctattatttagacatttctatgctacaagtcttcataaacaatttatgtacaattcacaaggtgtacctacaaatggaatacaaggatttgtgcgtcatatcttttcggcaatacatgaaatacgccctacacatgtagctgtatgttgggatatgggacaatcaacttttagaaatgatatgtttgatggttataagcaaaatcgttctgcaccaccagaagaattgataccacaatttgattatgttaaagaaatttcagagcaatttggctttgtaaatattggcgttaaaaactatgaagcggatgatgttataggtacattagcacaacaatattcaactgataacgatgtctatattattacgggcgacaaagatttactgcaatgtattaatgacaatgttgaagtttggctaattaaaaaaggttttaacatttataatagatatacattacatcgttttaacgaagaatatgcccttgaaccacaacaactaatcgatattaaagcgtttatgggtgatacagcagatggatatgcgggtgttaaaggtattggcgagaaaacggctattaagttaattcagcaatatcaaagcgttgaaaatgtggttgaaaacattgatgcattatcagctggtcaacgtaataagataaatgacaatttagatgaactatatttatcgaagcgacttgctgaaattcacacacaagtaccaattgatagtgaatcgctttttgagaaaatgtcatttgcaacaacacttaatcatattttatcaatttgtaacgaacatgaattacatgtttcaggaaaatatatttcatcccatttttaa

SEQ ID NO: 417141 - DNA, 1119 bp, Staphylococcus aureus
atgttagttgcagtagtcaaagaattaaaacaaggtgaaggacgtgtagcttgcacacccgaaaatgtgcgtaagttaacggatgcaggacataaagtaattgttgaaaaaaatgctggcattggttcaggattttctaacgatatgtatgaaaaagaaggcgctaagatcgtaactcatgaacaagcatgggaagctgatcttgttatcaaagtaaaagaacctcatgaaagcgaatatcaatatttcaaaaagaatcaaattatctggggatttttacatttagcatcttcaaaagaaatagtagaaaaaatgcaagaagttggtgtaactgcgattagtggtgaaaccattataaaaaatggaaaagccgaattattagcgccaatgagtgctatagcaggtcaacgctcagcaattatgggagcttattactctgaagcacaacatggtggccaaggtactttagtgactggtgtacatgaaaatgtggatatacctggtagtacatatgtgattttcggtggtggtgtagctgcaacaaacgcagccaatgttgcattaggactcaatgctaaagtaatcattatcgagttaaacgatgaccgcattaaatatcttgaagatatgtatgcagacaaagatgtcacagtagtcaaatcaacaccagaaaatttagcagaacaaattaaaaaagcagatgtatttatttctacaattttaattcctggtgcaaaaccaccaaaattagttacacgtgagatggttaaatcaatgaaaaaaggttcagttttaatcgatatagctattgatcaaggtggaaccattgaaacaatcaaaccaactacaatttctgatccagtgtatgaagaagaaggtgtgattcattatggagtaccaaatcaaccaggagcagtcccaagaacttcaacaatggcattagcacaaggaaatattgattatatattagaaatttgtgacaaagggttagagcaagcaattaaagataatgaagcgttaagtacaggtgtaaacgtatacaaaggacaagtgacaaaccagggattagcttcatcacatgatttagattttaaagaaatattaaatgttatcgaatag

SEQ ID NO: 417142 - DNA, 1041 bp, Staphylococcus aureus
atgacaaccaacacagttacattacaaacagcacatattgtaagtttaggagatatcgaagaagctaaagcaagcattaaaccatttattcgtcgaacaccgctaattaaatcaatgtatttaagccaaagtataactaaagggaatgtatttctaaaattagaaaatatgcaattcacaggatcttttaaatttagaggcgctagcaataaaattaatcacttaacagatgaacaaaaagaaaaaggtattatcgcagcatctgctgggaaccatgcacaaggtgttgctttaacagctaaattattaggcattgatgcaactatcgtaatgcctgaaacagcaccacaagcgaaacaacaagcaacaaaaggctatggggcaaaggttattttaaaaggtaaaaactttaacgaaactagactttatatggaagaattagcgaaagaaaatggcatgacaatcgttcatccatatgacgataagtttgtaatggcaggacaaggaacaattggtttagaaattttagatgatatttggaatgtgaatacagtcatcgtaccagttggcggtggaggattaattgcaggtattgccaccgcattaaaatcatttaacccttcaattcatattatcggtgttcaatctgagaatgttcatggtatggctgagtctttctataagagagatttaactgaacatcgagtggatagcacaatagcagatggttgtgatgtaaaagttcctggtgaacaaacatatgaagtagttaaacatttagtagatgagtttattcttgttactgaagaagagattgaacatgctatgaaagatttaatgcagcgtgccaaaattattactgaaggtgcaggcgcattaccaacagctgcaattttaagtggaaaaataaacaataaatggcttgaagataaaaatgttgttgcattagtttcaggcgggaatgttgacttaactagagtttcaggtgtcattgaacatggactgaatattgcagatacaagcaagggtgtggtaggttaa

SEQ ID NO: 417143 - DNA, 1323 bp, Staphylococcus aureus
atgtcaaatggtaaagaattacaaaaaaatataggtttcttctcagcgtttgctattgttatggggacagttattggttcaggagtattctttaaaatatcaaacgtaacagaagtaacaggaacagcaggaatggccttgtttgtatggttcctaggcggcatcattaccatttgtgcggggttaacagcagcagaacttgctgctgcaatccctgaaacaggtggcttaacgaagtatatagaatatacatacggtgatttctggggcttcctatcaggttgggcgcaatcatttatttattttccagctaacgtagcagcattgtctatcgtatttgcgacacagctaattaatttattccatttatctataggttcgttaataccaatagcaatcgcatctgcgttatctattgtgttgataaatttcctaggttcaaaagcaggcggaattttacaatcagttactttagtaattaaactgattccaatcatcgttattgtaatttttggtatttttcaatctggagatatcactttttcattaattccaactacaggtaattcaggaaatggtttctttacagcaattggtagtggtttattagcaactatgtttgcatatgatggttggattcatgtaggaaatgttgcgggggaacttaaaaatcctaaacgcgatttacctttagcgatttcagttggtatcggttgtattatggctgtgtatttattaattaacgctacattcttattaacgttgccaatagaactacttgctggtaatttaaatgcagcttcagatacatcaaaaatattatttggtgaaaatggcggtaaaattattacaatcggtatattaatttctgtttatggtacgatcaatggctatactatgactggtatgcgcgtaccatatgcaatggctgaaagaaaattattgccatttagccacttattcgcaaaattaacaaaatctggcgcaccatggtttggcgcaattatacaacttataatcgctatcatcatgatgtcaatgggagcatttgatacgattacaaatatgttaatctttgttatttggttgttctattgtatgtcatttgtagcggtaataattttaagaaaacgtgaaccaaatatggagcgaccatataaagtaccgttatatccgattatacctttaattgctattttggcaggatcatttgtattaattaatacactgtttacacaatttatattagcaatcattggaattctaataacagcacttggtataccagtttattactataagaagaaacaaaaagcagcataa

SEQ ID NO: 417144 - DNA, 1392 bp, Staphylococcus aureus
atggaaaagccgtcaagagaggcatttgaaggcaataataagttgttaataggaattgttttaagtgtaataacgttttggctatttgcacaatcattggttaatgttgtaccaatacttgaagatagtttcaatacagatattggaacggttaatatcgccgttagtataactgctttattttcaggaatgtttgtagtaggagcaggtggtcttgctgataaatatggcagaattaaactcacgaacattggtattatcttaaatatattgggttcattattaatcattatttcaaatattcctttattacttattataggaagattaattcaaggactttcagcagcatgtattatgcctgcaactttgtctattattaagtcatattacattgggaaagatagacaacgcgctttaagttattggtcaattggctcatggggcggctctggtgtttgttcattttttggaggtgcagttgcaacgcttttaggttggcgttggattttcatcctatcaattataatttcattaattgcactgtttcttattaaaggcacacctgaaactaaatctaaatcgatttctctaaataaatttgacattaaaggtctggttcttttagtcattatgctcctcagtttaaatattttaattactaaaggatcagaattaggtgtaacctcacttctttttattactttattagctattgcaattggatcttttagtttatttatagttcttgaaaagcgtgctacaaatcctttaatcgattttaaattatttaaaaataaagcttacacaggtgcaacagcttcaaactttttgttaaatggtgttgcaggaacattaatagtagccaacacatttgttcaaagaggtttaggatattcttcattgcaagcaggaagtttatcaatcacttatttagtaatggtactaattatgattcgtgttggtgaaaagttacttcaaacactcggatgcaagaaaccaatgttaattggaacaggagttcttattgtcggagaatgtctcatttcattaactttcttgccagaaatattctatgtcatttgttgtattataggttatttattctttggtttaggactagggatatatgctacaccatcaacagatacagcaattgcaaatgcaccgttagaaaaagtaggcgttgctgcaggtatctataaaatggcttctgcattaggtggagcatttggcgtcgcattgagtggtgcagtatatgcaatcgtatcaaatatgacaaacatttatacaggtgcaatgattgcattatggttaaatgcaggtatgggaatattatcattcgttatcattttgttacttgtgcctaaacaaaacgacactcaattatga

SEQ ID NO: 417145 - DNA, 10914 bp, Staphylococcus aureus
gtgaattatcgtgataaaattcaaaagtttagtattcgtaaatatacagttggtacattttcaactgtcattgcgacattggtatttttaggattcaatacatcacaagcacatgctgctgaaacaaatcaaccagcaagcgtggttaaacagaaacaacaaagtaataatgaacagactgagaatcgagaatctcaagtacaaaattctcaaaattcacaaaatggtcaatcattatctgctactcatgaaaatgagcaaccaaatattagtcaagctaatttagtagatcaaaaagtagcgcaatcatctactactaatgatgaacaaccagcatctcaaaatgtaaatacaaagaaagattcggcaacggctgcgacaacacaaccagataaagaacaaagtaagcataaacaaaacgaaagtcaatctgctaataaaaatggaaacgacaatagagcggctcatgtagaaaatcatgaagcaaatgtagtaacagcttcagattcatctgataatggtaacgtacaacatgaccgaaatgaattacaagcattttttgatgcaaattatcatgattatcgttttattgaccgtgaaaatgcagattctggcacatttaactatgtaaaaggcatttttgacaagattaatactttattaggcagtaatgatccaattaacaataaagacttgcaacttgcatacaaagaattggaacaagctgttgctttaattcgtacaatgcctcaacgtcaacaaactagccgtcgatcaaacagaattcaaacgcgttctattgagtctagagcagctgaaccgaggtcagtatcagactatcaaaatgcaaactcatcatattatgttgaaaatgctaatgatggttcgggctatcctgttggtacatatatcaatgcttctagtaaaggggcgccatataatttaccaactacaccatggaatacattgaaggcctctgactcaaaggaaattgctcttatgacagcgaaacaaactggagacgggtaccaatgggttattaagtttaataaaggacatgctccacatcaaaatatgattttctggtttgcattaccagcagaccaagtgccagtaggaagaactgactttgtaacagttaattcagatggaacaaatgtacaatggagtcatggagcaggagcaggtgcaaataaaccacttcaacaaatgtgggaatatggagtaaatgatcctcatcgttcacatgactttaaaataagaaatagaagtggccaagtaatatatgactggccaactgtccatatttattctttagaagatttatctagagcgagtggttattttagtgaagctggagcgacacctgctactaaagcttttggtagacaaaattttgaatatattaatggtcaaaaacctgctgaatcaccgggtgttcctaaagtttatactttcatcggtcaaggtgatgcaagttatacaatttcatttaaaacacaaggttcaactgttaataaattgtactatgcagcaggtgggcgtgctttagagtacaatcaattatttatgtacagtcaactatacgtcgaatcaacgcaagaccatcaacaacgtcttaatggtttaagacaagtggttaatcgtacatatcgcataggtacaactaaacgtgtagaagtgagtcaaggaaatgtacaaacgaaaaaggtattagaaagtacaaacctaaatatagatgattttgttgatgatcctttaagttatgttaagacgccgagtaataaagtgttaggattttattcgaataatgcaaatactaatgcttttagaccgggtggagcccaacaattaaatgaatatcaattaagtcaattatttactgatcaaaaattacaagaagcagcaagaactagaaacccaataagattaatgattggtttcgactatcctgatgcttatggtaatagtgaaactttagttcctgttaacttaacggtattacctgaaatccaacataatattaaattctttaaaaatgacgatactcaaaatattgctgaaaaaccattttcaaaacaagctgggcatccagttttctatgtatatgcaggtaaccaagggaatgcttccgtgaatttaggtggtagcgtaacatctattcaaccattacgtattaatttaacaagtaatgagaattttacagataaagattggcaaattacaggtattccgcgtacattacacattgaaaactcgacaaatagacctaataatgctagagaacgtaacattgaacttgttggtaatttattaccaggggattactttggcacgatacgttttggacgtaaagaacaattatttgaaattcgtgttaaaccacatacaccaacaattacaacgacagctgagcaattaagaggtacagcattacaaaaagtgcctgttaatatttcgggaataccgttggatccatcggcattggtctatttagttgcaccaacaaatcaaactacgaatggtggtagtgaggcagatcaaataccatctggttatacgatacttgcgactggtacacctgatggggtccataacacaattactatacaaccaaaagattacgtagtatttataccaccagtaggtaaacaaattagagcagtagtttattataataaattagttgcatctaatatgagtaatgctgttactattttgccagatgacattccaccaacaatcaataatcctgttggaataaatgccaaatactatcgaggcgacgaagtcaactttacaatgggtgtctctgatagacattctggattaaaaagtacaactattacgacattgccaagtggttggacatcaaatttaactaaatccgacaacaaaaacggctcattagctattacaggtagagtgagtatgaatcaggcatttaacagtgatattacatttaaagtatcagcgacagataatgtcaataatacgacaaatgatagtcaatctaaacatgtgtcaattcatgtaggtaaaattagtgaagatgctcatccgattgtattaggaaatactgagaaagttgtagtagtcaatccaactgctgtatctaatgatgaaaagcaaagcataattactgcctttatgaataaaaaccaaaatataagaggatatttagcatcaactgatccagtaactgtcgataataatggtaacgtcacattacattaccgtgatggctcatcaacaacgcttgatgctacaaatgtgatgacatacgaaccagttgtgaaatctgaatatcaaactgccaatgctgctaaaacagcaacggtaacgattgctaaaggacaatcatttaatattggtgatattaaacaatattttactttaagtaatggacaagctattccaaatggcacatttacaaatattacatctgatagaactattccaactgcacaagaagttagtcaaatgaatgcaggtacgcagttatatcatatagttgcttcaaatgcatatcataaagatagtgaagacttctatattagtttgaaaatcatcgatgtgaaacaaccagaaggcgatcaacgtgtatatcgtacatcaacatatgatttaactactgatgaaatctcaaaagtaaaacaagcatttattaatgcaaatagagatgtaattacgcttgccgaaggtgatatttcagttacaaatacacctaatggtgctaatgtaagtactattacagtaaatattaataaaggtcgattaacgaaatcattcgcgtcaaacctagctaatatgaatttcttgcgttgggttaatttcccacaagattatacagtgacatggacgaatgcaaaaattgcaaatcgaccaactgatggtggtctatcttggtctgatgaccataaatcattaatttatcgttatgatgctacattaggcacacaaattacaactaatgatattttaacgatgctaaaagcgactactacagtgcctggattgcgtaataatattactggtaatgaaaaaacacaagcagaagcaggtggaagaccaaactatagaacaactggttattcgcaagcaaatgcaacatctgatggccaaagacaatatacgttgaatggtcaagtgattcaaatattggacatcatcaacccttcaaacggttatggtgggcaacctgttacaaattcaaatactcgtgcaaaccatagtaactcaactgttgttaacgtaaacgaaccggcagctaatggtgctggcgcatttacaattgatcatgtggtaaaaaataatactacgcataatgcagctgatgcggtatacaaagcgcagttatacttatctccatatggaccaaaacaatatgttgaacatttaaatcaaaatacgggaaatactaccgatgctattaacatttattttgtacctagtgatctagtaaatccaactatttcagtaggtaattacgcaaatcatcaagtattctctggtgaaacatttaccaatacgattacagcgaatgataactttggtgtgcaatctgtaactgtaccaaatacatcacaaattacaggcactgttgacaataataatcagcacgtttctgcaacggcaccaaatgtgacatcagaaactactaagacaatcaatttattagcaactgatacaagcggcaatacagctacaacttcgttcaatgtaacagtgaaacctttacgtgataaatatcgagttggtacttcatcaacggctgctaatcctgtgagaattgccaatatttcgaataatgcgacagtatcacaagctgatcaaacagcaattattaattcattgacgtttactgaaacagtaccaaatagaagttatgcaagagcaagtgcaaatgaaatcactagtaaaacagtgagtaatgtgagtcgtacaggaaataacgcacaagttactgtaactgttacttatcaagatggaacaacatcaacagtgactgtacctgtaaagcatgtcattccagaaatcgttgcacattcgcattacactgtacaaggccaagacttcccagcaggtaatggttctagtgcatcagattactttaagttatctaatggtagtgccattccagatgcaacgattacatgggtaagtggtcaagcgccaaataaagataatacacgtattggtgaagatataacagtaactgcacatatcttaattgatggcgaaacaacgccgattacgaaaacagcaacatataaagtagtaagaactgtaccgaaacatgtctttgaaacagctagaggtgtattatacccaggtgtttcagatatgtatgatgcgaaacaatatgttaagccagtgaataattcttggtcgacaaatgcgcaaaatatgaatttccaatttgtgggaacttatggacctaacaaagatgttgtaggtatatcaacgcgtcttattagaatcacatatgataatagacaaactgaagaattaactattttatctaaagttaaaccagacccaccgagaattgatggcaactctgtaacatataaagcaggtcttacaaaccaagaaattaaagttaataatgtattaagtaactcgactgttaaattgtttaaagctgacaatacgccattaaatgttacaaatattacccatggcagtggctatagttcggttgtgacagtaggtgacgcgttaccaaatggcggaattaaagcaaaatcttcaatttcaatgaacaatgtgacgtatacgacgcaagacgaacatggtcaagttgttacagtaacaagaaatgaatctgttgattcaaatgatagtgcttctgttacagtaacaccacaattacaagcaactactgaaggcgctgtatttattaaaggtggcgacggttttgatttcggacacgtagaaagatttattcaaaacccaccacatggtgcaacggtcgcatggcatgatagtccagatacatggaagaatacagtcggcaacactcataaaactgcggttgtaacattacctagtggtcaaggtacgcgtaatgttgaagttccagtcaaagtttatccagttgctaatgctaaggcgccatcacgtgatgtgaaaggtcaaaatttgactaatggaacggatgcgataaactacattacatttgatccaaatacaaatacaaatggtatcactgcagcatgggcaaatagacaacaaccaaataaccaacaagcaggcgttcaacatttaaatgtcgatgtcacatatccgggtatttcagctgctaaacgagttcctgtaactgtgaacgtatatcaatttgaattccctcaaacttcttatacaacaacagttggtggcactttagcaagtggtacgcaagcatcaggatatgcacatatacaaaatgctaatggtttaccaacagatggatttacgtataaatggaataatgcagcaacgggtacaaacgatgcaaactgggcagcaatgaataaaccgaatgcggctaaagtcattaatgcgaaatatgatgtcatctataacggacatacttttgcaacatctttaccagcgaaatttgtagtaaaagatgtgcaaccagcgaaaccaactgtcactgaaacagcggcaggagcgatcacaattgcacctggagcaaaccaaacagtgaatacacatgccggtaacgtaacgacgtatgctgataaattagttattaaacgcaatggtaacgttgtgacgacatttacacgtcgcaataatacgagtccatgggtgaaagaagcatctgcagcaactgtagcaggtattgctggaactaataatggtattactgttgcagcaggtactttcaaccctgctgatacaattcaagttgttgcaacgcaaggaagcggagagacagtaagtgatgagcaacgtagtgatgatttcacagttgtcgcaccacaaccgaaccaagcgactactaagatttggcaaaatggtcatattgatatcacgcctaataatccatcaggacatttaattaatccaactcaagcaatggatattgcttacactgaaaatgtgggtaatggtgcagaacatagtaagacaattaatgttgttcgtggtcaaaataatcaatggacaattgcgaataagcctgactatgtaacgttagatgcacaaactggtaaagtgacgttcaatgccaatactataaaaccaaattcatcaatcacaattactccgaaagcaggtacaggtcactcagtaagtagtaatccaagtacattaactgcaccggcagcacatactgtcaacacaactgaaattgtgaaagattatggttcaaatgtaacagcagctgaaattaacaatgcagttcaagttgctaataaacgtactgcaacgattaaaaatggcacagcaatgcctactaatttagctggtggtagcaaaacgacgattcctgtgacagtaacttacaatgatggtagtactgaagaagtacaagagtccattttcacaaaagcggataaacgtgagttaatcacagctaaaaatcatttagatgatccagtaagcactgaaggtaaaaagccaggtacaattacgcagtacaataatgcaatgcataatgcgcaacaacaaatcaatactgcgaaaacagaagcacaacaagtgattaataatgagcgtgcaacaccacaacaagtttctgacgcactaactaaagttcgtgcagcacaaactaagattgatcaagctaaagcattacttcaaaataaagaagataatagccaattagtaacgtctaaaaataacttacaaagttctgtgaaccaagtaccatcaactgctggtatgacgcaacaaagtattgataactataatgcgaagaagcgtgaagcagaaactgaaataactgcagctcaacgtgttattgacaatggcgatgcaactgcacaacaaatttcagatgaaaaacatcgtgttgataacgcattaacagcattaaaccaagcgaaacatgatttaactgcagatacacatgccttagagcaagcagtgcaacaattgaatcgcacaggtacaacgactggtaagaagccggcaagtattactgcttacaataattcgattcgtgcacttcaaagtgacttaacaagtgctaaaaatagcgctaatgctatcattcagaagccaataagaacagtgcaagaggtacaatctgcgttaacaaatgtaaatcgtgtcaatgagcgattaacgcaagcaattaatcaattagtacctttagctgataatagtgctttaagaactgctaagacgaaacttgatgaagaaatcaataaatcagtaactactgatggtatgacacaatcatcaatccaagcatatgaaaatgctaaacgtgcgggtcaaacagaatcaacaaatgcacaaaatgttattaacaatggtgatgcgactgaccaacaaattgccgcagaaaaaacaaaagtagaagaaaaatataatagcttaaaacaagcaattgctggactaactccagacttggcaccattacaaactgcaaaaactcagttgcaaaatgatattgatcagccaacgagtaagactggtatgacaagcgcatctattgcagcatttaatgaaaaactttcagcagctagaactaaaattcaagaaattgatcgtgtattagcctcacatccagatgttgcgacaatacgtcaaaacgtgacagcagcgaatgccgctaaatcagcacttgatcaagcacgtaatggcttaacagtcgataaagcgcctttagaaaatgcgaaaaatcaactacaacatagtattgacacgcaaacaagtacaactggtatgacacaagactctataaatgcatacaatgcgaagttaacagctgcacgtaataagattcaacaaatcaatcaagtattagcaggttcaccgactgtagaacaaattaatacaaatacgtctgcagcaaatcaagctaaatctgatttagatcatgcacgtcaagctttaacaccagataaagcgccgcttcaaactgcgaaaacgcaattagaacaaagcattaatcaaccaacggatacaacaggtatgacgaccgcttcgttaaatgcgtacaaccaaaaattacaagcagcgcgtcaaaagttaactgaaattaatcaagtgttgaaaggcaacccaactgtccaaaatatcaatgataaagtgacagaggcaaaccaagctaaggatcaattaaatacagcacgtcaaggtttaacattagatagacagccagcgttaacaacattacatggtgcatctaacttaaaccaagcacaacaaaataatttcacgcaacaaattaatgctgctcaaaatcatgctgcgcttgaaacaattaagtctaacattacggctttaaatactgcgatgacgaaattaaaagacagtgttgcggataataatacaattaaatcaggtcaaaattacactgacgcaacaccagctaataaacaagcgtatgataatgcagttaatgcggctaaaggtgtcattggagaaacgactaatccaacgatggatgttaacacagtgaaccaaaaagcagcatctgttaaatcgacgaaagatgctttagatggtcaacaaaacttacaacgtgtgaaaacagaagcaacaaatgcgattacgcatgcaagtgatttaaaccaagcacaaaagaatgcattaacacaacaagtgaatagtgcacaaaacgtgcaagcagtaaatgatattaaacaaacgactcaaagcttaaatactgctatgacaggtttaaaacgtggcgttgctaatcataaccaagtcgtacaaagtgataattatgtcaacgcagatactaataagaaaaatgattacaacaatgcatacaaccatgcgaatgacattattaatggtaatgcacaacatccagttataacaccaagtgatgttaacaatgctttatcaaatgtcacaagtaaagaacatgcattgaatggtgaagctaagttaaatgctgcgaaacaagaagcgaatactgcattaggtcatttaaacaatttaaataatgcacaacgtcaaaacttacaatcgcaaattaatggtgcgcatcaaattgatgcagttaatacaattaagaaaaatgcaacaaacttgaatagtgcaatgggtaacttaagacaagctgttgcagataaagatcaagtgaaacgtacagaagattatgcggatgcagatacagctaaacaaaatgcatataacagtgcagtttcaagtgccgaaacaatcattaatcaaacaacaaatccaacgatgtctgttgatgatgttaatcgtgcaacttcagctgttacttctaataaaaatgcattaaatggtgatgaaaaattagcacaatctaaaacagatgctgcaagagcaattgatgcattaccacatttaaataatgcacaaaaagcagatgttaaatctaaaattaatgctgcatcaaatattgctggcgtaaatattgttaaacaacaaggtacagatttaaatacagcgatgggtaacttgcaaggtgcaatcaatgacgaaaaaacgacattaaatagtcaaaattatcaagatgcgacaccaagtaagaaaacagcctacacaaatgcggtacaagctgcgaaagatattttaaataaatcaaatggtcaaaataaaacgaaagatcaagttactgaagcgatgaatcaagtgaattctgctaaaaataacttagatggtacgcgtttattagatcaagcgaagcaaacagcaaaacagcagttaaataatatgacgcatttaacaactgcacaaaaaaacgaatttaacaaaccaaattaa

SEQ ID NO: 417146 - DNA, 20898 bp, Staphylococcus aureus
atgaatacgttaagacaaagtattgccaacaaagatgcgactaaagcaagtgaagattacgtagatgctaataatgataagcaaacagcatataacaacgcagtagctgctgctgaaacgattattaatgctaatagtaatccagaaatgaatccaagtacgattacacaaaaagcagagcaagtgaatagttctaaaacggcacttaacggtgatgaaaacttagctgctgcaaaacaaaatgcgaaaacgtacttaaacacattgacaagtattacagatgctcaaaagaacaatttgattagtcaaattactagtgcgacaagagtgagtggtgttgatactgtgaaacaaaatgcacaacatctagaccaagctatggctagcttacagaatggtattaacaacgaatctcaagtgaaatcatctgagaaatatcgtgatgctgatacaaataaacaacaagagtatgataatgctattactgcagcgaaagcgattttaaataaatcgacaggtccaaacactgcgcaaaatgctgttgaagcagcattacaacgtgttaataatgcgaaagatgcattgaatggtgatgcaaaattaattgcagctcaaaacgcagcgaaacaacatttaggtactttaacgtatatcactacagctcaacgtaatgatttaacaaatcaaatttcacaagctacaaacttagctggtgttgaatctgttaaacaaaatgcgaatagtttagatggtgctatgggtaacttacaaacggctatcaacgataagtcaggaacattagcgagccaaaacttcttggatgctgatgagcaaaaacgtaatgcatacaatcaagctgtatcagcagccgaaaccattttaaataaacaaactggaccgaatacagcgaaaacagcagtcgaacaagcacttaataatgttaataatgcgaaacatgcattaaatggtacgcaaaacttaaacaatgcgaaacaagcagcgattacagcaatcaatggcgcatctgatttaaatcaacatcaaaaagatgcattaaaagcacaagctaatggtgctcaacgcgtatctaatgcacaagatgtacaacgtaatgcgactgaactgaacacggcgatgggcacattaaaacatgccatcgcagataagacgaatacgttagcaagcagtaaatatgtcaacgccgatagcactaaacaaaatgcttacacaactaaagttaccaatgctgaacatattattagcggtacgccaacggttgttacgacaccttcagaagtaacagctgcagctaatcaagtaaacagcgcgaaacaagaattaaatggtgacgaaagattacgtgtagcaaaacaaaacgccaatactgctattgatgcattaacgcaattaaatactcctcaaaaagctaaattaaaagaacaagtgggacaagccaatagattagaagacgtacaatctgttcaaacaaatggacaagcattgaacaatgcaatgaaaggcttaagagatagtattgctaacgaaacaacagtcaaagcaagtcaaaactatacagacgcaagtccgaataaccaatcaacatataatagcgctgtgtcaaatgcgaaaggtatcattaatcaaactaacaatccgactatggatgctagtgcgattacccaagctgcaacacaagtgaataatgctaaaaatggtttaaacggtgctgaaaacttaagaaatgcacaaaacactgctaagcaaaacttaaatacgttatcacacttaacaaataaccaaaaatctgccatctcatcacaaattgaccgtgcaggtcatgtgagtgaggtaacagctgctaaaaatgcagcaactgagttaaacacgcaaatgggcaacttggaacaagctatccatgatcaaaacacagttaaacaaggtgttaacttcactgatgcagataaagctaaacgtgatgcgtatacaaatgcggtaagcagagctgaagcaattctgaataaaacgcaaggtgcaaatacgtctaaacaagatgttgaagcggctattcaaaatgtttcaagtgctaaaaatgcattgaatggtgatcaaaacgttacaaatgcgaagaatgcagctaaaaatgcattaaataacttaacgtcaattaataatgcacaaaaacgtgacttaacaactaaaattgatcaagcaacaactgtagctggtgttgaagctgtatctaatacaggtacacaattgaatacagcgatggctaacttgcaaaatggtattaatgataaagcaaatacactagcaagtgaaaactatcatgatgctgattcagataagaaaactgcttatactcaagccgttgcgaacgcagaaaatattttaaataaaaatagtggatcaaatttagataaagctgccgttgaaaacgcgttgtcacaagttgctaatgcgaaaggtgccctaaatggtaaccataatttagagcaagctaaatcaaatgcaaacactactataaacggacttcaacatttaacaactgctcaaaaagataaattgaaacaacaagtgcaacaagcacaaaatgttgcaggtgtagatactgttaaatcaagtgccaacacattaaatggtgctatgggtacgttaagaaatagcattcaagataacacagctacgaaaaatggccaaaactatcttgatgctacaggaagtaacaaaacaaactataacaatgctgttgatagtgctaatggtgtcattaatgcaacaagcaatccaaatatggatgctaatgcaattaaccaaatcgctacacaagtgacatcaacgaaaaatgcattagatggtacacataatttaacgcaagcgaaacaaacagcaacaaatgccatcgatggtgctactaacttaaataaagcgcaaaaagatgcgttgaaagcacaagtgacaagtgcgcaacgtgttgcaaatgtaacaagtatccaacaaactgcaaatgaacttaatacagctatgggtcaattacaacatggtattgatgatgaaaatgcaacaaaacaaactcaaaaatatcgtgacgctgaacaaagtaagaaaactgcttatgatcaagctgtagctgctgcgaaagcaattttaaataaacaaacaggttcaaattcagataaagcagcagttgaccgtgcattacaacaagtaacaagtacgaaagatgcattgaatggtgatgcaaaactggcagaagcgaaagcggcagctaaacaaaacttaggcactttaaaccatattacgaatgcacaacgtactgacttagaaggccaaatcaatcaagcgacgactgttgatggcgttaatactgtaaaaacaaatgccaatacattagacggcgcaatgaatagcttacaaggttcaatcaatgataaagatgcgacattaagaaatcaaaattatcttgatgcggatgaatcaaaacgaaatgcatatacgcaagctgtcacagcggctgaaggcattttaaataaacaaactggtggtaacacatctaaagcagacgttgataatgcattaaatgcagttacaagagcgaaagcggctttaaatggtgctgacaacttaagaaatgcgaaaacttcagcaacaaatacgattgatggtttacctaacttaacacaattacaaaaagacaacttgaagcatcaagttgaacaagcgcaaaatgtagcaggtgtaaatggtgttaaagataaaggtaatacgttaaatactgccatgggtgcattacgtacaagtatccaaaatgataatacgacgaaaacaagtcaaaattatcttgatgcatctgacagcaacaaaaataattacaatactgctgtaaataatgcaaatggtgttattaatgcaacgaacaatccaaatatggatgctaatgcgattaatggcatggcaaatcaagtcaatacaacaaaagcagcgttaaatggtgcacaaaacttagctcaagctaaaacaaatgcgacgaacacaattaacaacgcacatgacttaaaccaaaaacaaaaagatgcattaaaaacacaagttaacaatgcacaacgtgtatctgatgcaaataacgttcaacacactgcaactgaattgaacagtgcgatgacagcacttaaagcagctattgctgataaagaaagaacaaaagcaagcggtaattatgtcaatgctgatcaagaaaaacgtcaagcgtatgattcaaaagtgactaacgctgaaaatatcattagtggtacaccgaatgcgacattaacagtcaatgacgtaaatagtgcggcatcacaagtcaatgcggctaaaacagcattaaatggtgataacaacttacgtgtagcgaaagagcatgccaacaatacaattgacggcttagcacaattgaataatgcacaaaaagcaaaattaaaagaacaagttcaaagtgcaactacattagatggtgttcaaactgttaaaaatagttctcaaacgttgaatacagcgatgaaaggcttaagagatagtattgcgaatgaagcaacaattaaagcaggtcaaaactacactgacgcaagtccaaataatcgtaacgagtacgacagtgcagttactgcagcaaaagcaatcattaatcaaacatcgaacccaacgatggaaccaaatactattacgcaagtaacatcacaagtgacaactaaagaacaggcattaaatggtgcgcgaaacttagctcaagctaagacaactgcgaaaaacaacttgaataacttaacatcaattaacaatgcacaaaaagatgcgttaacgcgtagcattgatggtgcaacaacagtagctggtgtaaatcaagaaactgcaaaagcaacagaattaaataacgcaatgcatagtttacaaaatggtatcaatgatgagacacaaacaaaacaaactcagaaatacctagatgcagagccaagtaagaaatcagcttatgatcaagcagtaaatgcagcgaaagcaattttaacaaaagctagtggtcaaaatgtagacaaagcagcagttgaacaagcattgcaaaatgtgaacagtacgaagacggcgttgaacggtgatgcgaaattaaatgaagctaaagcagctgcgaaacaaacgttaggtacattaacacacattaataatgcacaacgtacagcgttagataatgaaattacacaagcaacaaatgttgaaggtgttaatacagttaaagccaaagcgcaacaattagatggtgctatgggtcaattagaaacatcaattcgtgataaagacacgacgttacaaagtcaaaattatcaagatgctgatgatgctaaacgaactgcttattctcaagcagtaaatgcagcagcaactattttaaataaaacagctggcggtaatacacctaaagcagatgttgaaagagcaatgcaagctgttacacaagcaaatactgcattaaacggtattcaaaacttagatcgtgcgaaacaggctgctaacacagcgattacaaatgcttcggacttaaatacaaaacaaaaagaagcattaaaagcacaagtaacaagtgcaggacgtgtatctgcagcaaatggtgttgaacatactgcgactgaattaaatactgcgatgacagctttaaagcgtgccattgctgataaagctgagacaaaagctagtggtaactatgtcaatgctgatgcgaataaacgtcaagcatatgatgaaaaagttacagctgccgaaaatatcgttagtggtacaccaacaccaacgttaacaccagcagatgttacaaatgcagcaacgcaagtaacgaatgctaagacgcagttaaacggtaatcataatttagaagtagcgaaacaaaatgctaacactgcaattgatggtttaacttctttaaatggtccgcaaaaagcaaaacttaaagaacaagtgggtcaagcgacgacgttgccaaatgttcaaactgttcgtgataatgcacaaacattaaacactgcaatgaaaggtctacgagatagcattgcgaatgaagcaacgattaaagcaggtcaaaactacacagatgcaagtcaaaacaaacaaactgactacaacagtgcagtcactgcagcaaaagcaatcattggtcaaacaactagtccatcaatgaatgcgcaagaaattaatcaagcgaaagaccaagtgacagctaaacaacaagcgttaaacggtcaagaaaacttaagaactgcgcaaacaaatgcgaagcaacatttgaacggcttaagtgacttaactgacgctcaaaaagatgcagtgaaacgtcaaatcgaaggtgcaacgcatgttaatgaagtaacacaagcacaaaataatgcggatgcattaaatacagctatgacgaacttgaaaaatggtattcaagatcagaatacgattaagcaaggtgttaacttcactgatgccgacgaagcgaaacgtaatgcatatacaaatgcagtgacgcaagctgaacaaattttaaataaagcacaaggtccaaatacttcaaaagacggtgtcgaaactgcgttagaaaatgtacaacgtgctaaaaacgaattgaacggtaatcaaaatgttgcgaacgctaagacaactgcgaaaaatgcattgaataacctaacatcaattaataatgcacaaaaagaagcattgaaatcacaaattgaaggtgcgacaacagttgcaggtgtaaatcaagtgtctacaacggcatctgaattaaatacagcaatgagcaacttacaaaatggtattaatgatgaagcagctacaaaagcagctcagaaatatactgatgcagatagagaaaaacaaactgcatacaatgacgctgtaacagcagctaaaacgttattagataaaacagctggttcaaatgacaataaagcagctgttgaacaagcattacaacgtgtgaatactgctaaaacagcattaaatggtgacgcgcgattaaatgaagcgaagaacacagctaaacaacaagtagcgacaatgtcacacttaactgatgctcaaaaagcaaacttaacatcgcaaatcgaaagtggtacgactgttgcaggtgttcaaggtattcaagctaatgccggtactttagatcaagcaatgaatcaattaagacaaagtattgcttctaaagatgcgactaaatcaagcgaagattatcaagacgcgaatgcagatttacaaaatgcatacaatgatgcggtaactaatgctgaaggtattattagtgcaacgaataaccctgaaatgaatcctgatacaattaaccaaaaagcgagccaagtgaacagtgcgaagtctgcattgaacggtgatgaaaaattagcagcagcaaaacaaactgcgaaatcagatatcggtcgtttgacagacttgaacaatgcacaacgaactgcggcaaatgctgaagtggatcaagcaccaaatcttgcagctgtcacagcggctaaaaataaagcaacatcgttaaacacagcgatgggtaatttgaaacatgcacttgctgaaaaggataatacgaaacgtagtgtcaattacacagatgcggatcaaccaaaacaacaagcgtatgatactgcggttacacaagcagaagcaattactaatgctaatggcagcaacgcgaatgaaacacaagttcaagcagcactaaaccaattgaatcaagctaaaaatgacttgaatggtgataataaagttgctcaagcaaaagagtcagcgaaacgtgcattagcttcatatagtaacttgaataatgcgcaatcaactgcagcaactagtcaaattgacaatgcaacgacagtagcaggcgtaactgctgcacaaaatactgcaaatgaattaaatacagcaatgggtcaacttcaaaatggtataaatgaccaagacactgtaaaacaacaagtgaactttacagatgctgaccaaggtaagaaagaagcttacacaaatgctgttacgaatgcacaaggtattttagataaagcacacggtcaaaatatgacaaaagcacaagttgaagcagcattaaaccaagtaacgactgcgaagaatgctttaaacggtgacgcaaatgtaagacaagcgaaatcagatgcgaaagcaaacttaggtacattaacacacttaaataatgcacaaaaacaagatttaacatcacaaatcgaaggcgcaacaacagtcaacggtgtaaatggtgttaaaacgagagcgcaagatttagataacgcaatgcaacgattagagtcagcaatcgcaaataaagatcaaactaaagcgagcgaaaactacatcgacgcagatccaactaagaaaacagcatttgataatgccattacacaagctgaatcttacttaaataaagatcatggtgcgaataaagataagcaagctgttgaacaagcaattcaaagtgtaacgaatgctaagaatgctttaaacggtgacgcgaacttacaacgcgctaaaactgaagctacacaagctatcgataacttgacacatttgaatacaccacaaaaaacagcattaaaacaacaagtgaacgctgcgcaacgtgtatcaggtgtaactgatctgaaaaatagtgctacatcacttaataatgcgatggatcaattaaaacaagcaattgctgatcatgacacaattgtagctggtggtaattacactaacgcaagtcctgataagcaaggtgcttacactgatgcatataatgctgcgaaaaacattgtaaatggttcacctaatgtgattacaaatgcagcagatgttacagcagcaacacaacgtgtcaataatgctgaaacaggtttaaacggtgatacaaacttagcaactgcgaagcaacaagctaaagaagcattacgtcaaatgacgtatttatctgatgcacaaaaacaaagtattactggacaaattgataatgcgactctagtaactggtgtacaaagtgtgaaagataatgcaacaaatcttgacaatgcaatgaatcaacttcgaaatagtattgcgaataaagatgaagttaaagcaagtcaaccatatgttgatgcagatacggataaacaaaatgcatacaacacagctgttacaagtgctgaaaatatcattaatgcaacgagtcagccgacacttgatccatctgcagtaacacaagcagctaatcaagtgaacactaacaaaactgcgcttaatggtgtacaaaacttagcgaataaaaagcaagaaacgactgctaacatcaaccaattaagtcatttaaataatgctcaaaagcaagatttaaatacgcaagtgacaaatgcaccaaatattagcacagtaaatcaagtgaaaactaaagctgaacaattagatcaagcaatggaacgtttaatcaacggaatccaagacaaagatcaagtgaaacaaagtgttaactttacagatgcagatccagaaaaacaaacagcatacaacaatgcggtaactgctgctgaaaatattattaatcaagcaaatggtacaaatgcgaaccaatcacaagttgaagcagcactttcaactgtaacaactactaaacaagcgttgaatggtgatagaaaagtaacagatgctaaaaacaatgcaaaccaaagattatctacgttagataacttaaacaatgcacaaaaaggtgctgttactggaaacatcaatcaagcgcacactgtagctgaagtaacgcaagccattcaaaccgctcaggaactgaatacagcgatgggtaacttgaaaaaaagcttaaatgataaagacactacacttggcagtcaaaactttgcagatgcagatccagagaagaaaaatgcatacaatgaagcggttcgtaatgctgaaaatattttaaataaatctacaggtacaaacgtgcctaaagatcaagttgaagcagctatgaatcaagtgaatacaacgaaagcagcgcttaatggtactcaaaaccttgaaaaagctaaacaacacgcaaatacagcaattgacggtttaagccatttaacaaatgcacaaaaagatgcattaaaacaattggtacaacaatcgactactgttgcagaagcacaaggtaatgaacaaaaagcaaacaatgttgatgcagcaatggacaaattacgtcaaagtattgcagataatgcgacaacaaaacaaaaccaaaattatactgatgcaagtccgaataaaaaggatgcgtacaataatgctgtcacaactgcacaaggtattattgatcaaactacaaatccaactttagatccgactgttatcaatcaagctgctggtcaagtaagcacaactaaaaatgcattaaatggtaatgaaaacctagaggcagcgaaacaacaagcgacacaatcattaggttcattagacaacttaaataatgcgcaaaaacaagctgttactaatcaaattaatggcgcgcatactgttgatgaagcaaatcaaattaaacaaaatgcgcaaaacttaaatacagcgatgggtaacttgaaacaagcgatagctgacaaagatgctacgaaagcaacagttaacttcactgatgcagatcaagcaaaacaacaagcatataacactgctgttacaaatgctgaaaacattatttcaaaagctaatggtggcaatgcaacacaaactgaagttgaacaagcaatccaacaagttaatgcaacaaaacaagcattaaatggtaatgccaacgttcaacatgcgaaagatgaagcaactgctttaattaataactctaacgatcttaatcaagcacagaaagatgcattaaaacaacaagttcaaagtgcaacaactgttgctggtgtaaacgatgttaaacaaacggcgcaagagttaaataatgcaatgacacaattaaaacaaggcattgcagataaagagcaaactaaagctgatggtaactttatcaatgcagatgctgataagcaaaatgcatataaacaagcagtagcgaaagctgaagcattaattagtggtacgcctgatgttgtcgttacacctagcgaaattactgcagcgttaaataaagttacgcaagctaaaaatgatttaaatggtaatacgaacttagcaacggcgaaacaaaatgttcaacaagctattgatcaattgccaaacttgaatcaagcgcaacgtgatgaatacagcaaacaaatcacgcaagcaacacttgtaccaaacgtcaatgctattcaacaagcggcgacaacgcttaatgatgcgatgacacaattgaaacaaggcattgcggataaagcacaaattaaaggtagcgaaaactatcatgatgctgatcctgacaagcaaacagcatatgataatgcagtaacaaaagcagaagaattgttgaaacaaacaacaaatccaacaatggatccaaatacaattcaacaagcattaactaaagtgaaagatacaaatcaagcacttaacggtaatcaaaaattagctgatgccaaacaagctgctaagacaaatcttggtacattagatcatttaaatgatgctcaaaaacaagcgctaacaactcaagttgaacaagcaccagatattgcaacagttaataatgttaagcaaaatgctcaaaatctgaataatgctatgactaacttaaacaatgcattacaagataaaactgagacattaaatagcattaactttactgatgcagatcaagctaagaaagatgcttatactaatgcggtttcacatgcagaaggtattttatctaaagcaaatggcagcaatgcaagtcaaactgaagtggaacaagcgatgcaacgtgtgaacgaagcgaaacaagcattgaatggtaatgacaatgtacaacgtgcaaaagatgcagcgaaacaagtgattacaaatgcaaatgatttaaatcaagcgcaaaaagatgcattaaaacaacaagtcgatgctgcgcaaactgttgcaaatgtaaacacgattaagcaaacagcacaagatttaaatcaagcaatgacacaattgaaacaaggtattgcagataaagaccaaactaaagcaaatggtaactttgtcaatgctgatactgataagcaaaatgcatataacaatgcggtagcacatgctgaacaaatcattagtggtacaccaaatgcaaacgtggatccacaacaagtggctcaagcgttacaacaagtgaatcaagctaagggtgatttaaacggtaaccataacttacaagttgctaaagacaatgcaaatacagccattgatcagttaccaaacttaaatcaaccacaaaaaacagcattaaaagaccaagtgtcgcatgcagaacttgttacaggtgttaatgctattaagcaaaatgctgatgcgttaaataatgcaatgggtacattgaaacaacaaattcaagcgaacagtcaagtaccacagtcagttgactttacacaagcggatcaagacaaacaacaagcatataacaatgcggctaaccaagcgcaacaaatcgcaaatggcataccaacacctgtattgacgcctgatacagtaacacaagcagtgacaactatgaatcaagcgaaagatgcattaaacggtgatgaaaaattagcacaagcgaaacaagaagctttagcaaatcttgatacgttacgcgacttaaatcaaccacaacgtgatgcattaagaaaccaaatcaatcaagcacaagcgttagctacagttgaacaaactaaacaaaatgcacaaaatgtgaatacagcaatgggtaacttgaaacaaggtattgcaaacaaagatactgtcaaagcaagtgagaactatcatgatgctgatgccgataagcaaacagcatatacaaatgcagtgtctcaagcggaaggtattatcaatcaaacgacaaatccaacgcttaacccagatgaaataacacgtgcattaactcaagtgactgatgctaaaaatggcttaaacggtgaagctaaattggcaactgaaaagcaaaatgctaaagatgccgtaagtggaatgacgcatttaaacgatgctcaaaaacaagcattaaaaggtcaaatcgatcaatcgcctgaaattgctacagtgaaccaagttaaacaaacagcaacgagcctagatcatgcaatggatcaattatcacaagctattaatgataaagctcaaacattagcggacggtaattacttaaatgcagatcctgacaaacaaaatgcgtataaacaggcagtagcaaaagctgaagcattattgaataaacaaagtggtactaatgaagtacaagcacaagttgaaagcatcactaatgaagtgaacgcagcgaaacaagcattaaatggtaatgacaatttggcaaatgcaaaacaacaagcaaaacaacaattggcgaacttaacacacataaatgatgcacaaaaacaatcatttgaaagtcaaattacacaagcgccacttgttacagatgtcactacgattaatcaaaaagcacaaacgttagatcatgcgatggaattattaagaaatagtgttgcggataatcaaacgacattagcatctgaagattatcatgatgcaactgcgcaaagacaaaatgactataaccaagctgtaacagctgctaataatatcattaatcaaactacatcgcctacgatgaatccagatgatgttaatggtgcaacgacacaagtgaataatacgaaagttgcattagatggtgatgaaaaccttgcagcagctaagcaacaagctaacaatagacttgatcaattagatcatttaaataatgcgcaaaagcaacagttacaatcacaaattacgcaatcatctgatattgctgcagttaatggccacaagcaaacagcagaaactttaaatacagcaatgggtaacttaattaatgcgattgcagatcatcaagccgttgaacaacgtggtaacttcatcaatgctgatactgataaacaaactgcttataatacagcggtaaatgaagcggcagcaatgattaacaaacaaactggtcaaaatgcgaaccaaacagaagtagaacaagctattactaaagttcaaacaacacttcaagcgttaaatggagatcataatttacaagttgctaaaacaaatgcgacgcaagcaattgatgctttaacaagcttaaatgatcctcaaaaaacagcattaaaagaccaagttacagctgcaactttagtaactgcagttcatcaaattgaacaaaatgcgaatacgcttaaccaagcaatgcatggtttaagacagagcattcaagataacgcagcaactaaagcaaatagcaaatatatcaacgaagatcaaccagagaaacaaaactatgatcaagctgttcaagccgcaaataatattatcaatgaacaaactgcaacattagataataatgcgattaatcaagcagcggcaactgtgaatacaacgaaagcagcattacatggtgatgtgaaattacaaaatgataaagatcatgctaaacaaacggttagtcaattagcacatctaaacaatgcacaaaaacatatggaagatacgttaattgatagcgaaacaactagaacagcagttaagcaagatttgactgaagcacaagcattagatcaacttatggatgcattacaacaaagtattgctgacaaagatgcaacacgtgcgagcagtgcatatgtcaatgcagaaccgaataaaaaacaagcctatgatgaagcagttcaaaatgctgagtctatcattgcaggattaaataatccaactatcaataaaggtaatgtatcaagtgcgactcaagcagtaacatcatctaaaaatgcattagatggtgttgaacgattagctcaagataagcaaactgctggaaattctctaaatcatttagatcaattaacaccagctcaacaacaagcgctagaaaatcaaattaataatgcaacaactcgtgataaagtggctgaaatcattgcacaagcgcaagcattaaatgaagcgatgaaagcattaaaagaaagtattaaggatcaaccacaaactgaagcaagtagtaaatttattaacgaggatcaagcgcaaaaagatgcttatacgcaagcagtacaacacgcgaaagatttgattaacaaaacaactgatcctacattagctaaatcaatcattgatcaagcgacacaggcagtgactgatgctaaaaacaatttacatggtgatcaaaaactagctcaagataagcaacgtgcaacagaaacgttaaataacttgtctaacttgaatacaccacaacgtcaaacacttgaaaatcaaatcaataatgcagcaactcgtggcgaagtagcacaaaaattaactgaagcacaagcacttaaccaagcaatggaagctttacgtaatagcattcaagatcaacagcaaacggaagcgggtagcaagtttatcaatgaagataaaccacaaaaagatgcttaccaagcagcagttcaaaatgcaaaagatttaattaatcaaactaacaatccaacgcttgataaagcacaagttgaacaattgacacaagcagtaacaactgcaaaagataatctacatggtgatcaaaaacttgcagacgataaacaacatgcggttactgatttaaatcaattaaatggtttgaacaatccgcaacgtcaagcactggaaagtcaaataaacaacgcagcaactcgtgatcaagtagcacaaaaattagctgaagcaaaagcacttaatcaagcaatggaagcattacgtaatagtattcaagatcaacaacaaacagaatctggtagcaagtttatcaatgaagataagccacaaaaggatgcataccaagcagcagtacaactagccaaagatttaattaaccaaacaggtaatccaacactcgataaagcacaagttgaacaattaacacaagcagtaacaactgcaaaagataacctacatggtgatcaaaaacttgctcgtgatcaacaacaagcagtaacgactgttaatgcattaccaaacttaaatcatgctcaacaacaagctttaactgatgctataaatgcagcgcctacaagaacagaggttgcacaacatgttcaaactgctactgaacttgatcacgcaatggaaacattgaaaaataaagttaatcaagtgaacacagataaggctcaaccaaattacactgaagcatcaacggataaaaaagaagcagtagaccaagcgttacaagctgcagaaagcattacagatccaactaatggttcaaatgcaaataaagatgctgtagaacaagcattaacgaagctgcaagaaaaagaaaatgagttgaatggtaatgagagagtcgctgaagctaaaacacaagcgaaacaaactattgaccaattaacacatttaaatgctgatcaaattgcaactgctaaacaaaacattgatcaagcgacgaaacttcaaccaatcgctgaattagtagatcaagcaacgcaattgaatcaatctatggatcaattgcaacaagcagttaatgaacatgctaacgttgagcgaactgtagattacacgcaagcagatttagataagcaaaatacttataaacaagctattgcagaagctgaaaatgtattgaaacaaaatgcgaataaacaacaagtggatcaagcacttcaaaacattttaaatgcaaaacaagcattaaatggtgatgaacgtgtagcacttgctaaaacaaatggtaaacatgacattgaccaattaaatgcattaaacaatgctcaacaagatggatttaaaagtcgcatcgatcaatcaaacgatttaaatcaaatccaacaaattgtagatgaggctaaggcgctaaatcgtgcaatgaatcaattgtctcaagaaatcactggcaatgaaggacgtacgaaaggtagtacgaactatgtcaatgcagatacacaagtcaaacaagtatatgatgaagcggttgataaagcgaaacaagcacttgataaatcgacaggtcaaaacttaactgcagaacaagttatcaaattaaatgatgcagtaacggcagcgaaacaggcattaaatggtgaagaaagacttaataatcgtaagtctgaagcattacaaagattggatcaattaacacatctaaacaatgctcaaagacaattagcaatccaacaaattaataatgctgaaacgctaaataaagcatctcgagcaattaatagagcaactaaattagataatgcaatgggtgcagtacaacaatatattgacgaacagcaccttggtgttatcagcagcacaaattacatcaatgcagatgacaatttgaaagcaaattatgataatgcaattgcgaatgcagcacatgagttagataaagtgcaaggtaatgcaattgcaaaagctgaagcagagcaattgaaacaaaatattatcgatgctcaaaatgcattaaatggagaccaaaaccttgcaaatgccaaagataaagcaaatgcgtttgttaattcgttaaatggattaaatcaacagcaacaagatcttgcacataaagcaattaacaatgccgatactgtatcagatgtaacagatattgttaataatcaaattgacttaaatgatgcaatggaaacattgaaacatttagttgacaatgaaattccaaatgcagagcaaactgtcaattaccaaaacgctgacgataatgctaaaacaaacttcgatgatgccaaacgtctagcaaatacattgctaaatagtgataacacaaatgtgaatgatatcaatggcgcaatccaagcagtcaatgatgcaatccataatcttaatggtgatcaacgactacaagatgctaaagaaaaggcaattcaatctattaatcaagctttagctaataagctaaaagaaatcgaagcttcaaatgcgacggatcaagacaagcttattgcgaaaaataaagcagaagaattggcaaacagcatcatcaacaacattaataaagcaacaagtaatcaggatgtatctcaagttcaaacagctggcaaccatgcgattgaacaagtgcatgccaatgaaataccgaaagctaaaattgatgcgaataaagatgttgacaagcaagttcaagcattaattgacgaaattgatcgaaatccaaatctaacagataaggaaaaacaagcacttaaagatcgtattaatcaaatacttcaacaaggtcataacgacattaacaatgcgctgactaaagaagaaattgaacaagccaaagcacaacttgcgcaagcattacaagaaattaaagatttagtgaaagctaaagaaaatgcgaaacaagatgttgacaagcaagttcaagcattaattgacgaaattgatcgaaatccaaatctaacagataaggaaaaacaagcacttaaagatcgtattaatcaaatacttcaacaaggtcataacgacattaacaatgcgctgactaaagaagaaattgaacaagccaaagcacaacttgcgcaagcattacaagaaattaaagatttagtgaaagctaaagaaaatgcgaaacaagatgttgacaagcaagttcaagcattaattgacgaaattgatcgaaatccaaatctaacagataaggaaaaacaagcacttaaagatcgaattaatcaaatacttcaacaaggtcataacgacattaacaatgcgatgactaaagaagaaattgaacaagccaaagcacaacttgcacaagcattgcaagacatcaaagatttagtgaaagctaaagaagatgcgaaaaatgcaataaaagccttagctaatgcgaagcgtgatcaaatcaattcaaatccagatttaacacctgagcaaaaagcaaaagcgctcaaagaaattgacgaagctgaaaaacgagcactacaaaacgttgagaatgctcaaactatagatcaattaaatcgaggattaaacttaggtttagatgacattagaaatacacatgtatgggaggttgatgaacaacctgctgtaaatgaaatttttgaagcaacacctgagcaaatcctagttaatggtgaactcattgtacatcgtgatgacatcattacagaacaagatattcttgcacacataaacttaattgatcagctttcagcagaagttattgatacaccatcaactgcaacgatttctgatagcttaacagcaaaagttgaagttacattgcttgatggatcaaaagtgattgttaatgttcctgtaaaagttgtagaaaaagaattgtcagtagtcaaacaacaggcaattgaatcaatcgaaaatgcggcacaacaaaagattaatgaaatcaataatagtgtgacattaacactggaacaaaaagaagctgcaattgcagaagttaataagcttaaacaacaagcaattgatcatgttaacaatgcacctgatgttcattcagttgaagaaattcaacaacaagaacaagcgcatattgaacaatttaatccagaacaatttacgattgaacaagcaaaatcaaatgcaattaaatcgattgaagatgcaattcaacatatgattgatgaaatcaaagctcgtactgatctaacagataaagagaagcaagaagctattgctaagttaaatcaattaaaagaacaagcaattcaagcgattcaacgtgcgcaaagcatcagtgaaataactgagcaattggaacaatttaaagctcaaatgaaagcagctaatccaacagcaaaagaactagctaaacgcaagcaagaagcaattagtagaattaaagacttttcaaatgaaaaaataaatagtattcgaaatagtgaaattggcacaactgatgaaaaacaagcagcaatgaatcaaattaacgaaattgtgcttgaaacaattagagatattaataatgcgcatacattacagcaagttgaggctgcattgaacaatggtattgctcgaatttcagcagtacaaattgtaacatctgatcgtgctaaacaatcgtcaagtactggaaatgaatctaatagccatttaacaattggttatggaactgcaaatcatccatttaacagttcgactattggacataaaaagaaacttgatgaagatgatgacattgatccacttcatatgcgtcactttagtaataatttcggtaatgttattaaaaacgctattggtgtggtgggtatctctggtttactagctagtttctggttcttcattgccaaacgtcgtcgtaaagaagatgaagaggaagaattagaaataagagataataataaagattcaataaaagagactttagacgatacaaaacatttaccacttttatttgcgaaacgtcgcagaaaagaagatgaagaagatgttactgttgaagaaaaagattcgctaaataatggcgagtcactcgataaagttaaacatacgccgttcttcttaccaaaacgtcgtcgtaaagaagatgaagaagatgtggaagttacaaatgaaaacacagatgaaaaagtgttgaaagataacgaacattcaccactcttattcgcaaaacgacgcaaagataaagaggaagatgttgaaacaacaattagtattgaatctaaagatgaggacgttcctttattattggctaaaaagaaaaatcaaaaagataaccaatccaaagggaaaaagtcggcatcaaaaaaaccttctaaaaaggtagcagctaaaaagaagaaaaagaaatctaaaaaaaataaaaagtaa

SEQ ID NO: 417147 - DNA, 402 bp, Staphylococcus aureus
atggcgaaaataaattttgatgctgcgacgaaaggaaatccaggcataagtacatgtgccgttgtaatcaaagaagatgagcagcattatacatatacacatgagttaggcgaaatggataatcacactgcagaatgggctgcttgtatctatgcattgaaacacgcccgtgaattaaacgttagcaatgcgttgttgtacactgactctaagttaattgcggatagttttaacgctggttatgtaaaaaatgcaaaatttaaaccttattttgatcaattggaaatatttgaacaagattttgatttattatttgttaaatggattccgagagaacaaaacaaagaagcgaatcaacacgcacagcaagcattgtacaaattaattaaaaagaacaaataa

SEQ ID NO: 417148 - DNA, 312 bp, Staphylococcus aureus; identical to SEQ ID NO: 409883

SEQ ID NO: 417149 - DNA, 1389 bp, Staphylococcus aureus
atgaatgaaacgtatcgcgggggcaacaagttaatcttaggtattgtattaggtgttattacattttggttgtttgcacaatcacttgtaaatgttgtaccaaatttacaacaaagttttggcacagacatggggacaattagtatagcggtcagtctaactgcactattttcaggtatgtttgtcgttggagcaggtggtctagcagataaaattgggcgcgtgaaaatgacgaatatcggcttattattaagtattattggttcagcattaattattattacaaatttaccagcattgttaattttaggtcgtattatacaaggcgtatcagcagcgtgtattatgccgtccacattggccattatgaaaacttattatgagggtgctgaacgtcagcgtgccttaagctactggtctatcggttcttggggtggaagtggtatctgttcactcttcggaggggcagttgcgacaactatgggttggagatggattttcatcttctcaattatcgttgccgtactttcaatgttactcatcaaagggacgcctgaaacgaaatcagaagttaccaatacacataaatttgacgttgcaggtctaattgttctagtagttatgttgctaagtttaaacgttgtcattactaaaggtgcagcacttggttatacatcattatggttctttggtttgattgcaatcgtaattgtagcattctttatgttcttaaaagttgagaaaaaagtagataatccgcttattgattttaaattatttgaaaataaaccatatacaggtgcaacgatttcgaacttcttattaaacggtgttgcaggtacattaattgtagcgaatacattcgtgcaacaaggtttaggttatacagcattgcaggcaggatacttatcaattacttatttaatcatggtgttattgatgattcgagttggtgaaaaattattacaaaaaatgggttctaagcgaccaatgttattaggtacattcattgtggtcattggtattgcacttatttcattagtattcttaccaggcatattttatgttatcagttgtgtcgtaggatatttatgtttcggactaggcttaggtatttatgcaacaccttctacagatacagctatttcgaatgcaccgttagataaagttggcgttgcttcaggtatttataaaatggcttcatcacttggtggcgcattcggtgtcgcaattagtggtgctgtatatgctggtgcagttgctgcaacgagcattcatacaggtgcgatgattgcactttgggttaacgtattaatgggaatcatggcatttatcgcaattttattcgcgattcctaatgatgataaacgtgtcaaagatgcgaaataa

SEQ ID NO: 417150 - DNA, 1179 bp, Staphylococcus aureus
atgaatcaacaattaattgaagctttaaaatctaaagaagacaaaatgattgagatcagacgttatttacatcagcatccagaattatcttttcatgaagatgaaacggcgaaatacatcgctgaattttacaaaggtaaagatgtggaagtagaaacgaatgtcggaccacgtggaattaaagtaacgattgattcagggaaacctggtaaaacattagcaatccgtgcagactttgacgcattacccattactgaagatacaggattatcttttgcatcacaaaataaaggtgttatgcacgcatgtggtcacgatgcacatacagcatacatgcttgtattagcagagacgcttgctgaaatgaaagatagttttacaggaaaagtcgttgtgatacatcaaccagctgaagaagtaccaccaggtggtgctaaagcaatgattgaaaatggtgtattagacggtgttgatcatgtattaggtgtacacgtcatgagcacaatgaaaacaggtaatgtgtattacagacctggttatgttcaaacaggacgcgcattcttcaaattgaaagttcaaggtaaaggtggtcatggttcatcaccacatatggccaatgatgccattgttgcaggtagctacttcgtcacagcgttacaaacagttgtatctagacgactaagtccatttgaaaccggtgttgtcacaatcggttcatttgacggtaaaggtcaattcaatgtcattaaagatgttgttgaaattgaaggtgatgtacgtggattaacagatgctacaaaagcaacaattgaaaaagaaattaaacgtttatcaaaaggattagaggatatgtatggtgtaacttgcaccttagaatataacgatgattatccagcattatataatgatccagagtttactgagtacgtggctaagacgttgaaagaagcaaaccttgaatttggtgtcgaaatatgtgaaccacaaccaccttcagaagactttgcatactatgctaaagaacgtccaagtgcctttatttatacaggtgcagctgtggaagatggtgaaatttacccacatcatcatcctaaatttaacatttcagaaaaatcattacttatttcggcagaagctgtagggacagttgttttagattaccttaaaggagataactaa

SEQ ID NO: 417151 - DNA, 2238 bp, Staphylococcus aureus
atgcaacgtgattatttaattcgagtagaaactgagagtatgtcagatttcaaaaggctcaatagtttaatgattggttttgttattaaaggtgaggcacacatttatgatgaaaataatatgacgcaatgcaacagtggcgacattttcatcattaaccaccgcgacttgtatcgatttcaacttcaacaagatggcatcatatgttatatccaattccaaatgaaatatttagcagacaagtttgatgatgcgcattgtctatattttcacttaacagatgcgaccacaaccaaaaatatacatcaactgagaaatataatggcaagactggtttcaacacatatccgacataatgagttgtctaaattgactgagcaacaacttgtcattcagttgcttatgcatatgattcattatgtcccgcgtacatatcattcgaaccaaagtatcttaaatgatgataaagtgaaccaagtatgcgactatatcgagttacattttcatgaagacttaagcctttcggaattaagcgaatatgttgggtggtcagagagccatctgtctaaaaagtttacagaatcgctaggtgtaggattccagcatttcttaaatacgacgcgaattgagcatgcgaaactcgatttaacatacacagatgaaacgattactgatattgcattgcaaaatggcttttcaagtgcagcgagctttgcgagaacatttaaacactttacgcatcaaacacctaaacaatatcgaggtgatcgtccagcaatcactgaaaaccagcaatcggcacaacatgattatcacgaccgtgaattgatattacttttaaatgactacattgaagaaatgaatcattttattgaagatattgaaaagatgaactataaagagattgcctttaaaccaactaatcaacaactaaatcaatttaatcatattattcaagtgggctatttgaggaatttgctcaatacacagtatcaatcacagttgcttacatgtcatcatgattttcaagtcaatgaagtattagcatatgatgtgattccatatatcatgaaaaagctcaatgcgccattcacgtatgatgcagaaatttcgaatatattttatgatattgatttgtgtttagactttttattagatcataactttagtttgaccatgcatttggatcagtatgactcacgtgattatatcgatgcatttaaaatttttatccatcacgttgccctgcatgtcagtcatagaaaagatttgaagttcaacttgtatgtgacgacattgcacacgtctttgattgaaatgattgattattttaaagcattattccctaatggtggcttgtacattcacttagatcaagctacggaaagacatctaccattgttgaaacgacttgagccacacatcgaccattttgtatttgatgccaattcaaatgacgctgttgattttaataaaatgaatgatgatgaatttaaaaccgcgagtcaaatgattattaataaaacgaattaccttatcgacttaatgcatcgtcatcgcctaaagcgtccactcattttactcaattggaatacattgacgggtgatacatttattacaaacggcgaatattttagaggtggtatcatcattgagcaattattaaaattaagttctaaagtagagggtatcgggtattggttgaattatgatttgcacgtcagtcattgtaaaaatgaacgggattatatgaattctattgaactgtttcatcaatataatggaaaacgtccggtctatttcacggcattgctatttaataaattaacaagcaatattttgtattctgatgatacatgtattgtcacggggactgattcaaattttcaaatattgttatatgatgcaaagcattttaatccgtacttagcgttggacaatcaaatgaatatgcgtgcaacggaaatgatccatttgaacattaatgccctagaagacggtatgtataagattaaacattttaccttagataaagaaaatggtgcgttatttaatctttggcgcaaacatcatacgatacatggcatggacaaggactctatagattacgttaatcgaatgagttttccgaaattagaagtatatgatatagatatcacggacacactggcattaaacattaaaatgattacgaatgggattcacttaattgaagtaaaacgttacccaagttcataa

SEQ ID NO: 417152 - DNA, 312 bp, Staphylococcus aureus; identical to SEQ ID NO: 409883

SEQ ID NO: 417153 - DNA, 327 bp, Staphylococcus aureus
atgtttgaagaatacaagaaaatagatgatcttgaaaatgcatatgaaatagagttgaaacgtattgaaagggagatacaaaatcttagtgatttaaaatatcaccttagaagagaaaatgaacaaagttatgatgcatttttgtatttaaagaataaaatgaactatagtgaagagtcaaatgctaaggtgagacgactagttgaagaatttgattatgaagcagatacttatattagacaaaaagagttaaagttagaagattataaagaagaaataagaagagaatatatacagcaatctgaaaaaataatggaggcgaagtag

SEQ ID NO: 417154 - DNA, 327 bp, Staphylococcus aureus; identical to SEQ ID NO: 414757

SEQ ID NO: 417155 - DNA, 939 bp, Staphylococcus aureus
atgactaaaaaagaatacaaaatagatccaggaaaaataaaaagtaattcggaagaaactagtgcaattgctagtattagttatgaaattgaaaatgcaaatgataatggtttaaataaagcaagaattacagaacaggttacttacttaaaaaatcaggataagtttcctaaaaacttagactacatcgaaagttatacagatcccagtacggggaccacggcaacggcatttttaaataaagatacaggtaaagttactgttggaatggctggtacaaactttcacggcgatcaacttaaaagagtagcacttagttcgatgtctccgttattattcccaccctctaagcaagatatgaaagatgtacgaggcactatgaaggatggtgtagcggatctagccattggagtaggaatggtcaattataaaggaaaacattttgcaaatacacagcagtttattgagaatttacaaaaaaagtacgaaattgataccgttactggtcattctttaggagggagagatgctatctttcttgggcttcgttataacatcaaaaatgttgtggcatacaatcctgctccgttagaagtaaaaagcattcgtaataaatttggtggtcaattgtttagaaatacgacatttccagatgaaaaatatttaaaagagttaatggataattatgatggagatattactaaggttataactcaaaaggatggattagactatttagtgaagcgtacagatcatttaacttgtggcgatgtgttacgtataaacaatggtcagggccatgcgatggagaattttttaggagaaaaagaacaacgtgaaataatcgaagaactaatgttagtaaaaggatatcgcgatgcaaatgacaaagcatttaaggctttgaaaaaaatactgagaaaaaactcggtaaaatag

SEQ ID NO: 417156 - DNA, 693 bp, Staphylococcus aureus
atgggtaaagaagcggaaattaagaaaagttttgaaaaaacattaagtatgtatccgattgaaaacctagaggatttatatgacaaagaaggttatcgtgatgatcaatttgataaaaatgataagggaacatggattataaattctcaaatggcaattcaaaataaaggagaagctctaaaaataaaaggcatgcttttgaagataaatagaaatacaagaagtgcaaaaggattttactacactaatgagataaagacggagaaatacgaagtagctcaggataatcaaaaaaaatatccagttaaaatgattgataataaattcattcctgctgaggaagttaaagatgaaaaaataaaaacagaaatccaaaactttaaattttttgcacaatatagtaattttaaagatttaatgaattataaagatggggatatatcatacaacccagaggtgccgagttattcagcaaaatatcaattaaccaatgatgattataatgtaaaacaattacgtaaaagatatgatataccaacaaataaagcgccaaagttcatattaaaaggtacaggagatttaaaaggttcatcagttggatataaaaaaattgaatttacttttgtagagaatgaaaatgaaaatatttactttactgatagtctatattttgagtcgagtgaggataaatag

SEQ ID NO: 417157 - DNA, 768 bp, Staphylococcus aureus
atgaaacgattaaatacattggtattgtacattagttttttgatattagtcatcagtatcgttgctggttgtggtacagggaaagaagcggaaataaagaaaagttttgaaaaaacattgagtatgtatccgattaaaaatctagaggatttatacgataaagaaggctatcgtgatgacgaatttgataaaaatgataaaggaacatggactattagttctgaaatggcaattcagaaaaagggagaagccttaaatataaaaggtatggttttgaagttaaatagaaatacaaggagtgcaaaaggattttactatgttaatgcgataaagaaggatgaaaatggcagacctcaggataagcaaatagaatatcccgttaaaatgattgacaataaaatcattccaactaaagatatcaaagatgaaaaaataaaaaaagaaattaaaaactttaagtttttcgcgcagtatggcaactttaaagatttatcgaagtacaaagatggaaatatttcatataatccagaagctccgatttattcagccaaatatcaactaaccaatgatgattataatgtaaagcaattacgtaaaagatatgatataccgacgaataaagctccaaagttattgttaaaaggttcaggaaatttagatggttcatcagttggatacaaaaaaaatgaatttactttcgtagagaaaaaaggagaaaacacttactttacagctaatctacattttaaaccgagtaatgatgaataa

SEQ ID NO: 417158 - DNA, 330 bp, Staphylococcus aureus
atgactgatattaacaaaaatgtttttaaacctattattattgaattaggttctatatttaataatcttactatcaataaaatcaaagcgaaaaaagggcgtaaaattgaatggatagagttcacatttgacgctgagaaacgcattcataacaaacgacaacctcaaatgtccaagatagataaatcaagacaatatgtgaggcgtgaaaagacgcctaaatggttagaagaacggtcatatgaaaagcaacctcaaaaagattacgacccacaattagagaaagaacgagaggattttttaaaacaacttgaactgaattgggaataa

SEQ ID NO: 417159 - DNA, 186 bp, Staphylococcus aureus; identical to SEQ ID NO: 409375

SEQ ID NO: 417160 - DNA, 807 bp, Staphylococcus aureus
atggtattttataatttttttaaggtagtgattaacatagatatttatcaacactttagacaggaagaatacgaattaattgatcagctaacggataaatgtgatcaagcggaacaacattatgcaccagtattaacgcattttttagatccaagagggcaatatatattggaagtgatttgtggcagttatgaagatttaaacgtctctttttatggcgggcctaatgctgaaagaaaaagagcaatcatttcgccgaactattatgaacctaaagaaagtgactttgaattaactttaatggaaatagagtatcctgaaaaattcgtcactttaaaacatcaacatattttagggacattaatgtctttaggtatcgaacgcgaacaagttggagatataattgtgaatgaacgaattcaatttgttttgacaagtagattggaatcatttattatgttagaattacaacgtattaaaggcgcatcagttaaactttatactattccagtaacagatatgatacaatctaatgagaattggaaaaatgaaagtgcaacagttagttctttaaggttagatgttgttattaaagaaatgatacgtaaatcacgtacgattgcgaaacaactaattgaaaaaaaacgtgttaaagtgaatcacactattgttgattcagcagattttcaattacaagcaaatgatttaatatccatccaaggttttggtagaacacacattactgacttaggtggtaaaactaaaaaagataaaacgcacattacctatagaacattattcaaatag

SEQ ID NO: 417161 - DNA, 291 bp, Staphylococcus aureus
atggatataaatgtactagctacaatatttaaatttatcctttttgttgttgaaatttattatttcggcatgattatatatttctttacatcttgggtaccaagtattagagaaactaaggtaggttattttttagcgaaaatatatgaacctttcttacaaccatttagaaaagtaattccacctattggaattatcgacatatcatcaatcgctgcaattttcgttttagtattattccaaaaagggttactccaaatctttaattggattttaattcaattacaataa

SEQ ID NO: 417162 - DNA, 564 bp, Staphylococcus aureus
gtgagccacttggctttaaaagatttatttagtggattttttgtaatagatgatgaagaggaagtagaagtacctgacaaacaacaacaggtcaatgaagcgccagcaaaagagcagtcacaacaaacaacaaaacaaaacgcaatcaaatcagtccctcaaaaatctgcatcaagatatacaacaacgtcagaagaaaggaataaccgtatgtctaattattcaaaaaataattcacgtaatgttgtaactatgaacaatgctacaccaaacaatgcatcacaagaaagttcaaaaatgtgtttattcgaaccacgtgttttttcagatacacaagatattgctgatgagcttaaaaaccgccgtgcgacacttgtcaatttacaacgtattgataaagtatcagcgaaaagaattattgattttttaagcggtactgtttatgcaatcggtggagatatccaacgtgtaggtactgatattttcttatgtacgcctgataatgtggaagtagctggaagcattacagaccatattgaaaatatggaacattcattcgactaa

SEQ ID NO: 417163 - DNA, 669 bp, Staphylococcus aureus
gtgaaagataatttacaacaaatctcaacacaaattaatgacaaaagtgaaaaaaataatttttcaacaaaaccaaacgtgattgcagttacaaaatatgttacaatagagcgagctaaagaagcgtatgaggctggaataagacattttggtgagaatagattggaaggcttttttcaaaagaaagaagcattaccatcagatgcggtgattcattttataggatcattacaatctcgaaaagttaaggacgttataaacgacgtagattatttccatgctttagatcgattgagcttagccaaagaaattaacaaacgtgcagaacataaaattaaatgtttcttgcaagtgaacgtttcgggagaagcttctaaacatggtattgctttagaagatgttgatcagtttatagatgatcttaaaaaatatgacaaaatcgaaattgtaggtttaatgacgatggcaccattgacagatgatgaagcatatattagatcgttatttaaacagttacgtttgaaaaaagaagaaatacaacgactcaatttagaatatgcgccttgtgatgaattatcaatgggaatgagtaatgactatcttattgcagttgaagaaggtgcgacgtttgttagaattgggactaaacttgtaggagaagaggagtga

SEQ ID NO: 417164 - DNA, 792 bp, Staphylococcus aureus
gtgaatgataattttaaaaagcaaccgcatcatttaatatatgaagaattattacaacaaggtattacgctaggtattacaactagaggagatggtttaagcgactatcctaaaaatgcttttaatatggcgagatatattgatgatcgcccatataatattactcaacatcaattgcaattagctgaagaaattgcgtttgatagaaaaaattgggtgtttcccatccaaacacatgaaaataaagtcgcttgtattacaaaggatgatataggcacaaatatagacactttaactgatgcgcttcatggtattgatgcgatgtacacatatgatagtaatgtcttattaacgatgtgttatgcagactgtgtaccagtatatttttatagtacaaaacatcattttattgcattggcgcatgcagggtggcgtggtacctatactgaaattgtaaaagaagtgctaaaacatgtgaactttgatttgaaagacttacatgtcgttattggaccatctacatcatcaagttatgaaattaatgatgatattaaaaataaatttgaaacattgccaattgatagtgccaactatattgaaactagaggacgagatcgtcatggtattgatttgaaaaaagccaatgctgcattattaaattattatggtgttcctaaagaaaatatttatacgacagcgtatgctacatctgaacatttagaattatttttctcttatcgattagaaaaaggtcaaacaggacgcatgttagcattcattggtcaacagtaa

SEQ ID NO: 417165 - DNA, 1173 bp, Staphylococcus aureus
atgttagaatttgaacaaggatttaatcatttagcgactttaaaggtcattggtgtaggtggtggcggtaacaacgccgtaaaccgaatgattgaccacggaatgaataatgttgaatttatcgctatcaacacagacggtcaagctttaaacttatctaaagctgaatctaaaatccaaatcggtgaaaaattaacacgtggtttaggagcaggagctaaccctgaaatcggtaaaaaagctgcagaggaatctcgtgaacaaattgaagatgcaatccaaggtgcagacatggtatttgttacttctggtatgggtggcggaactggtactggtgcagcaccagtcgttgctaaaattgcaaaagaaatgggcgcattaactgttggtgttgtaactcgtccatttagttttgaaggacgtaaacgtcaaactcaagctgctgctggagtagaagctatgaaagctgcagtagatacattaatcgttataccaaatgaccgtttattagatatcgttgacaaatctacgccaatgatggaagcatttaaagaagctgacaacgtgttacgccaaggtgtacaaggtatctcagacttaatcgctgtttctggtgaagtaaacttagactttgcagacgttaagacaattatgtctaaccaaggttctgcattaatgggtattggtgtttcttctggtgaaaatagagcggtagaagctgctaaaaaagcaatctcttctccattacttgaaacatctatcgttggtgcacaaggtgtgcttatgaatattactggtggcgagtcattgtcattatttgaagcacaagaggctgctgatattgtccaagatgctgcagatgaagacgttaatatgattttcggtacagttattaatcctgaattacaagatgagattgttgtaacagttattgcaactggttttgatgacaaaccaacatcacatggtcgtaaatctggtagcactggattcggaacaagcgtaaatacttctagcaatgcaacttctaaagatgaatcattcacttcaaattcatcaaatgcacaagcaactgatagtgtaagtgaaagaacgcatacaactaaagaagatgatattccaagcttcattagaaatagagaagaaagacgttcaagaagaacaagacgttaa

SEQ ID NO: 417166 - DNA, 1407 bp, Staphylococcus aureus
atggaagaacattactacgtaagtattgatattggatcatcaagcgtaaaaacaatagtaggcgagaaatttcacaatggtataaatgtgataggtacaggacaaacctacacgagcggtataaaaaatggtttaattgatgattttgatattgcgcgacaagcaatcaaagacacaattaaaaaggcatcaatcgcttcgggtgttgatattaaagaagttttcctgaaattacctatcattggaacggaagtttatgatgaatcaaatgaaatcgacttttatgaggatacagaaatcaacggttcacatatcgaaaaagtattagaaggtattagagaaaaaaatgatgtgcaagaaacagaagtaattaatgtgttcccgattcgttttatagtcgataaagaaaatgaggtttcagaccctaaagaattaattgccagacattcattaaaggttgaagcaggcgtaattgctattcaaaaatcgattttaattaatatgattaaatgcgtagaagcatgtggtgttgatgtattagatgtttactctgatgcatataactatggttcaatcctaacagctactgaaaaagagttaggtgcatgtgtcattgatattggtgaagacgttacgcaagttgctttttatgaacgcggtgaattagtagatgctgattctatcgaaatggcagggcgtgatattacagacgatattgcacaaggattaaacacttcttatgaaactgctgaaaaagttaaacaccaatatggtcatgcattctatgattctgcttcagatcaagatatcttcactgttgaacaggttgatagtgatgaaacagtacagtatactcaaaaagatttgagtgactttattgaagcgcgtgtagaagaaatattcttcgaagtatttgatgttttacaagatttaggattaacaaaagtaaatggtgggtttattgtaactggtggatctgcaaacttacttggcgtaaaagaattattatcagatatggtaagtgaaaaagttagaattcacacgccatcacaaatgggaattagaaaacctgaattttcttcagcaatttctacaatttctagtagtatcgcttttgatgagttattagattatgttacaattaattatcatgataatgaagaaactgaagaagatgttattgatgtgaaagacaaagataacgaatctaaattaggcggatttgattggtttaaacgtaaaacaaacaaaaaagatactcatgaaaatgaagtagagtcaacagatgaagaaatttatcaatcagaagataatcatcaggaacataaacagaatcatgaacatgttcaagacaaagataaagaagaaagtaaattcaaaaaactaatgaaatctctatttgaatga

SEQ ID NO: 417167 - DNA, 1320 bp, Staphylococcus aureus
atggatgataaaacgaagaacgatcaacaagaatcaaatgaagataaagatgaattagaattatttacgaggaatacatctaagaaaagacggcaaagaaaaagatcaaaggctacacatttttctaatcaaaataaagatgatacatctcaacaagctgattttgatgaagaaatttacttgataaataaagacttcaaaaaagaagaaagcaatgataaaaataatgattctgcttctagtcatgcgaatgataataatatcgatgattctacagactctaatattgaaaatgaggattatagatataatcaagaaattgacgaccaaaatgaatcgaatgtaatttcagtcgacaacgaacaacctcaatcagctcctaaagaacaaaatagcgactcgattgatgaggaaacagtaacgaaaaaagaacgaaaaagtaaagtaacacaattaaagccattaacacttgaagaaaagcggaagttaagacgtaagcgacaaaagcgaatccaatacagtgttattacaatattggtattgttgattgctgttatattaatttacatgttttcaccacttagtaaaattgcgcatgtaaatataaatggaaataatcacgttagtacttcaaagataaacaaagttttaggtgttaaaaatgattcaaggatgtatacgtttagtaaaaaaaatgctattaatgatctcgaagaggatccattaatcaaaagtgttgagatacacaagcaattaccaaacacattaaacgtagatatcacagaaaatgaaattattgctttagtgaaatataaaggtaaatatttacctttattagaaaatggtaaattgcttaaaggttcaaatgatgtcaaaattaatgatgcacctgtcatggatggtttcaaaggtacaaaagaagatgatatgattaaggcgttatctgaaatgacacctgaagttagacgatatattgccgaagtgacatacgccccaagtaaaaacaaacaaagcagaattgaattgtttacgacagatggacttcaagtaatcggtgatatttcgacgatatctaagaaaatgaaatattatccgcagatgtcacaatcattatcaagggatagttcgggtaaactaaaaacacgaggctatattgatttatcagtcggtgcttcatttatcccataccgtggaaacacgtctagtcaatcagaaagcgataaaaatgtgactaaatcatctcaagaggaaaatcaagcaaaagaagaattacaaagcgttttaaacaaaattaacaaacaatcaagtaagaataattaa

SEQ ID NO: 417168 - DNA, 1350 bp, Staphylococcus aureus
atgcttaattatacagggttagaaaataaaaatgtattagtcgtcggtttggcaaaaagtggttatgaagcagctaaattattaagtaaattaggtgcgaatgtgactgtcaatgatgggaaagacttatcgcaagatgctcatgcaaaagatttagaatctatgggtatttctgttgtaagtggaagtcatccattaacgttgcttgataataatccaataattgttaaaaatcctggaataccttatacagtatctattattgatgaagcagtgaaacgagatttgaaaattttaacagaagttgagttaagttatctaatctctgaagcaccaatcatagctgtaacgggtacaaatggtaaaacgacagttacttctctaattggagatatgtttaaaaaaagtcgcttaactggaagattatccggcaatattggttatgttgcatctaaagtagcacaagaagtaaagcctacagattatttagttacagagttgtcgtcattccagttacttggaatcgaaaagtataaaccacacattgctataattactaacatttattcggcgcatctagattaccatgaaaatttagaaaactatcaaaatgctaaaaagcaaatatataaaaatcaaacggaagaagattatttgatttgtaattatcatcaaagacaagtgatagagtcggaagaattaaaagctaagacattgtatttctcaactcaacaagaagttgatggtatttatattaaagatggttttatcatttataaaggtgttcgtattattaacactgaagatctagtattgcctggtgaacataatttagaaaatatattagcagctgtgcttgcttgtattttagctggtgtacctattaaagcaattattgatagtttaactacattttcaggaatagagcatagattgcaatatgttggtactaatagaactaataaatattataatgattccaaagcaacaaacacgctagcaacacagtttgccttaaattcatttaatcaaccaatcatttggttatgtggtggtttggatcgagggaatgaatttgacgaactcattccttatatggaaaatgttcgcgcgatggttgtattcggacaaacgaaagctaagtttgctaaactaggtaatagtcaagggaaatcggtcattgaagcgaacaatgtcgaagacgctgttgataaagtacaagatattatagaaccaaatgatgttgtattattgtcacctgcttgtgcgagttgggatcaatatagtacttttgaagagcgtggagagaaatttattgaaagattccgtgcccatttaccatcttattaa

SEQ ID NO: 417169 - DNA, 966 bp, Staphylococcus aureus
atgatttttgtatatgcgttattagcgctagtgattacatttgttttggtacctgttttaatacctacattaaaaaggatgaaatttggtcaaagtattcgagaagaaggtccacaaagccatatgaagaagactggtacaccaacgatgggtggactaacatttctattaagtattgtgataacgtctttggtggctattatatttgtagatcaagctaatccaatcatactgttattatttgtgacgattggttttgggttaattggttttatagatgattatattattgttgttaaaaagaataaccaaggtttaacaagtaaacagaagtttttggcgcaaattggtattgcgattattttctttgttttaagtaatgtgtttcatttggtgaatttttctacgagcatacatattccatttacgaatgtagcaatcccactatcatttgcatatgttattttcattgttttttggcaagtaggtttttctaatgcggtaaatttaacagatggtttagatggattagcaactggactgtcaattatcggatttacaatgtatgccatcatgagctttgtgttaggagaaacggcaattggtattttctgtatcattatgttgtttgcacttttaggatttttaccatataacattaaccctgctaaagtgtttatgggagatacaggtagcttagctttaggtggtatatttgctacgatttcaatcatgcttaatcaggaattatcattaatttttataggtttagtattcgtaattgaaacattatctgttatgttacaagtcgctagctttaaattgactggaaagcgtatatttaaaatgagtccgattcatcatcattttgaattgataggatggagcgaatggaaagtagttacagtattttgggctgttggtctgatttcaggtttaatcggtttatggattggagtgcattaa

SEQ ID NO: 417170 - DNA, 444 bp, Staphylococcus aureus; identical to SEQ ID NO: 409337

SEQ ID NO: 417171 - DNA, 3030 bp, Staphylococcus aureus
atgaaaaagaaaaattggatttatgcattaattgtcactttaattattataattgccatagttagtatgatattttttgttcaaacaaaatatggagatcaatcagaaaaaggatcccaaagtgtaagtaataaaaataataaaatacatatcgcaattgttaacgaggatcaaccaacgacatataacggtaaaaaggttgagctgggtcaagcttttattaaaaggttagcaaatgagaaaaactataaatttgaaacagtaacaagaaacgttgctgagtctggtttgaaaaatggcggataccaagtcatgattgttatcccagaaaacttttcaaaattggcaatgcaattagacgctaaaacaccatcgaaaatatcactacagtataaaacagctgtaggacaaaaagaagaagtagctaaaaacacagaaaaagttgtaagtaatgtacttaacgactttaacaaaaacttagtcgaaatttatttaacaagcatcattgataatttacataatgcacaaaaaaatgttggcgctattatgacgcgtgaacatggtgtgaatagtaaattctcgaattacttattaaatccaattaacgacttcccggaattatttacagatacgcttgtaaattcgatttctgcaaacaaagatattacaaaatggttccaaacatacaataaatcattattgagtgcgaattcagatacgttcagagtgaacacagattataatgtttcgactttaattgaaaaacaaaattcattatttgacgagcacaatacagcgatggataaaatgttacaagattataaatcgcaaaaagatagcgtggaacttgataactatatcaatgcattaaaacagatggacagccaaattgatcaacaatcaagtatgcaagatacaggtaaagaagaatataaacaaactgttaaagaaaacttagataaattaagagaaatcattcaatcacaagagtcaccattttcaaaaggtatgattgaagactatcgtaagcaattaacagaatcactgcaagatgagcttgcaaacaacaaagacttacaagatgcgctaaatagcattaaaatgaacaatgctcaattcgctgaaaacttagagaaacaacttcatgatgatattgtcaaagaacctgatacagatacaacatttatctataacatgtctaaacaagactttatagctgcaggtttaaatgaggatgaagctaataaatacgaagcaattgtcaaagaagcaaaacgttataaaaacgaatataatttgaaaaaaccgttagcagaacacattaatttaacagattatgataaccaagttgcgcaagacacaagtagtttgattaatgatggtgtcaaagtgcaacgtactgaaacgattaaaagtaatgatattaatcaattaactgttgcaacagatcctcattttaattttgaaggcgacattaaaattaatggtaaaaaatatgacattaaggatcaaagtgttcaactcgatacatctaacaaggaatataaagttgaagtcaatggcgttgctaaattgaaaaaggatgctgagaaagatttcttaaaagataaaacaatgcatttacaattgttatttggacaagcaaatcgtcaagatgaaccaaatgataagaaagcaacgagtgttgtggacgtaacattgaatcataaccttgatggtcgcttatcgaaagatgcattaagccagcaattgagtgcattatctaggtttgatgcgcattataaaatgtacacagatacaaaaggcagagaagataaaccattcgacaacaaacgtttaattgatatgatggttgaccaagttatcaatgacatggaaagtttcaaagacgataaagtagctgtgttacatcaaattgattcaatggaagaaaactcagacaaactgattgatgacattttaaataacaaaaagaatacaaccaaaaataaagaagatatttctaagctgattgatcagttagaaaacgttaaaaagacatttgctgaagagccacaagaaccaaaaattgataaaggcaaaaatgatgaatttaatacgatgtcttcaaatttagataaagaaattagtagaatttctgagaaaagtacgcaattgctatcagatacacaagaatcaaaaacaattgcagattcagttagtggacaattaaatcaattagataataatgtgaataaactacatgcgacaggtcgagcattaggcgtaagagcgaatgatttgaaccgtcaaatggctaaaaacgataaagataatgagttgttcgctaaagagtttaaaaaagtattacaaaattctaaagatggcgacagacaaaaccaagcattaaaagcatttatgagtaatccggttcaaaagaaaaacttagaaaatgttttagctaataatggtaatacagacgtgatttcaccgacattattcgtattattgatgtatttactatcaatgattacagcatatattttctatagttatgaacgtgccaaaggacaaatgaatttcattaaagatgattatagtagtaaaaaccatctttggaataatgtcatcacgtcaggtgttattggtacaactggtttggtagaaggattaattgtcggtttaattgcaatgaataagttccatgtattagctggctatagagcaaaattcatcttaatggtgattttaactatgatggtcttcgtacttattaatacgtatttactaagacaggtaaaatcaatcggtatgttcttaatgattgctgcattgggtctatattttgtagctatgaataatttgaaagcggctggacaaggtgtgactaataaaatttcaccattgtcttatatcgataacatgttcttcaattatttaaatgcagagcatcctataggcttggcgctagtaatattaacagtacttgtgattattggttttgtactgaacatgtttataaaacactttaagaaagagagattaatctaa

SEQ ID NO: 417172 - DNA, 807 bp, Staphylococcus aureus
atgaatattgcaaagttagaggatttcttaaaaattgatgcaaatggttataatgaaccgagcgtcgaagccttaaatgattatgctactcgatttatgttaacagtaccatttgaaaatattgatgtacaaaatggcaaaccaatttctgtagatattgatgcacttttcaataaaattgttcatgataaacgtggcggcttttgttatgaattgaactcattttttaaagcatatttattacaaaaaggatttaatccgcaattaatgtccgctaccattcatactcctaatggtggccgtagtctaaatggttcacatgcgtcacttgttgtacctattaacaatgtattttatgtagcagatgtcggttttggagacttacctctacacgctatgccaattacttcgtcagaccaaactcaaccagtcacagacataaatggcacatttcgcgctatttttgaaaatgaacataaggaactattttacgtacaaaaatttgaaaatgataactggaatacaaaatatgaagctgagttcaaacctaaacaaatagaagattttaatagcaacatcgaatataatcaaaccaacccagattcaatttttgttaagcatttactaattacaatgcctcaatcatttggacgcgccacgatgtctgaaaatcatttaactttaacaaggaatggtacctcagaaaaatttgatgtcactaaagataactataaacattttttagaaaaatattttaaactaaatgtaactatcaatcgtattgaaaacaataatagtaaaatataa

SEQ ID NO: 417173 - DNA, 1239 bp, Staphylococcus aureus
atgtcaaatggtaaagaattacaaaaaaatataggtttcttctcagcgtttgcgattgtaatggggacagtcattggttctggtgtgttcttcaaaatatcaaacgtgacagaagtaacaggaacagcaggaatggccttgtttgtatggttcctaggcggcatcattaccatttgtgcggggttaacagcagcagaacttgctgctgcgatccctgaaacaggtggcttaacaaagtatatagaatatacatacggtgatttctggggcttcctatcaggctgggcacaatcatttatttattttccagcaaacgtcgcagccttatcaatcgtgttgatcaatttccttggttctaaagcaggcggtattttacaatctgttaccttagttattaaattaattccaattattgttatcgttatttttggtattttccaatcaggagacattacgttctcattaattccgactactggtaattcaggaaatggtttctttacagcaatcggtagtggattactagcaactatgtttgcatatgatggctggattcatgtaggtaatgttgcaggagaacttaaaaatccaaaacgcgatttacctttagctatttctgtaggtatcggttgtattatggctgtgtacttattaattaacgctacattcttattaacattacctattgaattacttgcaggtaatttaaatgcagcatcagacacatcaaaaatattattcggtgaatacggcggtaaaattatcacaatcggaatattaatttctgtttatggtacgatcaatggctatactatgacaggtatgcgtgtgccttatgctatggctgaaagaaaattattaccatttagccatttatttgcaaaattaacaaaatcaggtgcaccatggttcggcgcaattattcaactgttaatcgcaatcgtcatgatgtcaatgggggcatttgatacaattacaaacatgttaatctttgttatttggttgttctattgtatgtcatttgttgctgtaataattttaagaaaacgtgaaccaaatatggagcgaccatataaagtaccgttatatccaatcatacctttaattgctattttggcaggatcatttgtattaattaatacactgtttacacaatttatattggcaattattgggattctaatcacaacacttgggataccagtttattactataagaagaaacaaaaagcggcataa

SEQ ID NO: 417174 - DNA, 624 bp, Staphylococcus aureus
gtggtaaaaatactattgccaatatctggcttgcatataaaagaaaagcttaatttttcaaataaatattatattcagaaaatcaaagactgcttggatatattaaagaaagataaaaaaggagtagatatttgttttgaagatgcaacaaggacttctagagaaaaattgaaagaatacatggaaattatttcaaaatatcaagttagaacagttacatttgcggacactgtaggatgttcgacaccattagaatacggagatatttttaattactttgtaaaaaaatattctaacataattttttctgctcattgtcataacgatctagggttggctactgcaaatacattagctgcaattttaaatggtgcgaagcaaatagaaactacatttttgggaattggtgagagagcgggtaatgctcctattgaggaaataattactattttgacaaaaaaacaaatagaaagtacggaattcactttacccgacgtatataaaactagtattaatatttctaaaattctcgattttcaaatatcagaaaacaaacctataattggtgaaaatatatttaaacatgaatcaggaattcatcaagatggtactaaaaaaatataa

SEQ ID NO: 417175 - DNA, 243 bp, Staphylococcus aureus
atgattcgaattcaagataatacaataagggatggtatgcaacaaagtaatgttcgaaaaagtctaattataaaaaaagaagtattgaaacaaattaacaagttaaatataaattctgttgaagtaggcatgtgtacaactatcgaggatgaatttaatattcatcaattcagagacattttaagtcctgaaaaagaattagtagtattgactaggcttaatgaaaaagaaataaaaaaatag

SEQ ID NO: 417176 - DNA, 222 bp, Staphylococcus aureus
atgaattatactctacaaggttatattgactgcggggccccaacactgagaatttcgaaaagaaattctacagacaatgcaagttgggagcggggccccaacacagagaatttcgaaaagaaattctacaagcaatgcaagttggacgcggagccccaattgggtttccattttctacaggcaatgcaagtttatgttagctcacaccaagtgcaatcttag

SEQ ID NO: 417177 - DNA, 285 bp, Staphylococcus aureus
gtgacaataaacaaattaaaaaatatgctcacgaatattggtttgaatgtagaaagtgagaagttatccaaagttgaagtccagttatttccgacagaacaaccattaaaagataatacagtacttgaaggttattcttgcaatattaagaattggcctaagttcaaaatttggataaacaaatctaacaaagtaactataaaatcacgaggagttcaaaagagttttgatatagaagatgagaagtcattaaggaaagaattaaaaggttttgaaattttgtaa

SEQ ID NO: 417178 - DNA, 210 bp, Staphylococcus aureus
atgaataaagaaaaaacacgtccatactataaagtgaaagcaataattataggcagaggtttaaaacagaaagacattgctaataagattggtatgaatgcatctttgtttaatattaaattaaataggattaatggtagagattttaaaacaggagaagccaagagattagctgaagttttaaatattaaaattgatgattttttttag

SEQ ID NO: 417179 - DNA, 369 bp, Staphylococcus aureus
gtgggaattggtgaaggcataagaaaaatgcgtaagcaacacaaattgacaatggatcaattagcaaacaatcttaatactacattccccaaacaatcgaattttactaaaagtaaaatatctaagtgggagaatgaaaaagaggaacctagacttagttctgctaaattaatagcagaatacttcaaaatatcattagatgaactttatgatagtaatagttcgggagttaaaaacaatctttcaaataaagataaaataaccgcacatgtaagcgaagatgttagtgactctgagatgaaagaaatcgtgaacttcatcgaatatattaaaagtaaaagaaatacaaattcaaatagcgataaataa

SEQ ID NO: 417180 - DNA, 498 bp, Staphylococcus aureus
gtgcaatatggaattcaacatgacacagggttattaccacatgaatggcattatcacatttcgccgcgaggtaaggcagatattgttcaacacaatcgtgatggacagcccatctatatgagcttatcatatagttatccttatatcgtgtgtgttgtcgataaagaaccagttggtattgatatcgaaaagatatcacaacgtttagactggcgtacattagtgacgtgtttctctacaaacgaagcacatcaaatatgtagtttaaatgatttttatcaaatatggacacaaaaagaaagttttacaaaattgattggtgaaggtttaatcaaaggattggacatttatgatatgacgcaatcacacttttatcaatcacgtgaagtgaagttcaaacaatttatttttgatcagtttatggtacaggtatgtttcttaggacaagcaccctgggggtataaaaaagtgtctgtatttcagttattgagtagttaa

SEQ ID NO: 417181 - DNA, 495 bp, Staphylococcus aureus
atgaaagacttgctaattgaatataggaaaacgagactttgcgtactcaataaaataaaatcacttgaatataaagtagatgaagaggataaattaagtatttacaaagatatattaaaagacattgattatacaattgaatggttaacatgtggacacgaaccaggcaattataacgcaatagatagaagtcaatgctacttagtagataatgatgtgatcaataaggcttttagtgaatcaatgtataaaaagaattcagatgttgaatacaatgatataattaatgatgttaataataaagtgagctacgcactgatgaagttaacacctaaagaactagagtgttttattatggtcaaatgtgaggggctgagtcttaaacaaacggcagatttattagaagtaaaaaaacctaccattcaaaagtatatggataggataaataagaagattgactttcaattgtgcaataatttatttttgtctaattaa

SEQ ID NO: 417182 - DNA, 528 bp, Staphylococcus aureus
gtgaaaataacttataagcatatagacgggttaaattatcttaaaaatttaaatagtgagattatgccaccacttaatcatatatttaaaattgtaaatgaaaatgaagaaaatcacatagcaagaattggagctaattatccagagggaaatggagtatactcctttgaaattaacaaagggggtaattattcacaatacagttataggtttataaataatgatggttatttcgaaatcccattgaacaaaaaagatatgtatattttaaactatagtatttatcacagtaaccctagagagttaaagtatccattaattgaatttaaatttgagtatcaagatttatatgataattattatgaagaaaatatctttgtgagtataagcaatcatgcactaagacataaaccagatgaagagtctatcacgatacgagctatgttagatgaattcaccattgataaaatcgaaaaactaaatagaataacaagagaaaattatcagcatgatagtttttatagttaa

SEQ ID NO: 417183 - DNA, 915 bp, Staphylococcus aureus
atgagattaaaagataacgttaagataagttactgcgatatagaaaagaagactaaaataaatcaaggaacaatcgagtatataatagctgacgaaaataagtattattacaatgttttcactcaagaaaaaatcgagttaaataatactccaaaagaacaatatgattttctgattaataatgctttaatatgtaatgactcttcttatgataatattgatgagcgttttaaaagaaatatgtatttttttgaagctttttcagagaaagtgggtatcaacccggaaaaaattcataatagaatacaaaacaaaacaattcttattattggttttggaggaataggtactatagttgtagataatttacagagaatgggatttaaaaattttatattaatagactatgatattgtagagccttctaatttgaatagacaaatgttttttaatgaacaatattatggagagtttaaggtagatgttgcagaaagtgaattattaaacggatgcaacattaaaaaatgttataagaacataaatagtgtttcggatttagaaaaattaaatgtcaataatgttgattttctaataaattgtgcagacactcctacaaatatagtgaacatagtgaatgagtttgctaaaaaatataagatccctacaatatcaggtagtgtagggacagaaacaggcacatgggggcctatttatgatacaaataatttatatcatcctatagacattgaaaataacgatatgagtataaaaggatcaaacgcatctactaattccataataagtagctttatagcatttgaggttatgctatacataacaaatttatatgaagactatttattttataaagaaaagattcttaactttaaaacactatttatggaagtgaattaa

SEQ ID NO: 417184 - DNA, 666 bp, Staphylococcus aureus
atgattattcaaaaaaaagatatccatgagatgtcagaagaatatttctttgataacatttacaaaaaaaaaccaattattttaacaggaattattgaacagtggaaaattcacaactttgatttagagaaatttggagagttgtatggcaacaaaactgcaccagtaagaggatcgaaaaaagatgattttaaagaatttatggaagtagaagtaagtgaatacatacgttatataaataataatactgaaaaatggtattgtgattttcctacggattatgaagaattccctaatcttttgtacatgtacagtgttcctaagatatttaaaaataatacctctgcatacaataattcagaattacatgaatggctctatttaggtagtaaaggtactggaaccccattccatgtagatatcaaaaactctcatgcatggaatgcactaatctttggagaaaaagaatggttgtttgctgaaattgggcaagactatctcaatattaaagatgaaaataaatgtctaaaatatatacaaaaagctaatgaattactttatattccaccgaatcttccacacaaagtagtaaacactcaaaattcgctatgcataacaggaaatttctgggacgaagagttggagaaaagttatgaaatggaataa

SEQ ID NO: 417185 - DNA, 1218 bp, Staphylococcus aureus
atgaaatggaataatcttagtttaactttaaaagtaagactcatctcaaattttttccaagaaataattacgacagcttttcttccgtttatggctttgtatttaagtgatatgactagtacaaaattcgctggtatttttttaactttattggttttgttaaattttccaatatcattcttcgcgggatatttaattgaattttttcctaaaaaaaaatctgtattactttatcaatttttaatgtcgatgatgcttttaggcatgactttttctataacatcatcgaatttgataattatattttgtgttttttatgttatttttaatatagtatgggggctacaatatcccgcaatggatactattatcatggatgctataactccagacattgagagttatatatataaaatagattattggctaaccaatgtagcagtagcattaggtgctttgttaggcggaatattatattctaataatcaaacttttttattcattgtcgcctttttagtttatttaattatttttttcgctctgttaaaatggctacctaaagaaactaacaatacaataagtaagaataaatttaatattaaagatatatttatgagttataagacagtttccaaagacacgaggtatgtgtttctgacaattggtttcagtataatcatgatgggtgaattgtcatcttcatcttatgttgctgttcgtttaaaagaaacctttaatgatgtatatttatatagtatacatatcgatggtgttaaaatgtattcttttcttattatgattaatactatagtggttgtaactctcacttatcatatatctaaattagtactcaatataaaacctaaaatgatattgatttttggattgttaatgtatattattggatattctggtatcacatatttaaatcagttttatctactaatattatttatgatgttagccactataggtgaaataatctatgctcccatttttgatgaacaaaaatttaaaatgattcccgaagataaacgtggaacttattcggctgtaaatacaattggttttaatttctcagaattacttgctcgattgggaattgtattaggcaccattttttcttcttttcaaatgagtatatttatgcttacaattttatctcttggtggatttcttatatatatttcgatttttgagcttcaagataagaaataa

SEQ ID NO: 417186 - DNA, 1797 bp, Staphylococcus aureus
atgacttggcgttctaaagatggagaaacgaaatcttcgtcaagtttagctagcttagacgtactgattcatgggatgttaaatccagaaaccttacttgatttaattcgatattttgtattattccaagataatggtaaagggcatatcagtaaaattctagcagcgtatcatcaatactatgctgttaataaagctgttgatagagctttattagcttcatctgggcgaggtgatggtaaaggcggcgtcatttggcatacccaagggtctggtaaaagtttaaccattgtctttttctctggaaaattaattcaaatgcttaataatcctaccttagttgtcataacagatcgtaatgatttagataaccaactatacagtacgtttgttaaatcaaaaggtcgctctggtaaaggattattaagacaaacaccaaaacaagctgaaacacgtaaagaattaaaatcgttattatctgttgagtcggatggtattgtatttacaacaatgcaaaaatttgaacctgaacaaaatgaaacgaccatggcgtccctaacagaacgtaaaaatgtgtttgttatggcagatgaggctcatcgtacacaatatggttttaatgcaaagtacgatgatagaggcgaaggcattaaatatggttatactaaatatttaagagatgctttaccgaatgcaacattcgttggatttacaggcacacccgtagcttcaacggataaaaatacgcaaatggtctttgggaactatatcgatgtttatgatatgacacaagccgtagctgatggaattacagttaaaatttactatgaaagtcgcgtaattccattaaatttacctcaaaatttagacttagacgaagcatataatgacattacagaagatcaaaaagaggatgtaaaacagcatttaaaatcaaaatggtcacgaattgaagccttagcaggcgcaaaacctcgtgtagaagctttagccaaagacatcatccaacattttgaaacacgtcagcaagcgatgaaagctaaaggaatgatcgtaacgatgagtcgtcgaattgctgttgatttatacgatgaaatcattcgtctaaaaccggaatggcatttggatgatgatgataaaggtgttattaaagtagtaatgacaggctcatctagtgatcctgcttctttccaaagacatattggtcctaaaaaacgtcgtaatttattagaaaaacatatgaaagatgtgaatgatgaattacaactcgtgattgttcgagatatgtggctgacaggatttgatgttccttccatgcatacgatgtatattgataaaccaatgaaaggccataatttgatgcaagcaattgctcgagttaatcgagtgtttaaagataagccgggtggattaattgtcgattatatgggtatcgccgaaagtttaaaagaagcacttaaagaatatacagaatctgatcaagctcaaacgacaatagatacagataaagcggttgaattgatgttattgaagtatgatgtgattcaagatatgttatataatcttgattattctaaatttaattcagataaaaaatcagaacgttattatacaatatcgaatacgatggattatgtgattggtttaggcgaagaagaacgccaacgttttattaaaacggtcacagagttaggtaaagcctttgcgctttgtgcgactgaacctacagcccaagaactcaatgatgaaattgccttctttaaagcggttaaagcaggacttgttaaattgttataa

SEQ ID NO: 417187 - DNA, 627 bp, Staphylococcus aureus
atgattgatagtgagttaggtgaaatacctttaaattggaatattaattcattaaaaaatatagctgatattagaacaggatacgcgtttaaatctagtgaatatatttacagtagtaaattatcagtcttaagaactttaaatatatctaaaactagctgcttaattgagatgaataatttaaaatttgtttctaatgattatataaatataccaaaatataataaatattcattggaaatttttgatactttattagtaacagttgggggatctataggtaatataggtattattacagaatctaatttaccatctttacaaaatcaaaatatgtggagatttagaactctcaattcaaagataaataatcatttgatttataatataataaaaataataaataaaaatataagtaaccaaacatcaggttctggtagagaattttacactaagaaaatatttgaaaattttaaaattgctttacctaatttaaatcatccaatgttattaaaagcaaatcaaattcattcaactcttttcaataacattagtaatcttaataaagaaactaataatttagtaaaattacgagatacgcttcttccttcatcctcgttttattga

SEQ ID NO: 417188 - DNA, 906 bp, Staphylococcus aureus
atgaaagatgttatttatgtagaaaaccattactttgttaccgtgaaagaaaatagtattaaatttagaaatgtaatagataaaagtgagaaattttatttgtttgaagaaatagaagcgattatttttgatcattataaaagctatttttctcataagttagtaattaaatgtattgaaaatgatatcgctattattttttgtgataaaaagcactctccattaacgcaacttatttcttcttatggtatgactcatcgtcttcaaaggattcaaagtcagtttcaattatctgggagaactagagatagaatttggaaaaagattgttgtaaataaaattattaatcaatcaaaatgtttagaaaacaatttacataatgagaatgtgaagttattagtaaacttagcaaaagatgttagttctggagataaaagtaataaagaagcacaggctgcaagaatttattttaaagatttatatggtaaacaatttaaacgtgggcggtacaatgatattattaattcagggttaaattatgggtattctatacttagatcttttattaaaaaagaactagctttacatggattcgaaatgagtttaggtattaaacatcactcaaaggaaaatccttttaatttagctgacgatattattgaagtttttcgtcctttcattgataatatagtgtatgatatagtttttaaaaataatataaatacttttgatataaatgaaaagaaactattattaaatgttttatatgaaaagtgtattatagataaaaaagtagtgagattactcgatagtatcaaaatagtcgtacagtcgttaattaaatgttacgacgaaaatacgcctacgcctttatctctacctaaaatgattgaggtggggaactaa

SEQ ID NO: 417189 - DNA, 306 bp, Staphylococcus aureus
atgtatttattagttagttttgacttacctagagatactaaatttgaacgtaagatggcaagtgtgtatcgtactcgattattagaactcggttttagtatgaaacagtttagtttatacgaaaggtatgtcagcgatgttcagaaaaaagataagattttagaaattctacaacaagaaattcctgatactggaagtattactctatatgtcttacctgatgaggtaaacaatagtcagattaccatattaggaaaagaggttaaggttgttgtgagaaaagaacctaagctaatttttctataa

SEQ ID NO: 417190 - DNA, 2274 bp, Staphylococcus aureus
atggataaaaaaacgactttaatgtatggttctttactacatgatataggtaaaattatctatcggagtaacgatcatgcatttgcaagaggaacgcattcaaagttaggacacaaatttttgtctcaattttcagaatttaaagacaatgaactaatcgatagcgttgcttatcatcattataaagaacttgcaaaagctaatttagctaatgataatacagcttatattacctatattgccgataatattgcgagtggtattgatagacgagatattatagaagagggcgatgaagaatacgaaaaacaaccatttaattttgataagtatacacccctatatagtgtgtttaatattgtgaattctgaaaaattgaaacaaacaagtgggaagtttaaattttctaatgaaagtaatattgagtatcctaaaactgagaatattcaatattcaagtggaaattatacagcactaatgaaagatatgagttatgatttagagcacaaattaagtattaaagaagatacatttccttcattattacaatggacagaaagtctatggcaatatgtgccaagttcgacaaataaaaatcaattaattgatatttctctttatgatcatagtcgtattacatgtgctattgccagttgtatatttgattatttaaatgaaaataatatacataattacaaagatgaattatttacaaagtatgaaaataccaaagcattttatcaaaaagaagcttttttactacttagtatggatatgagtggtattcaagattttatttacaacataagcggttctaaaacattaaaaagtttaagatctcgtagtttttacttagaactcatgcttgaggtaattgttgatcaattactagaaaaattagaattaacacgagcaaatcttttatacactggtggcggtcatgcatatttattagtctctaatacagataaagtgaaagaaaaaataaatcaatttaatactgagttaaaaaattggtttatgttagaattcacaaccgatctctcattatcaattgcttttgaaaaatgtagtggcaatgatttaatgaataccaatggtaattatagaactatttggcgtaatgtcagcagtaaactttctgatattaaagcacataagtattctgcagaagatatattaaaattaaatcattttcattcatatggagatcgagaatgtaaagaatgtttaagaagtgacatagatattaatgatgatggattatgcagtatatgtgaaggaatcattaatatatcaaatgacttaagagataaatcattctttgtactatcagaaactggaaaattaaaaatgccattcgatagatttatatcggttatcgattatgaagaagcagaaatattagcacaaaataataatcagattcgtatttacagtaaaaataaaccttatattggtgtaggaatatcaacgaatttatggatgtgtgattacgactatgctagtcaaaatcaagatatgagagaaaaaagtattggaagttatgtagaaagagaagaaggtattaagcgtttaggcgttgtacgtgctgacatagataatcttggcgctacatttatatcagggattccagaaaaatataattcaatttcaagaacagctacgttgtctcgtcaattatcattattttttaaatatgaattaaatcatttgttagaaaattatcaaattacaactatatattcaggtggcgacgatttatttttaattggcgcatgggatgacattatagaagcaagcgtttatataaatgacaagtttaaaaagtttacgcttggtaaattaacaatgtctgctggtgttggaatgttcagtggcaagtatccagtttctaaaatggcttttgagacaggactacttgaagaagcagctaaaactgatgaaaaaaatcagatagcactttgggtgcaagaaaaagtatataactgggatgagtttaaaaagtatattttagaagaaaagcttctcgttttacaacagggatttttgcaaacagatgaacacggaaaagcatttatatataaaatgttagcattattaagaaataatgaagtaattaatatagctcgattagcctatttattagcaagaagcaaaatgtcagaggaatttacatctaaaatttttaattgggctcaaaatgacaaagataaagatcaattaattacagctttagaatattatgtttatcaaataagggaggctgattaa

SEQ ID NO: 417191 - DNA, 426 bp, Staphylococcus aureus
atgatattagctaaaacaaaaagtggtaaaacgatagatttaacttttgcacatgagattgtaaaaaataatgtgaaaaatgttaaagatcgaagaggcagagaaaaacaagttttatttaacgggcttacaacaagcaagttaagaaatttaatggagcaggtgaatcgactttatactattgcctttaattcaaatgaagatcaattaaatgaagaatttatcgatgaattagaatacttaaaaattaaattttattacgaggcaggtcgagaaaaaagcgttgatgaatttttgaaaaaaacattgatgtttccaattattgatagagtgatacaaaaagaatcaaaaaaatttttcttagattattgtaaatattttgaagctttagttgcatacgctaaatattatcaaaaggaggattaa

SEQ ID NO: 417192 - DNA, 645 bp, Staphylococcus aureus
atgtattcaaaaattaaaatttcaggaacaattgaagtagttactggtttacacatcggtgggggcggtgaatctagtatgattggagcaattgattcccctgtagttagagatttacaaactaaattacctatcatacctggcagttcaatcaaaggaaaaatgagaagtttattagcaaaacattttggcttgaaaatgaaacaagagaatcataatcaagacgatgaacgtgttttaagattatttggttcaagtgaaaaagggaatattcaaagagctcgtctacaaatttctgatgcattcttttctgaaaaaacgaaagagcattttgcgcaaaatgatattgcttatacagagacgaaatttgagaatgcaattaatcgtttaactgcagttgcaaatccaagacaaattgagagagtaacaagaggatctgagtttaactttgtacttatttacaatgtcgatgaagagtcacaagttgaggatgattttgaaaatattgaaaaagcgattcacttattagagaatgactatcttggtggcggcggcaccagaggcaacggacgtatccaatttaatgatataaatatcgagacagttgttggagaatacgacagtacaaatcttaaaattaagtag

SEQ ID NO: 417193 - DNA, 909 bp, Staphylococcus aureus
ttgacaacaaaagtatttaaactttcttttaagactcctgttcattttggaaaaaaacgtttgtcagatggggaaatgacaataacgtctgatactttgtttagtgctttatttattgaaacgcttcaattgggtaaagaaaccggttggttattaaacgatttaatcattagtgatacatttccttatgaaaatgaactttattatcttcctaaacctttaataaaaatagaatctaaagaagaaggcaaccataaagcatttaaaaagttaaaatatgttccggttcatcactataatcaatatttaaatggtgagttaagcgctgaagatgcgacagatttaaatgatatttttaatattgggtatttttctctacaaacaaaggtttcattatcagcacaagaaattgattcaagtgctgacagtgaaccttattcagtgggtacatttacttttgaacctgaagctggtttatattttattgcaaaaggatcagaagaaacacttgaccatttaaaagatattatgacttcattacagtactcgggtttaggcggtaaacgtaatgcaggctacggacaatttgaatatgaaatggtaaataatcaacaattgtttaaattattgaatcaaaagggagaatattctattcttttatcaacggcaatggctaaagaagaagagatagagagtgctttaaaagaagcgagatatattttaaataaacgttctggttttatacaatcaacgaattattctgaaattctagttaaaaaaagtgatttctatagcttttcttcgggttcagtttttaaaaatatctttaatggcgacatttttaatgttggacataatgggaaacatccagtctatcgctatgcaaaaactttatggttggaggtataa

SEQ ID NO: 417194 - DNA, 1023 bp, Staphylococcus aureus
atgacaataaaaaattatgaagttgttattaaaactttaggtccagttcatattggtagtggtcaagttatgaagaagcaagattacatttatgatttttataattctaaagtttatatgattaatggcaataaactagttaaatttttaaaaagaaaaaatttacttgatacatatcaaaactttttgagatacccaccaaaaaatccaagagaaaatggactgaaagactatttagacgctcaaaatgttaagcaaagtgaatggaaagcatttgtgagttattctgaaaaggtcaatcaaggcaagaaatatggtaatatacgtcctaaaccgctaaatgatttacatctaatgataagagatgggcaaaataaagtgtatcttccaggtagttcaattaaaggcgctatcaaaatagcccttgtatcaaaatatgataatgaaaaaaataaagatatttatagcaaaattaaagtcagcgattcagagcctatcgatgaaagtcatttagcgatttatcaaaaaatagacattaataaaagtgaaaaaccaatgcctctatatagagagtgtgtagatgtagatactgaaataaaatttaagttaaccatcgaagatgaaatttattctattaatgaaattgaacaaagtatcagagatttttacaaaaactattatgacaaatggttggtcggttttaaagaaacaaaaggtggaagacgatttgcattagaaggtggtatgcccgatgttctaaaccaaaatattttattcttaggagctggcgcaggatttgttagtaaaacgacacattatcaattaaaaagtcgagaacaggcgaaaagagattcttttaaagagttaactaaaaaattccgtagaacttatggaaaaatgaaagaaataccttctaacgtacctgttgctttaaaagggacaactaaccaaagtcgtcgtacttcataccagcaaggtatgtgtaaaataagttttcaagagttaaataatgaggtgttataa

SEQ ID NO: 417195 - DNA, 1269 bp, Staphylococcus aureus
atgaaagtactatttagtccaataggtaattcagatccatggagtaatgatagagatggtgcaatgcttcatatcgtacgtcattatcaacctgatatagtagttttattttttactgaaagtatctgggaaggtaataaaaatatacctggacgtaaaaactttgattgggaaagtattattttaaaagtatctccaggaacaaaagtaaatataaaagttgataacattaaatatgaaaatgattttgatagctataaagacttatttcacttttatataaatgagataagaactgaatattccgaggcagaaattttattaaatgttacaagtggcacgccacaaatggaatctactttatgtttagaatacatttctaaccctaataatatgcaatgtatacaagtttcaacgcctgcgcctactgaagggcctagacgttcatttgcgaaacctgaaactttgattgaagatttaaataaagttaatgataatgaaaaagttgctactaatagaagcaaatcaattgatattataagttttagagaagttatggtgcgttcacagataaaaggtttagtagataattatgattatgaaggtgcgcttaatttagtaagtaatcaaaagtcttttcgtaatggaaaattattaagaaaaaaattattagctttaacaaatcaaattaaaacacatgaagtctttccagaaattaatgtgaaatataataatgcagctttaaaaaaatcattgtttcattatttactagtaaatatgagatataatcgacttgatgtggctgaaacattaattagagtgaagtctattgctgagtttatacttaaaacatatcttgaaaatcattggactcatttaatgattgaaattgacggtaaaccatacttaaatgctgaagataatttatcttttatttacaaatataaattattattagaaaaaagaaaacagaatttagatacctcaagaattttaggtcttccagcatttatagatatgcttagtattttagaacctaagtctaaattattaaaagaagtaaaagcagtgaatgatatcaatggattaagaaattctatagctcacaatttagaagcgttaaatctagataaaaataaaaattataaaaaaattatgttatctgttgaagctataaaaaatatgctgaatatttcatttcctgagatagatgaacaagactataattactttgaagaaaaaaataaggaatttaaaaaattattatga

SEQ ID NO: 417196 - DNA, 735 bp, Staphylococcus aureus
atgataaacaaaattacagtagaattaaacctaccaaatagtattcgttttcaatatttaggaagtattttacatggcgtgttaatggattatcttcctaatgatattgctgatcaactacatcatgaatttgcttatagtccattgaagcaaagaatatatcataaaaacaaaaaagtaatgtgggaaattgtttgtatgtcagatagattatttaatgagatagccaagctattcacttctaaaaataggttgtttttaaaatattaccaagtttatattgagatttattcttttaatattgagaaggtaaacgttcaaaatattatgaatcaactcttgcaaacagaagaattgaatcgttatgtaagaattaatatacagacacctatgtcttttaaatatcagagtagttacatgatttttcctgaggttaaacgtttctttagaagtattatgatacaatttgatgctttttttgaagaatataaaatgtacgataaagaaacattagattttttagaaaagaatatcaatattgttgactataaattgaaaagcacacggtttaacttagaaaaagttaaaattccttcatttacaggagaaatagtgtttaaaattaaaggaccattaccttttctacaattaactcattttttattgaagtttggtgaattttctggatcaggtatgaaaacaagcttaggcatggggaaatatagtataatataa

SEQ ID NO: 417197 - DNA, 774 bp, Staphylococcus aureus
atgaattactcaaaaataacagtaactctaattattatattactttgtactttctcatttgaattttccttcaaccgctttgttcaagcagatgaatctagacctaaaatagaaagcctaaataaaaaatctgaattagattcaaccgcactatataatattaaaacttcatattcgcaggacaatattattttagatattaaaaataaaacaaactccacacaactattatcaaacgatttaatatttgatgatattacacttaaagaatggaataaaaacagcctaaaaactgagtttaatagttcagaaatagccaatcatttcaaaggaaaaaaggtagatatattcggaatatactatggggcaaattgcattggagaagtatctaaaagaaccggttgtatatatggcggaataacacttcatgaagaagaaaaaatagaccaaaagaattcaataggtgtgaatgttttcaaagatggctctcaacaaaaaggttttatgattactactgacaaaaaggaacctacaattcaagagttagaccttaaaacaagaaaagttattcaaaatcaatataaaatatataactcagagacaggaaacatacaaaaaggatatatggaattccactctaattcatccagtttttattatgatttatttaattttaaagggaaatatagtgtagatttcttaaaattctacaatgataataaaactataaactcttcaaatttacacatagacgtttatttatattcccaataa

SEQ ID NO: 417198 - DNA, 1260 bp, Staphylococcus aureus
atgtgtataagagacaggtataataatatactttatttcaaagaatatataggagaatttgaggttgacaatgaaaaatatatggtcacaagcaacacccttctaacatatttaaattcagaaaatcgaaaaattagaaagaacgcatatgaggctgtaataaactttttttctaaaaaagaagtagaagctgcatttttagttaacttaaattatttgattaaaaataagatggcaaatgctaatggatttgatacctattttgaagaagttatagaaaatcattttatatctattaataatccttcattttttgaagtatcacataatgtgaaaaaaatatttaaaaagagtttggatataagaagacaaatattagggttagaaaaaatatcgcattttgatatgtattattttggagagcataaatcgcatatatcatacaaagaagctcaaaagattattaaagaagctttgaaacactttggagaagaatatcttggaattttagataagatatttaaagagaattggatacatcatgaaagctcttcattaaaaaagtttggcggtagatcatacagttctataaacactcatccatatatcattattaattggaataatgatatagatagcctgtttgctttaattcatgaaataggaggtgctgtttcacaatatttagcacaaaacagttgctctattgtatattcagaattatcagaggcaaaagtagaatttatgtctgtactaaacgaatatatgctaagtaagtatttattagaaaataatgtaaaagaaatagatagaaatgaagcatttattagagtactagaatttttaaaagatgatttttttgttccttatgagtatatgaatttattatattctttttcacagaattctacaaaattccctctaacacacgaaataatagatgaagaatatgataaagtaataaaagattttagagatttcaaacattttgaaaacataaatttaaacaagaaaaattggattaaagctcatgatcaattatctatagaatataatctgaattatatatgtgcatttatattggttctgaattttgatattaataaattcaataaggttattaatttatgcaaacaaggagaaatacagagcgacggagattttttttatgaaatttttgaaagtcagttagacttcattaatttaaataaaaacgcaataaagtggataaacaatttaattgatagctatatgaaataa

SEQ ID NO: 417199 - DNA, 501 bp, Staphylococcus aureus
gtgaatattcgaattttaaataaaaatgatgtaaatgaatttagagaattaagacttaaaggtttaaaaactgatgcaactgctttcgggtctacatatgaaagagaaaatggttttactttggaaaaatttaaaacacgtttagaagaatcagattcaaaatttgttgtaggaggatttgatgatggtagtcttgtgtgtatagctactttcattagaaaagatggggaaaaagataagcacaaaagtatgttggtaggtatgtactgcagcaaagaatatagaggaactggaatagctaaaaatgtggttgagtttattttagaaaaggcgagaaatttggaaggactcaaaataattaatttgatggtcgtttcagaaaatttgagagctaaagctttttatgagtcatttggttttaaaaaatatggtactgaaccaaaatctttgtttgatgaatctaaatattatgatgaagatttaatgtatttagaattttaa

SEQ ID NO: 417200 - DNA, 333 bp, Staphylococcus aureus
gtggcaccggaaaaacgaccatcagtaattaatgcaacatctttacctaagccacgaccaacaatagaggaagtaggtgctaacatttcaggcatacctggtccaccttttggtccttcatatctaatgacaacgacgtggcctgcacgaacggtacgattgtctattgcttcaacagcttcatcatgcgaattgaaacaaattgctttcccagtaaatgttttgatagatggatcaacgccgccaactttaataactgcgccttttggtgcgatattaccaaataagatagataaaccaccttgtgcatcatatggtgcatcaagagggtga

SEQ ID NO: 417201 - DNA, 735 bp, Staphylococcus aureus; identical to SEQ ID NO: 407375

SEQ ID NO: 417202 - DNA, 660 bp, Staphylococcus aureus
atgtgtataagagacagtgataatatctttgaaatcggctcaggaaaagggcattttacccttgaattagtacagaggtgtaatttcgtaactgccattgaaatagaccataaattctgcaaaactacagaaaataaacttgttgatcacgataatttccaagttttaaacaaggatatattgcagtttaaatttcctaaaaaccaatcctataaaatatttggtaatataccttataacataagtacggatataatacgcaaaattgtttttgatagtatagctgatgagatttatttaatcgtggaatacgggtttgctaaaagattattaaatacaaaacgctcattggcattatttttaatggcagaagttgatatttctatattaagtatggttccaagagaatattttcatcctaaacctaaagtgaatagctcacttatcagattaaatagaaaaaaatcaagaatatcacacaaagataaacagaagtataattatttcgttatgaaatgggttaacaaagaatacaagaaaatatttacaaaaaatcaatttaacaattccttaaaacatgcaggaattgacgatttaaacaatattagctttgaacaattcttatctcttttcaatagctataaattatttaataagtaa

SEQ ID NO: 417203 - DNA, 270 bp, Staphylococcus aureus
atgggatatggtttacctcaaattttagaaaaactaaaatgctttaagcctcaattaattaagtttgtgctacaaggtgaaaagagaggaaagctagaagtagaactaaagctatattcgcaaatattagtgaggcaaatagaggataaagcgataaaacagactcagtttttacagcctattttatttttgattttaggtttatttattgtcgcaatttatttagtaattatgttaccaatgtttcaaatgatgcaaagtataaaataa

SEQ ID NO: 417204 - DNA, 597 bp, Staphylococcus aureus
atgtcccaagctcaagagcgtgttggccttaataaaccaaatagattatatttattaaaaccaaattatgatattgaagcaagtcttaccaaggaacttccaaattcacagtctaatgatactgagttaaataatactaattatatagaaaacgaggataatgatacgtatgatatgaatgatattatatctaatactttaataaataataatcatcattcgaatcatacaaatcatcaaaaaactgaatttaataatgacgcccttaagttccaagtactcgaagaattgccacaacaacttcaagactatttaagtaaatttgaaattagagaaattcggattattaaaagcgtattactcaaagggaaaaagtcatttaatacttcacatgatacttattatcgtttagaagatgttgagtttgaaattgtaagtgtattgaaacgttttaaagcgatgttgctacaaaagaatgaaaccgttgaagctatgcaaggttatttaatgcaatccattaaagctgaacttgaagaaacacatgccctttatatgcgccgtaaaaacatgaaacaatataatatctttaatcaataa

SEQ ID NO: 417205 - DNA, 297 bp, Staphylococcus aureus; identical to SEQ ID NO: 408223

SEQ ID NO: 417206 - DNA, 216 bp, Staphylococcus aureus
ttgaagaggtctttatttattttacaaattattcttggtatttttttattgttttttatttataagcaaatgaatcaaaatcatttagatacttggtttattctttatacagtcttttttatatttttttcatcgtggtttgataaacattataaaaaaatagacgacgcatttatgccgagaaaatttattgtgttgagaagaacccttaactaa

SEQ ID NO: 417207 - DNA, 369 bp, Staphylococcus aureus
gtgtataagagacaggaatacgggtttgctaaaagattattaaatacaaaacgctcattggcattatttttaatggcagaagttgatatttctatattaagtatggttccaagagaatattttcatcctaaacctaaagtgaatagctcacttatcagattaaatagaaaaaaatcaagaatatcacacaaagataaacagaagtataattatttcgttatgaaatgggttaacaaagaatacaagaaaatatttacaaaaaatcaatttaacaattccttaaaacatgcaggaattgacgatttaaacaatattagctttgaacaattcttatctcttttcaatagctataaattatttaataagtaa

SEQ ID NO: 417208 - DNA, 297 bp, Staphylococcus aureus
atggcagaagttgatatttctatattaagtatggttccaagagaatattttcatcctaaacctaaagtgaatagctcacttatcagattaaatagaaaaaaatcaagaatatcacacaaagataaacagaagtataattatttcgttatgaaatgggttaacaaagaatacaagaaaatatttacaaaaaatcaatttaacaattccttaaaacatgcaggaattgacgatttaaacaatattagctttgaacaattcttatctcttttcaatagctataaattatttgggaagtaa

SEQ ID NO: 417209 - DNA, 297 bp, Staphylococcus aureus; identical to SEQ ID NO: 408223

SEQ ID NO: 417210 - DNA, 1053 bp, Staphylococcus aureus
gtgaatagtacaatttcaaaattcaaagatcagcatgtcattacattttcattagaaattgttaatgaacgttatttaagaaacggtgaatcattatttaatcaaggattagatttattacaagaaatcatttggaatccattaattgaaaataaagcattcaatgataattttgttaaccaagagaaaacattattagccaaaaaaatagaagcaatggtagataacaaagcacaatattcgtttttaaaattactcgaccatatgtttgaaaatgaagcatacaaatacttatctacaggacaactagaacaaatcccacatattactgctgaaacactatatcatacatatcaatcaatgattaataatgatcaatgttctgtttatgttgtcggcaatgtagaacctgaaagtgttgagaaccaaatacgtgaaaaatttgcacttaaaccattcgataaacatcaattccaacattctactcatcatttacacgatgaagaagttgattatattgttgaatatgatgacgtggatcaagctaaattaaatatgggataccgttttccaacacaatatggacaaagtggatatgctgcctttgttgtatttaacatgatgtttggaggagatccttcatctgttttatttaatgaagtgcgagaaaagcaaagtttagcgtactctatacactcacaaattgatggcaaaaatggctatttatttgttttgagtggggtttcaagtgataagtacgaaactgcaaaagacactattataagtgaatttgaaaaaataaaagcaggagatttcactgaagaaaaattagagttagctaaaaaagtaatcatttctcatcgatatgaatctgaagatcgtccgaaaagtattatagagattatgcataaccaaatattattagagcaaccacaaagcaaagaaacatttataaatgatatacagaaggtaagtcgcgaagatattgtttctgttgctgaaaaagcatttttagatacaatctatgtgttgacaaaaggaggggataaataa

SEQ ID NO: 417211 - DNA, 570 bp, Staphylococcus aureus
ttgaatctgagtaaacaaattaaaaagtatcgggaacgagatggatattcacaagaatatcttgctgaaaagttatatgtatctaggcagagtatttctaattgggaaaatgacaaaagcttaccagacatacataacttattaatgatttgcgaattgttcaatgtaactttagatgatttagtaaaagggactattccatttgtacctgatattaaagtgcaacgaagccttaacttatggacatatgtgatgcttattttcataacattagctgcaattttaatgggacctttagttgtttattggaattgggcttggggtataacggtgatagtcatttatggaataggtttttatgcatctatgaaaatagaagactttaaaaaagtgcataaaatggataactacgatcgaattgttgcttttatgaatggaaaagatcctagtgaagtacaaacgactaaagctagaaatataaaaacaggtgtactttctttcatagcatttgttggtgcaatcattcttatagctttgattagtatgcatctggcaaataagtttttataa

SEQ ID NO: 417212 - DNA, 405 bp, Staphylococcus aureus
atgaaaaaatcagctgttttaaatgaacatatttcaaaagcaatcgcgacaattggtcattttgacctattaacaattaatgacgctggcatgccaattccaaatgatcatcgccgtatcgacctagctgtcactaaaaacttaccacgctttattgatgtcttagccacagtgttagaagaaatggaaatccaaaaaatatacttagcagaagaaataaaagaacataatcctacacaattgcaacaaattaaacaattgatttcatcggaaatcgaaatcattttcattcctcacgaagaaatgaaaagtaacttagctcacccattaaataaaggtaatattcgtactggtgaaacaacgccctactctaatattgcattagaatcgaatgttactttttaa

SEQ ID NO: 417213 - DNA, 915 bp, Staphylococcus aureus; identical to SEQ ID NO: 410370

SEQ ID NO: 417214 - DNA, 762 bp, Staphylococcus aureus
atgtctaaagaagctggtcatacatttttagctaaattaggaaaaactcgtctacgccccggtggtaaagaagcaacagattggttaatacaacaaggggcattttcacaagataaacaagtgttagaagtggcatgtaatatgtgcacaacatctatttatctagctcatacatatggctgtcacattcaaggcgttgatataaataagaaagcattagaaaaagcacaggaaaatatttcagcagcaggtcttgaatcatatattcaagttcaacaagcgaatgctgttaaattgccctttgacgacaatcaattcgatatcgttttaaatgaagcaatgttaacgatgttacccatcgccataaaggaaaaagcattacgcgagtactaccgagtcttaaagcctggggggatcttgttaacacatgatattgtcatcgttaatgaatcacatgccacacatgtagttaaatcattatctgcagcaattaatgtcaatgtctcaccgcagacgaaacttggctggttagatttatataatcaagctggttttaatcatgtgcattatcatactggtccaatgagtttaatgacaccaaaaggtttaatttatgacgaaggtattgttggaactataaagattatcaacaatgctttaaaaaaagaaaatcgaccaatgttttgtaaaatgtttaaaacgatgactaaattgcgtaaagatatgaattatattacttttgtcgctaaaaaagagcactaa

SEQ ID NO: 417215 - DNA, 291 bp, Staphylococcus aureus
atgactatgtcaataccaattaatttacctacaaacagtactattattaatgaattatgtacattacaaagtagagccatcaatataaaaggagaggttttaataactgaaatatatgatgattacttttttaaaaatgatgagtggcacatttcagcttttaacaaattcaagcaatttcaagatagtatcaagaactatagagacaaaagaaaaaatgttttctttaggattaaaaataaaaatttgaatttagaatttaaatacctttttttgaaactgatactttaa

SEQ ID NO: 417216 - DNA, 270 bp, Staphylococcus aureus
atgaagcaacctattttaaataaattagaaagtttaaatcaagaagaagcgatttctttgcatgttccgggtcataaaaatatgactatcggtcatttatctcaattatcaatgacaatggataaaactgaaatacctggattagatgatttacatcatcctgaagaagtcattttagaaagtatgaagcaggtggagaaacattcagattatgatgcttatttcttgccattaatatatcgccttttttctgtgaaaaagactgtatga

SEQ ID NO: 417217 - DNA, 333 bp, Staphylococcus aureus; identical to SEQ ID NO: 417017

SEQ ID NO: 417218 - DNA, 1377 bp, Staphylococcus aureus
atgactaaaaaagaatacaaaatagatccaggaaaaataaaaagtaattcggaagaaactagtgcaattgctagtattagttatgaaattgaaaatgcaaatgataatggtttaaataaagcaagaattacagaacaggttacttacttaaaaaatcaggataagtttcctaaaaacttagactacatcgaaagttatacagatcccagtacggggaccacggcaacggcatttttaaataaagatacaggtaaagttactgttggaatggctggtacaaactttcacggcgatcaacttaaaagagtagcacttagttcgatgtctccgttattattcccaccctctaagcaagatatgaaagatgtacgaggcactatgaaggatggtgtagcggatctagccattggagtaggaatggtcaattataaaggaaaacattttgcaaatacacagcagtttattgagaatttacaaaaaaagtacgaaattgataccgttactggtcattctttaggagggagagatgctatctttcttgggcttcgttataacatcaaaaatgttgtggcatacaatcctgctccgttagaagtaaaaagcattcgtaataaatttggtggtcaattgtttagaaatacgacatttccagatgaaaaatatttaaaagagttaatggataattatgatggagatattactaaggttataactcaaaaggatggattagactatttagtgaagcgtacagatcatttaacttgtggcgatgtgttacgtataaacaatggtcagggccatgcgatggagaattttttaggagaaaaagaacaacgtgaaataatcgaagaactaatgttagtaaaaggatatcgcgatgcaaatgacaaagcatttaaggctttgaaaaaaaatactgagaaaaaactcggtaaaatagatgaaataaaatcgaagttactgcaaacgaacggtggcgccctctcgtcttctcaacaaaaattgcttgaaactttagtggcattttcggtagctgaaggactaagtaaaatggttgaccaagaacttcagcagttgaaaaatatgttcaatcttatggatgagaaatttgaagcaaattggaaagacgcacaagaagctagtgatattgtaggtaaacatctttcatacccagaaaaggtaagtgcattagataacggtggtgtcaatgaaagtaaacttgctaccgaaccacataatgaaataaaagacaaactaaataaaattacggacttatctaagaaatataattcgtatttacagcaaatcgaaaaaagtattaatgaaatagttgctaaggatcaacaattggcagggcaaataggtgatttaatatga

SEQ ID NO: 417219 - DNA, 447 bp, Staphylococcus aureus
atgatacctgttgcattttcaatatcttgttcagttaaatggtttttaatgccgcttgaaccgttcgtttcaactttaattttaatacccattttatccgcttgctttttcaatgcatcacgtgccatatatgtgtgtgcaatacctgttggacaagcagttactgctaacacatatggctcattagattgtttagatgattgttctgcagttgcaacttgttgcgcttcagcttctgcctcttcttcttttgtcacttcatcatcagcctcatctatgatcgctagtacttcttcaggtgatgaagcatgtaataatttctcacgtacattttcatccattaaaataccagacaacttagctaaagcatctagatgtgtttgggcgccaccttctggcgctgcaatcataaagaataagtgtgctggttgcatatccaaactttga

SEQ ID NO: 417220 - DNA, 333 bp, Staphylococcus aureus
atgaatatagtagggcatcatcacatatccatgtatacaaaagatgcaaaacgtaataaggatttttacacaaatgtccttggattacgattagttgaaaagtcggttaatcaagacaatccttcaatgtatcatttgttttatggggacgaagtaggtacagccggaacaattttaagcttttttgaaattcccaatgcgggtcataagcagccaggtactgaaacgatttatcgattttcattattagtaccaaatcaagcggcacttcattattttgaaaaacgtcttgagaataatggtattaagtctgaacgtttgtactatctttga

SEQ ID NO: 417221 - DNA, 1065 bp, Staphylococcus aureus; identical to SEQ ID NO: 410066

SEQ ID NO: 417222 - DNA, 195 bp, Staphylococcus aureus; identical to SEQ ID NO: 414048

SEQ ID NO: 417223 - DNA, 1206 bp, Staphylococcus aureus
atggttaagaaagtttttattatggatagcgtaaagacaataattggtacgttgcttatagctttaggattacaatttttagcttatccaattattaatcaacgagtaggtaatgaagcgtttggttctattttaacgatttatacaataataacaatcacgagtgttgtattaggcaatacgcttaacaatatacgattgattaatatgaatctatacaaatccaatcattactactggaaatttgtgtcgatacttttaatttcaattctgattgagagtatagctttaattattgtatttctttacttttttaatttgaacaccatcgatattatctttttaattctacttaatattttaatgtgtttaaggatttatctgaatgtattttttaggatgactttaaaatataatcagattttgtatattgctcttattcaatttttaggtttgctgataggactatttctatattatttaatccaaaactggattgtttgttttattaccagtgaattgtttgcaacgatatatacattggttaaattacggggattaactataggcgagtatcaaagtgaagataataatgtggtcaaagattatgtgatgctactgagtacaaatagccttaataatttgaatctctacttagatagattaatcttattaccaattataggtggaacagctgtaactatatcatttctctcaacatttattgggaaaatgttagctacatttctgtatccgattaataatgtagtactttcatatatttctgtaaatgaaagcgacaatataaagaagcaatatttgaaaactaatctatttgctatagctgccctatgtttagtcatgattatatgttatccaattacaataattattgtctctttactgtataacattgattcaagtttatattcgaagtttattattttaggtaatataggtgttttattcaatgcagtgagtattatgatccaaactttaaatacaaaacacgcatcaataacattacaagcgaattatatgacgcttcacacgattacatttatattcataactattttaatgacaattgcgtttggtctaaatggattcttttggacaacgctgttcagcaacattattaagtatgtgattttaaatattataggtttaaagtctaaattcattaataaaaaggacgtcgattag

SEQ ID NO: 417224 - DNA, 504 bp, Staphylococcus aureus
atgggtgataacatgactttcgaggaaaagttaagtcaaatgtataatgagattgcaaatgagattgatggcatgatacctgtagaatgggaaaaggtatatacaatagcctatgtagatgatcaaggtggagaggtcgtttttaattatactaaaccaggtagtgatgaattgaattattacacatatatccctagagattataatgtctctgaaaaagaattttatgatttgtggacggatttatatagattgtttaagaagttaagaaacgcatttaaagaagaaggacttgaaccatggacatcatgtgaatttgattttacaagagatggtaaattgaaagtatcttttgattatatagattggataaatacagaatttggaccattagcaaaagaaaattattatatgtacaaaaagtttggtgttttaccagaaatggaatatgaaattaataaaattaaagaaattgagcaatatattaaaagccaagaaagttaa

SEQ ID NO: 417225 - DNA, 432 bp, Staphylococcus aureus; identical to SEQ ID NO: 404859

SEQ ID NO: 417226 - DNA, 858 bp, Staphylococcus aureus; identical to SEQ ID NO: 417024

SEQ ID NO: 417227 - DNA, 1212 bp, Staphylococcus aureus
atgttaaaacttttacaacaatacgaatataaaattatatataaacgtatgctatacacatgttttatcttgtttatttatatattaggcacaaacatttccatcgtttcctataacgatatgcaagtaaaacatgagtcattttttaaaatagctatttctaatatgggtggagacgttaatactttaaacattttcactttaggattaggtccgtggttaacatcaatgattatcttgatgctgatttcttatcggaatatggataaatacatgaaacaaacaagtcttgagaagcattataaagagcgcatcttaacattaattttaagtgttattcaaagttattttgtgattcatgaatatgtttcgaaagaacgtgttcatcaagacaatatttacttaacaatattgattttggttactggaacgatgttattagtttggttagctgacaaaaatagtcgttacggcatcgcaggaccaatgccgattgtaatggttagtattattaaatcaatgatgcatcaaaaaatggaatatatagatgcaagtcatattgtgattgcgttgttaatcatccttgtgataatcacattgtttatcctattatttattgaattagtagaagtgagaataccttatatcgatttaatgaacgtttccgcaacaaatatgaaatcttatttatcttggaaagttaaccctgcaggcagtattactttaatgatgagcatttcagcttttgttttcttaaaaagtggcattcattttattttatctatgtttaataaaagcatatcagatgacatgccaatgctgacatttgatagtccagtaggtatttcagtatatttagtgattcaaatgttattgggttattttttatcgagatttttaatcaatactaaacaaaaatccaaagatttcttaaagagtggcaattatttttcaggagttaaacctggtaaggatacagaacgttatttaaattatcaagcacgacgcgtatgttggtttggatcggcattagttacagtcattattggtataccgctttatttcacattgtttgtaccgcatttatctactgaaatttatttctcagtacaactgattgtattagtttacatcagtattaatattgcagaaacaattcgtacatatttatattttgataaatataagccatttttaaaccagtattggtaa

SEQ ID NO: 417228 - DNA, 171 bp, Staphylococcus aureus
atgaaaatactagcttttgacccttacttaacggatgaaaaagcaaaatctttaagcattacgaaggcaacagttgatgagattgcccaacattctgatttcgttacattacatacaccactaacacctaaaccaattctaccagcaccaatgacacctaatgttttatga

SEQ ID NO: 417229 - DNA, 1347 bp, Staphylococcus aureus
atggcaaaacatccattcgaacaatttaatctagaatctagtttaattgacgctgtgaaagaccttaattttgaaaaaccaactgaaattcagaatcgaattattccaagaatactaaagagaacaaatttaattggtcaatctcaaacgggtacaggaaaatctcatgcatttttattaccattaatgcagttaattgatagtgaaataaaagaaccacaagcaatcgtggttgcaccaacaagagaacttgcacaacaactatacgatgcagcgaaccatttaagccaatttaaagctgacgtttcagttaaagtttttattggtggtacagatatagagaaagatagacaacgttgtaatgcacaaccacaattgattataggcacccctactagaattaatgacttagctaaaacgggacatttacatgtgcacttagcatcatatttagttattgatgaagcggatcttatgattgacttaggattaattgaagatgtagattacatcgctgcaagattggaagataatgcaaatattgcggtgtttagtgctacaattccacaacagttacaaccatttttaaataaatatttaagtcatccagaatatgtagctgtcgacagtaaaaaacaaaataaaaagaacatcgaattctttttaatacctactaaaggtgcagctaaagttgaaaagactttaaatttaattgatatactaaatccatacttatgtattattttctgtaatagtagagataatgcaaatgatttagcacgttcactaaatgaagctggtattaaagttggtatgattcatggtggtttaacgccacgtgaacgtaaacaacaaatgaaacgtatacgtaatttagaattccaatacgttattgccagcgatttagcatctcgtggtattgatattgaaggtgttagtcatgtcatcaattttgatgtgccaaatgatattgacttctttacacatagagtcggccgaacaggccgtgggaattataaaggtgtagcaattacgctttatagtcctgatgaagaacacaatatttcattaatagaagatcgcggttttgttttcaatactgttgatattaaagatggtgagttaaaagaagttaaagcgcacaatcagcgtcaagcaagaatgcgcaaagatgaccatttaactaatcaagtgaagaacaaagttcgaagtaaaattaaaaacaaagttaaaccaggttataagaagaaatttaaacaagaagttgaaaaaatgaaacgtcaagagcgtaaacaatttagtaagcagcaaaatagacaaaaacgtaagcaaaacaaaaaaggttag

SEQ ID NO: 417230 - DNA, 924 bp, Staphylococcus aureus
atgcaaatcttattatgcacatcaatcatagtaagcggttgctctttcataccaaagtaccaaacaaaagatattccaaagacggttagcgtcaaagattatgatggtcaatatattggtgaacataaaaaaagaaatgaagtatttctgaaaaaacataaagatgaagcaatcaaaaaatacaaagactacgtgaaagacacctttggttatgattgtaaaattaatttagttgaggcctatactaataaatctgggtttagcgagaaaagtaagatagatggtttagtagtcgtcggcactgtcaattatgacgttccttttcagtttagactgatatttgttgagtctggaaatggcatagctatcacaacatttacacctggtcatataaatgaaacatcagcggccgtttcagccatgatgtacaaacgttatgaacatgaaattgaacaagctcgattaaaattcaaatcagaagttgagaaaaatggttattatgccatgaatgaaaaacttcaaaagaaacaagaattcaatggtgttactaaacaatttttgaatttcaacacagacagtattgatgacttaaaaaagtttaaacaagaatttaagtctgttatgcacttaaaaggagatgcattcaatcaacaattacaatctttgattaataaatatcctcaaatacaaaaaaatatggagtcagaatttattgcttattacgataaaggtgagaacagagagactgttgctaactatgtttggaacctacaaaaaacaactaatgacacaatgaaactttatccaggaaataaaagcatcatattttataaagataaagtttctgctacacaattagatgagcataaacgtttacaatcagattctcaagaaatctccatttctggaggggaaaacaattaa

SEQ ID NO: 417231 - DNA, 501 bp, Staphylococcus aureus
atgcttgatgatacactttgtgaattcactaaacttgtgcttgttgagcttgatacactattactttcagatgtgcttaatgacttagatgcactcacagaatcagataggcttacacttgtcgatttcgaggtactagctgatgtagataccacaatcgatcctgatgtgctcgttgatgcactttgtgagtcagctttacttgttgacacactttgggattgttgtgtacttcctgatgttgatacggaatcactcatgctatttcttgttacttcatatttaaaagttgtcgtcgttttgttaccgctcgcatctgtagaaacgattgttatagtacttgtaccaatgtttgttggtgtaccactaatagtattatttgtgctatcgaatgttaatccagacggcaatcctgtgactgtatttgttactgcattcccactattatcttgcgtagcaattttaatcggggatattggtgaatacacttctgatgattga

SEQ ID NO: 417232 - DNA, 1077 bp, Staphylococcus aureus
atgaacataaataaaaaagtaacattacaacgaattcaaactttaactgagcttcatggggcaccaggttttgaagaagaagtaaaaaattatatgactcagcaaatggcgccgtacgtagatgaatttattgaaaatcgtatgggtggtttttttggtgttaaaaaatctaaaaatccaaatgcaaaacgtgtaatgattgcagcacatatggatgaaattggattcatgattacaaatatcactaaaaatggaatgattcaattcacaaatttaggtggtgttgcaaatgatatttggcaaggacaacgcttagtaattaaaaatagaaatggcgataaaattatcggtgttgtttctaatatacctaaacattttcgtactggtagtgaaggtgcaccggaaattaaagatttaacattagatataggtgctcaaaatgaagatgaagtacgtgagcgcggaatagatataggagatacaattgtacctcacacgccattcacacagttatctgaacatcgatatagtgctaaagcatgggataatcgttatggttgtgtcttggcaattgaaatactagaattattaaaagatatagaattagatgtagacttgtatgttggcgcaaatgttcaagaagaggttggattacgaggtgcgaaagcatctgcagagatgatagacccagacgttgcatttgttgtcgattgttcacctgccaatgacgttaaaggtaaccaaccattatccggtgaacttggtaaaggtacgttaattcgcataaaagacggtacaatgattttaaagcctgcatttagggactatttattaaagttagtagaagcacatgacattgaacatcaatactatatgtcaccaggtggaacagatggtggagaaattcataaagctaatattggtattccgactgcagttattggtgtatgtgcacgatatattcatagtacagactcagtatttgatataagagactattttgcagctagatctttactttcagaagccatttgtaatttagataacaatcaaatagaaacattacaatataaataa

SEQ ID NO: 417233 - DNA, 645 bp, Staphylococcus aureus
atgagagttcgatacaaaccatgggctgaggattatttaaaagatcatcctgaattggttgacatggacggtcaacatgcagggaaaatgactgaatggtttgataaaacgcaaccgatacacattgaaattggttcgggtatggggcagtttattacaacattagctgctcaaaatcctcatattaactatatttcaatggaacgtgagaaaagtatcgtttataaagtattagataaagttaaagagatgggtttaacaaatttaaagattatttgtaatgatgccattgaattaaatgaatattttaaaaacggcgaagtttctcgtatttatttgaacttttcagatccatggccaaaaaatcgtcatgcaaaacgacgtttaacgtatcatacgtttttagcgttgtatcaacaaatcttaaatgatgaaggagatttacactttaaaactgataacagaggactatttgcctacagtttagaaagtatgtctcaatttggaatgtattttacaaaaataaatctaaatttacatcaagaagacgatggcagtaatattttaacagaatatgaaaagaaattttcggataaagggtcacgtatttatcgtatggaagcgaaattccattcacaaaaataa

SEQ ID NO: 417234 - DNA, 792 bp, Staphylococcus aureus
ttggagcagttttatcaattagggtggacacttgattctgcaggtggtgcatctggtgaagcatatatggctgaacaagatggacaaaagttgtttttaaaacgaaattcaaatccatttattgcggcattatcagcagaaggtattgtgcccaaattagtatggacgaaacgcatagaaacaggcgaggttgttacagcacaacattggaaaaatggccgtgaactatcttcaaatgaaatgaagcaaacaagagttgcacatttattaaagaagatacacaattctagacctttattgagtatgttaaagcgtatggaaatggaacctattactcctgagattatgcttaataaaattaatgcctctttatcaagagaagttttaacacatcatattgtgagaaaatcattaacctatttagaagagcatataccgagtttagattcgcgttttttcactgttgtacatggtgatgtgaatcataataattggttattatccgatcgagatgaactatttttagtcgattgggaaggtgcaatgattgcagacccggcaattgatatcggaatgctgctttacaactatgttccacaacaacaatggtctgaatggcttgaaacatatggagttcaagagagcttgaatttaaataaacgtatgaaatggtatacggtaattcaatctataggtcttgttcaatggtatgaagagcaaaaaagatataaggatatgaacacttggcttaaattcctaaatgaagttatgaatagtaacatgtttatttaa

SEQ ID NO: 417235 - DNA, 849 bp, Staphylococcus aureus
atggaaaaaatttttttaaatggtgagtttgtaagtccaagtgaagcaaaggtttcatacaacgacagaggatacgtatttggcgatggtatttatgaatacattcgcgtatataatggtaagttatttacagtaacggaacattatgaaagatttttacgtagtgccaatgagattggtttagatttaaattattctgtagaagaattaattgaactatctcgtaaattagttgatatgaatcaaattgaaactggggcaatttatattcaagcaacgcgtggtgtagctgaaagaaatcatagtttcccgacacctgaagtagaaccagcaattgttgcttatactaagagttatgatcgtccttatgatcatttagaaaatggtgtgaatggtgttaccgttgaagatatccgatggttacgttgcgacattaaaagtttgaacttattaggaaatgtattagcaaaagaatatgctgtgaaatataatgcagttgaagcaatccaacatcgaggcgaaactgtcactgaaggatcttcaagtaatgcttatgcaattaaagacggtgtgatttatacacatccgattaacaactatattcttaatggtattacacgaattgtaattaaaaaaattgccgaagactataacatcccatttaaagaagaaacgtttactgtagatttcttgagaaacgcagatgaagttattgtttcaagtacttcagctgaggttacacctgttattaaattagatggtgaaccagttaatgatggtaaagttggcccaattacacgtcaactacaagaaggatttgaaaagtatatagagtcacacagtatttaa

SEQ ID NO: 417236 - DNA, 1410 bp, Staphylococcus aureus
atgtggaaagaaaaagttcaacaatacgaagatcaaatcattaatgacttaaaaggattattagcaattgaaagtgtgagagatgatgcaaaagcatcagaagacgcaccagttggtccaggtcctcgtaaggcattagactacatgtatgaaattgcacatagagatggatttacaacacatgatgtggatcatattgcaggaagaattgaggcaggtaaaggaaatgacgtattaggtatcttatgtcatgttgacgttgttcctgctggtgatggatgggatagtaatccgtttgagccggttgtaacagaagatgttatcatagctagaggtacacttgatgacaaaggtccaacaattgctgcttattatgcaattaagatattggaagatatgaatgtggattggaagaaacgtattcatatgattattggtacggatgaagaatctgattggaaatgtacggatcgctattttaaaacagaagaaatgccaacattaggttttgcaccagatgcagaatttccgtgtattcatggtgaaaaaggcattactacatttgacttagttcaaaataagcttactgaagatcaagatgaacctgattatgaattaataacttttaaatctggtgaacgttacaacatggtacctgatcatgcagaagcaagagtgcttgttaaagaaaatatgacagatgttattcaagactttgagtactttttagaacaaaatcatttacaaggtgatagtactgttgatagtggcattctagttttaacagttgaaggtaaagcggttcatggtatggatccatctatcggtgtgaatgcgggtctttacttactaaaattcttagcatcattaaatcttgataataatgcaaaagcgtttgtagcatttagtaatcgctacttatttaattcagattttggtgaaaagatgggaatgaaattccatacagatgtcatgggtgatgtgacaactaacattggtgttattacatatgataatgaaaatgcgggtcttttcggtatcaacttgcgctacccagaaggatttgaatttgaaaaagctatggatcgttttgcaaatgagattcaacaatatggctttgaagtgaaattaggtaaagtccaaccaccacattatgttgataaaaatgatccttttgtacaaaagttagttactgcatatagaaatcaaacaaatgatatgactgaaccttatactataggtggcggtacttatgcgagaaacttagacaagggtgtagcatttggcgcaatgtttagtgattctgaagacttaatgcatcagaagaatgaatatatcactaaaaaacagttatttaatgcaactagtatttatttagaagcaatttattcattatgtgtggaggaataa

SEQ ID NO: 417237 - DNA, 423 bp, Staphylococcus aureus
atggcaaaaggtaatttatttaaagcgattttaggtataggtggcgctgtagcagctgtacttgttacacgtaaagatagtcgtgacaagctgaaagcagaatataataaatacaaacaagatcctcaaagctataaagataatgctaaggataaagcgacgcaattaggaacaattgcaaatgaaacaattaaagaagtaaaaacaaatccgaaagaatatgctaatagattaaaaaataatccaaaagcatttttcgaagaagaaaaatcaaaatttaccgaatatgacaataagactgacgaaagtattgaaaaaggtaaatttgatgatgaaggtggcgcagcaccaaataataatttacgtatcgtcactgaagaagatttaaaaaagaataaaaatgcattgtctgataaagaataa

SEQ ID NO: 417238 - DNA, 696 bp, Staphylococcus aureus
atgagaatagataaatttttagcaaatatgggcgtcggaacacgtaatgaggtcaaacagttacttaaaaaaggccttgtaaatgtcaacgaacaagtaattaaatcaccaaaaacacatatagaaccagaaaacgataagatatcagttcgtggagaattaatagaatacgttgaaaatgtctatattatgttaaataagccaaaaggttatatatcggcaactgaagatcatcattcaaaaaccgttattgatttaatacctgaataccaacatttaaatatttttccggttggtcgtcttgataaagatacagaagggcttttattgataacgaatgatggtgattttaatcatgaattaatgagtccaaacaaacatgtttctaaaaaatatgaagttatttcagcaaatcctatcactgaagaagacattcaagcttttaaagagggtgtaacactgtctgatggcaaggttaagcctgcaatattaacttatattgataatcaaacgtcacacgtaacaatttatgaaggaaaatatcatcaagttaaacgaatgtttcatagcattcaaaatgaggtattacatttaagacgtatcaaaattgctgatttagaattggatagcaatttagattcaggagaatatcgtttattaactgaaaatgattttgacaaattaaattataaataa

SEQ ID NO: 417239 - DNA, 1662 bp, Staphylococcus aureus
atgagtgaaagtaaagaaatggtgcgtgggacctttttaattacaattagtattttgattacaaaggtgttaggcgtactttttatcattccattcaactatttaattggtggacaagaaaatatggcgccgttcacatacgcttatgcaccatataatattgcaattgcagttgcgacagcaggtgtaccattagctgcttctaaatatgtagcgaagtataatgcgattggtgcatataaagtcagtcagaaattttataaatctagttttattgttatgagtattaccggtgttttaggtttcttagtactttatttcctagcaccatatatttctgaattaactttagctagaaatgttcacgataaaaatggttggtcagttgatgacattacatggattattagaatcattagtatggtagtcatcttcattcctgtattagcaacatggagaggtatattccaaggttataaatctatgggacctactgcggtatcggaagtaactgaacaaattgcacgcgtgattttcatattaatcggaagttatttagtactaaatgtctttgacggatctattttgttagccaatggtatagctacatttgctgctgctgtcggtgcgattattgggatattcacactttggtattattggagaaaacgtaagcataatattgatcgcatggttgaatctgattataccgatatcgatgtgccgtacggcaagatgtataaagaaattattgcttacagtattccattcgttatcgtaagtttgaattatccattatttaacttagtagatcaatttacgcataatggtgcattatcattagttggtgtgccatcacagttacaagatatattctttaatatgctgaatatgtctacaaataaaattgttatgattccaacgtcattaagtgctggttttgcagtaagtttaattccttatattacaaaaacatttgcagaaggtcgcttacatgaaatgcatcatcaaattagaacatctattggtgtattaatgtttataactgttccagctagtattggaattatggccttggcacaaccattattcacagtattctatggttacgatccaattgtattaggtcatgaccctaaccatgatggtagtcgcttattattctattatgcgcctgtagcaatattaatttcactattaagtgtaacggcgtcaatgttacaaggtatcgataagcagaagttaacagtttatgttattttagcttctgttgtaattaaattagcattaaactacccattaattatgctattccatacgccgggggctgttttaagcacaagtatcgcattattattcgcaattggttgtaacttctatattcttaaaaaatacgcgaaatttaaatttagctatagctggattcatttcgcaaaaatattcttatactcatttattatgatgttaggtgtagaagcagtattcttcattgcgaacctattcttagagccaactaaacttggttacttaatcattattattttaggtgttacagtaggtattctaatttacggtacaatcacaattaaaacgcgtcttgcggacgaattcttaggtgaaattcctgaaaaattaagacgtagagttaggtttttacgatga

SEQ ID NO: 417240 - DNA, 1269 bp, Staphylococcus aureus
atgtatcaaacaattattatcggaggcggacctagcggcttaatggcggcagtagctgcaagcgaacaaagtagcaatgtgttactcattgaaaaaaagaaaggtctaggtcgtaaactcaaaatatctggtggcggtagatgtaacgtaactaatcgattaccatatgctgaaattattaagaacattcctggaaatgggaaatttttatatagtcccttttcaatttttgataatgaatccatcatagatttttttgagtctaggggtgttaaattaaaagaagaagatcacgggcgtatgtttccagtttccaataaggcacaagacgtcgttgatactttagtgacaactatagaaaatcaacatgtaaccgttaaggaagaagaagctgttagtagaatcgaagttaatacagaccaaactttcactgtacatactcaaaataatagttatgaaagccattcgctagtaattgctacaggtggtacaagtgtccctcaaactggttcaacaggtgatggttataagtttgcacaagatttaggtcataccattacggagttattcccgaccgaagttccaattacatcagctgaacctttcattaaatccaatcgtctaaaaggtttaagtttaaaagatgttgaattgtcagtacttaagaaaaatggtaaaaaacgcatcagtcatcaaatggatatgttatttactcattttggtatcagtggtccagctgcattaagatgtagtcagtttgtttataaagaacaaaaaaatcaaaagacacagcatatttcaatggcaatcgatacatttcctgaattaaaccatgaacaattaaaacaacacatcacatcattattatcggacacaccagataaaatcattaaaaacagcttgcatggactaattgaagaacgctacttactgttcatgttagaacaagctgggatcgatgaaaataccacatcacatcacttatcaaatcaacaattgaacgacttagtaaacatgtttaaagggtttgtatttaaggtaaacgggacattacctatagataaggcatttgtcacaggtggtggtgtgtcacttaaagaaattcaacctaaaacaatgatgtctaaattagttccgggattatttttatgtggtgaagtattagatatacatggttatactggtggttataatattacaagtgcactcgtaacaggacatgtcgctggattatatgccggtcattactctcatgcatcaatggaataa

SEQ ID NO: 417241 - DNA, 312 bp, Staphylococcus aureus
atgaagtcaattactacagatgaattaaaaaccaaacttttagaatctaaaccagttcaaattgttgatgttcgtactgacgaagaaacagcaatgggatatatacctaatgcaaagttaattccaatggatacgattccagataatcttgacgtatttaataaaaatgaaacctactatattgtttgtgctggcggtgttcgtagtgccaaagttgtcgactatttagaagctaatggtattgatgccgttaatgtcgaaggcggcatgcacgcttggggcgatgaaggtttggaaataaaaagtatttaa

SEQ ID NO: 417242 - DNA, 2418 bp, Staphylococcus aureus
gtgttgaattacaaccacaatcaaattgaaaagaaatggcaagactattgggacgaaaataaaacatttaaaacaaatgataacttaggtcaaaagaaattttatgctttagacatgtttccatatccatcaggtgctggtttacatgttggacatcctgagggctatacagcaacagatatcatttcaagatataagagaatgcaaggatataatgtgttacatccgatggggtgggatgcattcggattaccagcagagcaatatgctttagacactggcaacgacccacgtgaatttacaaagaaaaatatccaaacttttaaacgacaaattaaagaattagggttcagctatgattgggatcgtgaagttaatacaacggatccagaatactataaatggacacagtggattttcatacagttatataacaaaggtttagcatacgttgatgaagttgcagttaactggtgtccggcattaggcactgttttatctaacgaagaagtgattgatggtgtctctgaacgtggtggacatccagtatatcgtaagccgatgaaacaatgggtacttaaaatcacagaatatgcagatcaattattagcggatttagatgatttagattggcctgaatctttaaaagatatgcagcgcaattggattggacgttctgaaggggccaaagtttcatttgatgtagataatgcggaaggaaaagtagaagtatttacgactagaccagatacaatctatggtgcatcattcttagtcttaagtcctgagcatgcattagttgattcaattacaactgatgaatataaagatcaagtgaaagcgtatcaaacagaagcttctaaaaagtcagatttagaacgtacagatttagcaaaagataaatcaggtgtattcactggtgcttatgcaattaatcctttatctggtgaaaaagtacaaatttggattgctgattatgtattatcaacatatggtactggtgcaattatggcagtaccagcgcatgatgacagagattatgaatttgctaaaaagtttgatttgccaatcattgaagtcattgaaggtggaaatgttgaagaagcggcatacactggtgaaggtaaacatattaattctggtgaacttgatggtttagaaaatgaagcggcaattactaaagctattcaattattagagcaaaaaggtgctggcgaaaagaaagttaattacaaattaagagattggttattcagtcgtcagcgttattggggcgaaccaattcctgtcattcattgggaagatggaacaatgacaactgttcctgaagaagaactaccattgttgttacctgaaacagatgaaatcaagccatcagggactggtgagtctccactagctaatattgattcatttgtaaatgttgtagatgaaaaaacaggtatgaaaggacgtcgtgaaacaaatacgatgccacaatgggcaggtagttgttggtattatttacgttacatcgatcctaagaatgaaaatatgttagcagatcctgaaaaattaaaacattggttacctgttgatttatatatcggtggcgtagaacatgcggttcttcacttattgtatgcaagattttggcataaagtactttatgatttaggtatcgtacctacgaaagaaccattccaaaaattatttaaccaaggtatgattttaggagaaggtaatgagaagatgagtaaatctaaaggaaatgtaatcaatcctgatgatatagtacagtctcatggtgcagatactttacgtctttacgaaatgtttatgggacctttagatgctgcaattgcatggagtgaaaaaggattagatgggtctcgtcgattcttagatcgtgtatggcgtttaatggtaaatgaagatggaacattgagttcaaaaatagtaactacaaataataaatctttagataaagtttataaccaaactgttaaaaaggtaacggaagactttgaaacattaggatttaatactgctattagtcaattaatggtatttattaatgagtgttataaagttgatgaagtttataaaccttacattgaaggcttcgttaaaatgttagcacctattgcaccacatatcggtgaagaattatggtcaaaattaggacatgaagagtctattacgtaccaaccttggccaacttatgacgaagcactacttgtagatgatgaagtagaaatcgttgttcaagttaatggtaaattgagagctaaaattaaaattgctaaagatacatcaaaagaagaaatgcaagaaatagccttatctaatgacaacgttaaagcgagtattgaaggtaaagacatcatgaaagtcatcgctgttcctcaaaaattagtcaatattgtagctaaataa

SEQ ID NO: 417243 - DNA, 1173 bp, Staphylococcus aureus
atgaatatacctaaatcagtctggtggctagtaattggcatggcgttaaatattactggttccagttttttgtggcctttaaatacaatttatatgaaacaagaacttggaaaaagtttaactgttgctggtttagtgctaatgataaattcatttggcatggttattggaaacttattaggtggttcactatttgataaattaggtggatacaagacgattttaattggaactttcacttgtctttgtagtacaacgctacttaatttctttcacgggtggccttggtatgctgtatggcttgtaatgttaggctttggtggcggaatgattattcctgcgatatacgcaatggctggagcagtgtggccgaatggcggtagacaaacgtttaatgcgatatacttagcgcaaaatattggtgttgctgtcggcgctgcaatgggcggctttgtcgcagaatttagctttaactatatctttttagccaatcttattatgtatgttgtgtttgcacttgtcgcggtaacacaatttaatattgaaattaatgcgaaagttaaatatccaactcatttagatattactggtaaaaagaataaagcaagatttatttcattagtactaatttgtgcaatgtttgcaatttgttgggttgcatatattcaatgggagtctacaatcgcatcatttacacaatctattaatatttcaatggcacaatatagtgttttatggacaattaacggaataatgattttagtagcacaaccattaattaaaccgattctctatctgttaaaaggaaacttaaagaagcaaatgtttgtcggcatcatcatttttatgttgtcgttctttgtcacgagttttgccgaaaactttacaatatttgttgtcggtatgattattttaacttttggagaaatgtttgtatggcctgcagttccaactatagccaatcagttagcgccagatggtaagcaaggacagtaccaaggttttgtgaattcagctgctacagtaggaaaagcattcggtccatttcttggtggtgtattagttgatgcatttaatatgcgcatgatgtttatcggtatgatggtactacttgtatttgcattaatattattaatggttttcaaggagaataatacgcaacctaaaaaatag

SEQ ID NO: 417244 - DNA, 954 bp, Staphylococcus aureus
atgggcaatcatttccaatacgcttttgaaaacaaacgttatcacacatggaattaccatttaaaaaataaatttggacaaaaaatatttaaagttgcattggatggcgggtttgactgtcctaaccgcgatggcactgtagcacatggtggatgtacattttgttctgctgcaggtagcggagactttgcaggtaatcgtgcagattcaatcgcagtacaatttaaagaaattaaggaaaagatgcatgagaaatggcacgaaggaaaatatattgcttattttcaggcatttacaaatacacatgcaccagttgaagtattaaaagaaaaattcgaacctgtacttaaagaaccgggtgttgtgggattatctattggtacgcgtcctgactgtctaccagacgatgttgtcgaatatttagcagatttgaatcaacgaacatacttatgggttgaattaggactacaaacaatccatcaatcaacatctgatttaatcaatcgtgcccatgatatgcaaacgtattatgatggtgtggcaaaattacgtaagcataatatcaatgtatgtacacacatcattaatggcttacctggcgaagactatgacatgatgatggctactgccaaagaagttgcacaaatggatgtacaaggtattaaaattcatttacttcatttgttaaaaggtacaccgatggtaaaacaatacgataaaggtttattaacttttatgactcaagaagaatacacaaacctagttgtggaccaattagaagtgattccccctgaaatgatcgttcaccgaattaccggtgatggtccaatagatatcatggtcggtccaatgtggagtgttaataaatgggaagtattaaatggcatcgatgctgaattagcacgtagaaattcttatcaaggcttgcgttacaagtctaaggtgaagcaatga

SEQ ID NO: 417245 - DNA, 564 bp, Staphylococcus aureus
atgaaattagaacgtatactccctttttcaaaaacacttattaaacaacatataacaccagaaagtattgttgtagacgcaacttgcggtaacggcaatgacactttatttttagccgaacaagtaccagaaggacatgtttatggtttcgacattcaagatttagctttggaaaatacacgtgataaagttaaggatttcaattatgtttctttaataaaagatggacatgaaaatattgaacatcatataaatgatgcacataaaggtcatattgatgcagccatctttaacctaggttatttgcctaaaggtgataaatctatcgtgacaaagcctgacacgacaatccaagctattaaagcgttattatctttaatgtcaacggaaggtattatcgtattagttatctatcatggtcatagtgaaggccaacttgaaaagcaagctttgcttgattacttgagtaatttggatcaaaagcatgcgcaagttttgcagtatcaatttttaaatcaacgaaatcatgctccattcatttgtgccatagaaaaaatttcttaa

SEQ ID NO: 417246 - DNA, 402 bp, Staphylococcus aureus
atgaaaaaagtaaataacgatactgtatttgggattttgcaattagaaacacttttgggtgacattaactcaattttcagcgagattgaaagcgagtacaaaatgtctagagaagaaattttaattttactaactttatggcaaaaaggttctatgacgcttaaagaaatggacagatttgttgaagttaaaccgtataagcgtactagaacgtataataatttagttgaattagaatggatttacaaagagcgtcctgttgacgatgaaagaacagttattattcatttcaatgaaaagttacaacaagagaaagtagagttgttgaatttcatcagtgatgcgattgcaagtagagcaacagcaatgcaaaatagtttaaacgcaattattgctgtgtaa

SEQ ID NO: 417247 - DNA, 828 bp, Staphylococcus aureus
atgtggaagtgggaagctgaaaatgatgcgaaaggcgtcgttgttattgctcataatatattagaacatacgggaagatatgcatatgttattacgatgttaagaagaaatggctatcatgtgattatgggagatttgcctggtcaaggtcaaacttcaagagctaataaaggacaaattgaaaactttcaaacgtatcacgaaagtttgctagactggttaaagatagctaatgaatataaaattcctacttatgtattaggggtaggacttggcggtttgattttattaaatttacttgaaaaagtagaattgccaatcgaggggatgatgttaatttctcctatgctagaacttcaaaagaatggaaaaaatcgtaaagataaacttgtttcaaatataggtaaaatttcaaaagacacacgttttaatgttggtgtagaaccaaaagatttaacacgtaatttagaaattgttgaagaaacagttaacgatggtttaatgttaaaaaaagcaacgtatcattggtataacacaattaatgagacgatgaaagatacgatggctcatattcatgacattcaaccaatgccaacactattaatgtatggaacgaaggatttaattgttgatactagggcaattgatgagtttaaagaaaaatatcaaacacctgaattatattttaaagcttggcaaggtttttaccacgaggttcacaatgagccagaacgcgatgaagtaatgcgttatattctgactttcttaaataatagcgtcaatacaatgggctttattgttgaagatgacgaaattgtagaaatttaa

SEQ ID NO: 417248 - DNA, 1002 bp, Staphylococcus aureus
atggcactattaaagaatttttttatcggattatctaataatagttttttaaacaacgcagcaaaaaaagtgggcccacgtttgggtgccaataaagtcgttgccggaaatacaattccagagttaattaatacaatcgaatacttaaatgacaagaatatcgctgttacggtagacaatttaggggaatttgtcggtacagttgaagaaagtaatcatgctaaagaacaaattttaacaattatggacgcgcttcatcaacatggcgtaaaggcacatatgtctgttaaattgagtcagttaggtgcagaattcgacttagaattagcttaccaaaatttaagagagattttacttaaagcaaatacttacaacaatatgcatataaatattgatactgaaaaatatgctagcctgcaacaaattgttcaagttttagatcgattaaaaggcgaatttagaaatgttggtactgtaattcaagcatatttatacgatagccatgaattagttgataagtaccaagatttacgattacgtttggttaaaggtgcatataaagaaaacgaatcaattgcatttcaatctaaggaagacgtagatgcaaattacatcaaaataattgaacaacgtttgttaaacgcacgcaatttcacttcaattgcaacacatgaccatcgcattattaatcatgtaaaacaatttatgaaagaaaatcacattgaaaaagatcgtatggaattccaaatgctctatggttttagatcagagttagcagaagaaatcgcaaatgaaggctataatttcactatttatgtaccttatggcgatgattggtttgcttattttatgagaagattagcagaacgcccacaaaacctatctcttgctgtaaaagaatttgtgaaacctgctggcttaaaacgtgttggcataattgcagctttaggagctacagttatgttaggtttaagtacaattaaaaaattatgccgtaaatag

SEQ ID NO: 417249 - DNA, 459 bp, Staphylococcus aureus
atgaattttgaaggtaaattaattggaaaagaattgaaagttgcaatcgtagttagtcgatttaatgattttatcactggaagattacttgaaggtgcaaaagatactttgattcgacatgatgttaatgaagataatattgatgtagcatatgtacctggtgcgtttgaaattcctttagtagctaaaaaattagcctcatcaggaaattatgatgcagtaattacattaggatgcgtaattcgcggtgctacttctcattatgattatgtttgtaatgaagtcgcaaaaggtgtttctaaagtaaatgatcaaactaatgtaccagtcatatttggtattttaacgactgaaagtattgaacaagctgttgaaagagcaggtacgaaagctggcaataaaggtgccgaagcagcagtaagtgcaattgaaatggctaatttattaaaatctatataa

SEQ ID NO: 417250 - DNA, 1182 bp, Staphylococcus aureus
atgcaattcgataatattgacagtgctttaatggctttaaaaaatggagaaacaattattgtagtagatgatgagaatcgtgaaaatgaaggtgatttagtagcggtcactgaatggatgaacgataataccattaattttatggcgaaagaagcaaggggattaatatgcgcaccagtgtctaaagatattgcacaacgtttggatttggtacaaatggttgatgataactccgacatctttggtacgcaatttacagtgagtattgatcatgtagatacaacaacaggaattagcgcttatgaacgtacattgactgccaaaaagctcattgatccaagtagtgaagctaaagattttaatcgtcctggtcatttatttccattagtagcacaagataaaggggtattagctcgtaatggtcatactgaagcggctgttgatttagctaaacttactggtgccaagccagctggtgtcatttgtgagattatgaatgatgacggcacgatggcgaaaggacaagatttacaaaagtttaaagaaaaacatcaattaaagatgattacgattgatgatttaattgaatatcgtaaaaaattagaaccagaaattgaatttaaggcaaaagtgaaaatgcctactgatttcggaacatttgatatgtatggttttaaagctacttacacagatgaagagatagttgtactgacaaaaggtgcaattcgacaacatgaaaatgtacgtttacattctgcgtgccttacaggcgatattttccatagtcaacgttgtgattgtggtgctcaacttgaatcgtctatgaagtatatcaatgaacatggtggcatgattatttatctacctcaagaaggtcgtggcataggattgttaaacaaattacgcgcatatgaattaattgagcaaggatatgatacagtaactgcaaatttagcattaggttttgatgaagatttgcgagattatcatattgctgcacagatattaaaatattttaacatcgaacatatcaatttattaagtaataatccaagtaaattcgaaggattaatacaatatggcattgatattgcagaaagaattgaagttatcgtaccagaaacggtacataatcatgattatatggaaacgaaaaaaataaaaatgggtcatttaatatag

SEQ ID NO: 417251 - DNA, 633 bp, Staphylococcus aureus
atgtttactggcatcgttgaagaaataggtgtcgttaaaagtgttcaaattcgtcaatcagtcaggacgattgaaatcgaagcacataaaattacggcagatatgcatattggtgattccatcagtgttaatggtgcatgtttaacagtgattgattttaatcagacatcttttactgtacaagtaattaaaggcactgaaaataaaacctatttagcagatgttaagcgacaatcagaagtaaatttagagcgggccatgagtggtaatggtaggtttggtggacattttgtcctcggtcatgtagatgaactaggaacagtttcaaaaataaatgaaacagccaatgccaaaattattacgattcaatgtagccaacatattaataatcagttagttaagcaaggatctattactgtggatggtgtaagtctaacggtatttgacaaacatgataacagttttgacattcatcttattccagaaacgaggcgttctacgattttatcatccaaaaaattaggagataaagtacatttagaaacagacgttttgtttaaatatgttgaaaatattttaaataaagataaagaccaattatctgtagataaattaagagcatttggtttttag

SEQ ID NO: 417252 - DNA, 1044 bp, Staphylococcus aureus
ttgagtcaatttatggattatgcgattcaacttgcaaatatggtacaaggtcaaacaggtgttaatccacccgttggcgctgttgtagttaaagaaggtaggattgttggtattggtgcacacttgagaaaaggtgacaagcatgcggaggttcaagcacttgatatggcacaacaaaatgctgaaggtgcgacgatttatattacgttagagccatgtagtcattttggttcaacgccaccctgtgttaacaaaataattgattgtaagatagctaaagtagtttacgcaacaaaagacaattcgttagatacacatggtgatgagacgttacgggatcacggtattgaggttgaatgcgttgatgatgaacgtgcatcacaattataccaagacttttttaaagcaaaagcaaagcaactgccacaaattacagtgaaagtatctgcaagtttagatggtaaacaagcgaatgataatggacaaagtcaatggattactaacaaagaggttaaacaagatgtctataagttaagacatcgacacgacgcagtgttaactggaagacgtacagttgagttagatgatccacaatatactacacgtattcaagatggaaaaaaccctataaaagtaatattgtctaagtctgggaatattcattttaatcagcaaatttatcaagatgaatcaacaccaatttggatatatactgaaaatccaaatttaacaaccaatcaaacacatattgaaattatttacttgaagtcttgtgatttaacaacaattcttcacaatttatataaaagaggagttggaactttgctagtcgaggcaggtccaaccactacttcagaatttctccaatctaattatatagacgaatttattctctattatgccccgaaattaattggcggatctggaaattatcaattttatcaaacaaatgatgtgattgagataccagatgcgaaccaatttgaaattgttcattccgagttattaaatcaaaatgtcaaattaactttacgaaagaagtga

SEQ ID NO: 417253 - DNA, 315 bp, Staphylococcus aureus
atgacgtataaagaactagcaacatatttaaaagttttatcagattcaagcagattagaaatactagatttactttcttgtggagagttatgcgcttgtgatttgttagaacattttcaattctctcaacccacacttagctatcatatgaaagcattagtaaaaaccaacttagttacgacacgaaaaatcggaaataaacatttataccagcttaatcataatatttttgagtccgtaattaataacttgtcaaaagttcatacctctaaccaacgatgtatttgtcataaccttaagactggtgaatgctaa

SEQ ID NO: 417254 - DNA, 795 bp, Staphylococcus aureus
atgaagtctataaaaaggattggattgtgcataagtctgttgattttaagcatttttgtaacatcttgcgatggtgataataagatcactggagattcaaaagaaacacaaatcaaaaagagctttgcgaaaacattagaaatgtatccaatcaaaaacctcgaagatttatacgacaaagaaggatatcgagacggagaatttaaaaaaggtgataaagggacttgggttattagatctgaaatgaaaatccaattaaaaggagaaaatctggaatttaggggagtagttttagaaattaacagaaatactagaacggctaaagggaattatattgttagagaagttgttgaagatagcgatggaatgacacacaatcatacaaaaatgtatcctgtaaaaatggaaaataataaaatcattccattaaaacaaatcgttgatgaaaaagtaaaaaaagaaattgaagaatttaaattctttgtacaatacgggaatttcaaagaattggaaaactataaagacggagaagtgacatataacccagaagcaccaatatactctgcacaatatcaattgaaaaacagtgattacaatgtagaacaattacgtaagcgatataatatcccgacgcaaaaagcgcctaaattattattgaaagggtcaggtaatctaaaaggctcatcagttggatataaaaatattgaatttacctttgttgaaaataagggagaaaatatttacttcacagatagtgtctactttaatccaagcgaggataaatataattactaa

SEQ ID NO: 417255 - DNA, 252 bp, Staphylococcus aureus
atgcctaatatgacacaaataacaaacagtaaatcaattgcgtattttgtaataagtaacatacctagaaatgggccaatcgctgtacctaatactaaacttaaggaaaataaactgatgccttcactttttctattaacaggggtaacgtatgccgcaatagtacctgttgcagttgtcacaactgcagttgcgataccgtttatgagacgtacaaagattaaaaaagctaaagatccatcaataaaataa

SEQ ID NO: 417256 - DNA, 399 bp, Staphylococcus aureus
atgaacaaaaaacatgtttttataattattggtgtcatattatgtatacgtatagttgctacagtcatttatttaaaagtgaaatatgatgaaaaagaaaaacaaaaagcgatttactacaaagaacaacaagaacgtattacactctatcttaagcataatactaaagaaccaaacacgattaaatctgtgcatttcacaagtttaaagacaggacctatgggcgatgccgtaattgaaggttacatcaatgaaaacaaaaaagctgattttgttgcatatgggtctccagaacataattatcaatttggtggagatatggtagaaagtgaaaaattaagtgaattactaaaaccagcacaggaattaaaatcacagaaaaaatcaaagaagaattag

SEQ ID NO: 417257 - DNA, 168 bp, Staphylococcus aureus; identical to SEQ ID NO: 408612

SEQ ID NO: 417258 - DNA, 150 bp, Staphylococcus aureus
atgactaacattaaaatagctaacattgcaatgactggaactgtttggataatatttgcaattgtaattacaaatccagaaagttttgtgtatcttgcaagcaagattcccaatggaataccaattaaagctgcaaaaagtacaccatag

SEQ ID NO: 417259 - DNA, 222 bp, Staphylococcus aureus
atggatttagttgaagattgtaatacatttctgtcttttgtagctgataaaactttagaaaaacagaaattatataaagctaattcttgtaaaaatcgattttgtcctgtctgtgcttggagaaaagctagaaaagatgctttaggtttatctttgatgatgcaatatattaagcagcaagaaaataaggagtttattttttttaactttgactacacctaa

SEQ ID NO: 417260 - DNA, 621 bp, Staphylococcus aureus
ttgcaacaagaaattgaaagaacgcaagctataggcgctaaagatattgtattacatccaggtgcacatgttggagctggtgttgatgccggaattaataagattattgaaggattaaatgaagttttaacgaatgacaataatgtacgtattgcgcttgaaacgatggcaggtaaaggtacagagattggtcgctcgtttgaagagttagcacgtattattgatggagttcataataacgaacgtttatcagtatgttttgatacatgtcatacgcatgatgctggatataatgtgaaagaggactttgatggcgtattaaatgaatttgataaaatcattggagtcgacagaattaaagttgttcatgtcaatgattctaaaaatgaccgtggcgctcaaaaagaccgacatgaaaatattggcttcggttacattggttttgatgcattaaattacattgtgcatcatgatagttttaaagatattccgaaaatcttagaaacaccttatgttggtgaagataagaaaaataaaaaaccgccatataaacttgaaattgaaatgttaaaacaacagcaatttgacccagaattaaaaaataaggttatgcaacaataa

SEQ ID NO: 417261 - DNA, 1182 bp, Staphylococcus aureus
atgacgagagtcgtattagcagcagcatacaggacacctattggcgtttttggaggtgcgtttaaagacgtgccagcctatgatttaggtgcgactttaatagaacatattattaaagagacgggtttgaatccaagtgagattaatgaagtcatcatcggtaacgtactacaagcaggacaaggacaaaatccagcacgaattgctgctatgaaaggtggcttgccagaaacagtacctgcatttacagtgaataaagtatgtggttctgggttaaagtcgattcaattagcatatcaatctattgtgactggtgaaaatgacatcgtgctagctggcggtatggagaatatgtctcaatcaccaatgcttgtcaacaacagtcgctttggttttaaaatgggacatcagtcaatggttgatagcatggtatatgatggtttaacagatgtatttaatcaatatcatatgggtattactgctgaaaatttagtagagcaatatggtatttcaagagaagaacaagatacatttgctgtaaactcacaacaaaaagcagtacgtgcacagcaaaatggtgaatttgatagtgaaatagttccagtatcgattcctcaacgtaaaggtgaaccaatcgttgtcactaaggatgaaggtgtacgtgaaaatgtatcagttgaaaaattaagtcgcttaagaccagctttcaaaaaagacggtacagttacagcaggtaatgcatcaggaatcaatgatggtgctgcgatgatgttagtcatgtcagaagacaaagctaaagaattaaatatcgaaccattggcagtgcttgatggctttggaagtcatggtgtagatcctgctattatgggtattgccccagttggcgctgttgaaaaggctttgaaacgtagtaaaaaagaattaagtgatattgatgtatttgaattaaatgaagcatttgcagcacaatcattagctgtagatcgcgaattaaaattaccttctgaaaaggtgaatgttaaaggtggcgctattgcattaggacaccctattggtgcatctggtgctagagttttagtgacattattgcatcaactgaatgatgaagttgaaactggtttaacatcattgtgtattggtggcggtcaagctatcgctgcagttgtatcaaaatataaataa

SEQ ID NO: 417262 - DNA, 492 bp, Staphylococcus aureus
ttgagtttcttagcagataatagtgtcaaaactaaagtgcaagggttaaatgattttccgaaaagtttacatccgcctatgattgtccattatttctttgatttaatggtaacgatgggaattttatgttttgtcatttcaggtgtttatgtcttaactttaatgtttaaaaagcttagaaagttttctactcataaatggatgctttacggaatattattaaccggaccagcttcaatgctagctatagaatttggatggttcttaacagagatgggtagacagccttggattgttcgtggttatatgcgcgtggcagaagcagcaacacaagcaggcggaataaccttcgttacaattttatttggcatattgtacatcattttaatgtatacatgtgcatacgtattaattcgtatgtttaaaaataaaccggcgtatgaagatgtaaatcgcttagccaagaagcaaggaggagaaatagaaaaatga

SEQ ID NO: 417263 - DNA, 639 bp, Staphylococcus aureus
ttgtattatttgttttgttttttgcgacgaccgaataacaataatgaacctaatgctgcgaataatccaccaaataacgttgcgttatttgagccgttattttcactacctgtttctggtaatgcttttgctttattgtcatggtctttagtagcactcattggtttaacaggtatatgttttcctgtatctgaatctgagtcgctatctgagtctgagtcgctgtctgaatctgaatcactatctgaatctgagtcgctatctgaatctgagtcgctatctgagtccgaatcgctgtctgaatctgaatcgctatctgagtctgaatcgctatctgagtccgaatcgctgtctgaatctgaatcgctatctgaatctgagtcactgtctgagtctgagtcgctatctgagtctgaatcgctatctgaatctgagtcactgtctgagtctgagtcgctatctgaatctgagtcactgtctgagtctgagtcgctatctgagtctgagtcgctatctgagtctgaatcactgtctgaatctgagtcgctatctgagtctgagtcgctatctgagtcactgtctgagtccgaatcgctgtctgaatctgaatcgctatctgatgtatcttcttcgaagtaa

SEQ ID NO: 417264 - DNA, 366 bp, Staphylococcus aureus; identical to SEQ ID NO: 417038

SEQ ID NO: 417265 - DNA, 687 bp, Staphylococcus aureus
atgacaaaaataaatagtcgaagcgcccaaattaaagacacatttaatcaaacattaaaattatatccaaccaaaaatctcgatgatttttacgataaagaaggctttcgagatcaagaatttgacaaaggagacaaaggtacttggataatcagctctgaaatgaatattcaattaaagggagaaagtttaaaatcaagaggaatgattctatatatgaatagaaatacaaaaaggacaacaggttatttttttgtaagtgaaacaaaaggaaaaacgtatgaaaaagaaaaaaaatatccagtcaaaatggaacataatcaaattatcccaacgaagccaatacaagatgacaagttgaaaaaagaaattgaaaactttaaattttttgtacaatatggcaattttaaagatattaatgattataaagatggtgacatttcatataatccaaatgtgccaagttattcggcaaaatatcaattgaggaatgatgattataatgtgcaacagttaagaaaaagatatgacataccaacgaaacaagcaccgaaaatgttattaaaaggcgatggtgatttaaaaggctcatctgtagggtctaaagagttagaatttacttttgtcgaaaataaaaaagaaaacatctatttttctgatagtattaatttcaaacctactgaatag

SEQ ID NO: 417266 - DNA, 402 bp, Staphylococcus aureus
atgaataaaagaaatagtatagccacaattcataggaaaatcactaattactgtaaagaaaataattttgatataccaagttataaacaaatttatagtgttattaaagcgatgcctaagtctgttattgatttctctcatcagggtgaaaaatactatcaaaataagtacgatttaatacaaattagagaatcctcgagacccaatgaaatatggcaagcagaccatactttgctagatatctttatattagaccaaaaaggtaatatcaatagaccatggctaactattattatggatgactatagtcgtgcaattgcaggctatttcttaagttttgatgccccccaatgctcaaaacacagcattaacactacaccaagcaatatggaagaaaaatga

SEQ ID NO: 417267 - DNA, 816 bp, Staphylococcus aureus; identical to SEQ ID NO: 409381

SEQ ID NO: 417268 - DNA, 786 bp, Staphylococcus aureus
gtgatattattgttaggttctagttatggaacaattgatagtgaagaaaatattagctatacagaaatggagtacaattttgctaaatctttaggtaaacctatatatgtttttgagatgaataaagcatctaccgaatccgcggaaaagtctaaaaaattagatgagtttaagacaaaagttaaagaaaatagactaattagtccaaatattaatgatatttcggaattaaaaagtaaagtatctcagactttaatgcaaagtgtacctagtgaaattaaagaaaatagtggatggataagagtacaggattgtggtaaaaatgtaaaaaaattaaaaaaattggatgctatacaaagagatttagatacatatgattttttgaaagaagaactttataaaatattcatgtatgtaaaaactttttatttccagcacacaccatttgatgatagttatattgaagatatagaaaactacctgctaaattatgaaaataatccacataaatcattcatgaaaataaaagtttatgattataaaaactttttaaaacatttaaaaaacatattgattttaattaaacaaggaaaaaagccattagctcaagccggtcattttaaattaagcttttacgaagaggatttaaaattgttacaaaaaaattataagactacgctagtcgatattaaaggattgaataaacatttttataaggaatgtgataggtgcttaaaagcatataatatttttattgagggtataaataaacatttatatgaatga

SEQ ID NO: 417269 - DNA, 1434 bp, Staphylococcus aureus
atgaaatttaagtcattgattacaacaacattagcattaggcgttatagcatcaacaggagcaaactttaatactaacgaagcatctgccgcagctaagccattagataaatcatcaagtacattacaccatggacattctaacatccagattccatatacaattactgtgaacggtacaagccaaaacattttatcaagcttaacatttaataagaatcaaaatattagttataaagatatagagaataaagttaaatcagttttatactttaatagaggtattagtgatatcgatttaagactttcaaagcaagcggaatatacggttcattttaaaaatggaacaaaaagagttatcgatttgaaatcaggtatctacacagctgacttaatcaatacaagtgacattaaagctatcagtgttaacgtagatactaaaaagcaacctaaagataaagctaaagcaaatgttcaagtgccatatacaatcacagtgaacggcacaagccaaaacattttatcaaacctaacatttaataaaaatcaaaatattagttacaaagatttagagggtaaagttaaatcagttttagaatcaaatagaggtattactgatgttgatttaagactttcgaagcaagcgaaatatacagttaattttaaaaatggaacgaagaaagttatagatttgaaatcaggtatttacacagcgaatttaatcaattcaagtgatattaaaagtatcaatattaacgtagatacaaaaaaacatatcgaaaataaagctaaaagaaactatcaagttccatattcaattaatttaaatggtacatctacaaacattttatcgaatctttcattttcaaataaaccttggacaaattacaaaaatttaactagtcaaataaaatcagtactgaagcatgatagaggtattagtgaacaagatttaaaatatgctaagaaagcttattatactgtttattttaaaaatggtggtaaaagaatcttacagttaaattcaaaaaattacacagcaaacttagttcatgcgaaagatgttaagagaattgaaattactgttaaaacaggaactaaagcgaaagcagacagatatgtaccatacacaattgcagtaaatggcacatcaacaccaattttatcaaaactaaaaatttcgaataaacaattaattagttacaaatatttaaacgacaaagtgaaatctgtattaaaaagtgaaagaggcatcagtgatcttgacttaaaatttgcgaaacaagcaaaatatacagtatatttcaaaaatggaaagaaacaagtagtgaatttaaaatcagacatctttacacctaatttatttagtgccaaagatattaaaaagatagatattgatgtaaaacaatacactaaatcaaaaaaaaataaataa

SEQ ID NO: 417270 - DNA, 201 bp, Staphylococcus aureus; identical to SEQ ID NO: 406638

SEQ ID NO: 417271 - DNA, 801 bp, Staphylococcus aureus
atgataaagattgcgttaaatgattttagtgcagaatcattgtcggcatttcgtttaattttagcaacaataattctcttgccgttcgtaattataaagaaattgcctacccctgaactaagagatatccctgttatttttattttaggattttgtggatttgtgatatatcacacagctttaaattttggtgaaactttgattagtgcaggtatatctggaattctagtctctacaacgcctattttttctagtgctttagcttatatatttttaaaagagcatttttcaaaatggaattggttaagttcactcgtcgcatttataggaatatccattatttcaataagtaaagatgattacacaactattaatgtattaggtgttcttattattttacttgcatcttttagtgaaagtttgtattttactttccagaaaaaatacatagaaaaatacggcttcatcgctttcacactatatacaataatggcaagctcaccatttatgcttatttttattcctgaaatcatcaacgatatacacggcgccacttttacatcaatagtatcggtactttatttagctatattccctactataattccatacgttttgcttgcttatatcgtgaagtcagttggtgtctctgatgcaacaatgtctctttatttaacacctatcgtttctttattattatcttatctgtttttagacgagctaccaacaacccttgctattataggcggaattatcactctactaggcgttagtttaagtaatttctttcaaaatacataa

SEQ ID NO: 417272 - DNA, 1380 bp, Staphylococcus aureus; identical to SEQ ID NO: 412597

SEQ ID NO: 417273 - DNA, 1269 bp, Staphylococcus aureus; identical to SEQ ID NO: 416952

SEQ ID NO: 417274 - DNA, 567 bp, Staphylococcus aureus
atgaaaggattaattattattggcagtgcacaagtgaattcacatacaagtgcactagcaagatacttaactgagcattttaaaacacatgatattgaagcggaaatattcgatttagcagaaaagccgttaaatcaattagatttttcaggaacaacaccgtctattgatgaaatcaaacaaaatatgaaagatttaaaagagaaagcaatggcggcggactttttaatattaggaacgccaaactatcatggttcatattctggaatattgaaaaatgcattagatcatctaaatatggattattttaaaatgaaacctgtaggcttaataggaaatagtggtggtattgttagttcagagccattgtcacatttaagagtaatcgtcagaagtttactaggcattgctgtaccaactcaaattgcaacacatgattctgattttgctaaaaatgaagatggttcatattacttaaatgatagtgaattccaattacgagcaagattatttgtcgatcaaattgtatcttttgtgaataatagtccatatgaacatttaaaataa

SEQ ID NO: 417275 - DNA, 870 bp, Staphylococcus aureus
atgataaaactaatagccactgatatggatggcacgctacttaatgcagcacatgaaatttctcaacctaatattgatgcgattaaatacgctcaagaacaagggataacggttgttatcgcgacaggtcgagcattttatgaagcacaagcaccagttgctgacacagatttaacagtaccatatatttgtttgaatggtgctgaagtacgtgatgaaactttcaatgtaatgagcacttcacaccttaataaatcgttagtacacaaaattacaaatgttttaaaagatgcaggtatttattatcaagtatacacgagtcgtgcgatttatactgaagatccacaaagagatttagacatttacatagatattgctgagcgtgcaggtcaacatgcaaacgttgagcgtattaaaaatggtattcaaagacgcatagataatggtacgttgaaagttgttgataattatgatgctattgaaaacatacctggtgaattaattatgaaaatattagcatttgatggaaatttagaaaaaattgataaagctagtaaaattttagctaaatctccgaatttagctatatcatcatcttcgagaggaaatatagaaataacgcattcagatgcacaaaaaggtattgcgctagaaacaattgccgaaagattagggattgaaatgaaagatgtcatggcaataggtgacaatttaaatgacttatcaatgttagagaaagttggttatccagttgcgatggaaaatggtgcagaagaagttaaaaaaatagcgaaatatgtcacagatacgaatgaaaatagtggtgttggaaaagctattatgaaattattacgtgaacaacaagtttaa

SEQ ID NO: 417276 - DNA, 471 bp, Staphylococcus aureus
atgacaaatgatatatattttatgacattagcgattaaagaagctaaaaaagcagctcaactaggcgaagtacctataggtgctatcatcactaaagatgatgaagttatcgctagagcacataatttaagagaaacactacaacaaccaacggcgcatgctgaacatattgcaattgaacgtgcagccaaagtgttaggtagttggcgtttagaaggttgcacattatatgtaaccttagaaccatgtgtcatgtgcgcaggaacaattgtaatgagtcgcattccaagagtcgtctatggcgcagatgatcctaaaggtggttgtagtggcagtttaatgaatttattgcaacaatctaattttaatcatcgtgcaattgttgataaaggtgtacttaaagaagcatgtagcacattattaacaacattttttaaaaacttaagagccaataagaaatccaccaattag

SEQ ID NO: 417277 - DNA, 618 bp, Staphylococcus aureus; identical to SEQ ID NO: 406705

SEQ ID NO: 417278 - DNA, 663 bp, Staphylococcus aureus; identical to SEQ ID NO: 406706

SEQ ID NO: 417279 - DNA, 684 bp, Staphylococcus aureus
atggaatggatattatttgataaagatggtacgttaattgaatttgatagaagttgggaaaaaataggggtacgatttgtacaatcattgcttgagactttcccagtacataataaagaagctgctttaagacaactcggtgtcattaaagaatctattgatccaaaatcagtgatgggttcaggatctttacaacaaattatccaggcatttaatgatgtgacgggacaagatacaaccgactggtccaagtcaacaagtcaaaagctggtagatgaacgtattcctgaaattaattgggtagaaggtgttaaagaagcacttatcgatttgaaagcaaaaggctatcaacttggtattgttactagtgatactaaaaaaggtgtagaacaatttttagcacataccaatgctatctcgttgttcgatttgatcatttctaccgaagcggatgcctatgagaagccaaatcctaaagtattatcgcctttatttgagcaatataatgtagatcctcagaaagtagctatagtaggagacactgctaatgatatgaagacagcaagtaatgcaaatttaggtatggcaataggtgtattaacaggtattgcaacaaaagaagaattacatgaagctgatattattttaaatagtgcggcagatattttagaagctttaaattaa

SEQ ID NO: 417280 - DNA, 1077 bp, Staphylococcus aureus
atgtcacaagcagttaaagttgaacgacgagaaacattaaaacaaaaaccaaatacatctcaactaggttttggtaaaaattttactgattatatgttgagttatgattatgatgcagataaaggatggcatgatttgaagatagtaccttatggtcctattgaaatttcacctgctgcacaaggtgttcattatggtcaatcggtattcgaaggattaaaagcatataaaagagatggggaagttgcacttttccgtcctgaagaaaattttaagcgtcttaataactcgttagcacgattagaaatgcctcaagtagacgaagcagaattgttagaggggctaaaacaattagttgatttagaaagagattggattcctgaaggggaaggtcaatcattatatattcgtccatttgtttttgcaacagaaggggcacttggcgttggtgcatcacatcagtataaattattaattattttatctccttcaggtgcatattatggtggtgaaactttaaaaccaactaaaatctatgtagaagatgaatatgtgcgtgctgttcgtggcggtgtaggctttgcgaaagttgcaggtaactatgcggcaagtttattagcacaaactaatgcaaataaattaggttatgaccaagtattatggcttgatggtgttgaacagaaatatatcgaagaagttggtagcatgaacattttcttcgttgaaaatggcaaagtaattacaccagagttgaatggcagtattttacctggtattactcgtaaatctattatcgaattagctaaaaacttaggatatgaagtcgaagagcgccgcgtttcaatcgatgaattattcgaatcatatgataaaggtgagttaacagaagtatttggtagtggtactgcagcagttatttcacctgtgggtacattgagatacgaagatcgtgaaatcgttattaataataatgagacaggtgaaattactcaaaaattatacgatgtctatactggtattcaaaatggtactttagaagataaaaatggttggagagtcgttgtaccaaaatattaa

SEQ ID NO: 417281 - DNA, 966 bp, Staphylococcus aureus
atgaaaaaaattatgattactggtgcattaggacaaattggtacagaattagttgttaagtgcagagaaatttatgggacagataatgttcttgctacagatattagggaacctgaagcagactcacctgtacaaaatggaccatttgaaatcttagacgtaacagatcgtgaccgcatgtttgagttagttagggactttgaagcggatagtctaatgcatatggcagcattattatcagcaactgctgagaaaaatccaattctagcttgggatttaaatatgggtggattaatgaatgcattagaagctgcaagaacttataatttgcactttttcacaccaagttcaattggtgcatttggagactcaactcctaaagttaatacgccacaagtaacgattcagcaacctacgacaatgtatggtgtaaataaagtagctggagaattattgtgtcaatactatttcaaacgttttggtgtagatacaagaagtgttagattcccaggtttaatctcgcatgttaaagagccaggtggcggtactacagactatgctgttgaaatatacttcaaagcagtaagagagggtcattatacaagcttcatagataaaggcacgtatatggatatgatgtatatggatgatgcaattgaagcaattattaaacttatggaagcagacgacgctaaattagaaactagaaacggttataatttgagcgcaatgagttttgatccagagatggtaaaagaagcaattcaagaatactatcccaattttacattagattacgatgttgatcctattagacaaggtatcgctaatagttggccggattctattgatacaagctgttcacgtggcgaatggggatttgatcctaaatatgatttagcgagcatgactaaattaatgttagaagctattgaacaaaaagatactgttaaaaataataactaa

SEQ ID NO: 417282 - DNA, 1638 bp, Staphylococcus aureus
atgtcttatagcattggaattgattatggaacagcttcaggccgtgtgtttttaattaatacaactaacggtcaagtagtatcaaaatttgtgaaaccatatacacatggtgtcattgagagtgaattaaatggtttgaaaataccacatacatatgcacttcaaaatagtaatgattatttagaaattatggaagaaggaatatcatatatagtacgtgaatcaaaaatagatccagacaatatagtaggtattggtatagactttacttcatctactattatttttactgacgaaaaccttaacccggtacataacttaaaacaatttaaaaacaatccacatgcgtatgtgaaactttggaaacatcatggtgcatataaagaggcagagaaattatatcaaactgctattgaaaataataataagtggttaggccattatggatataatgttagtagtgaatggatgattcccaaaataatggaggtcatgaatcgagcaccagaaattatggaaaaaacggcttatattatggaagcgggcgattggattgtaaataaattaactaataaaaatgtacgctcgaattgtggattaggtttcaaagcattttgggaagaagaaacagggtttcattatgatttatttgataaaatagaccccaaattatcaaaagtaattcaagataaagtatctgcaccggttgttaatattggtgaagtagtagggaaactggatgataaaatggcacagaaattaggattatcaaaagagactatggtaagtccttttattattgatgcccatgctagtttattaggtattgggtctgaaaaagataaagaaatgactatggtgatgggaacaagcacatgccatcttatgttaaatgaaaagcaacatcaagtgccaggtatatcaggttctgtaaaaggagcaattattccagaattatttgcttatgaagcgggacaatcagcagtaggtgatttgtttgagtatgtcgctaagcaagcaccaaagtcatatgtagatgaagcagcaaatagaaatatgactgtatttgaattaatgaatgaaaagataaaacatcaaatgccaggtgaaagtgggctcattgctcttgattggcataatggaaatcgaagtgtattaagtgatagcaatttaacaggttgtatctttggattaactttacaaactaagcatgaggatatttatagagcatatttagaagctacagcatttggtactaagatgattatgcaacagtatcaagattggcatatggaagtagaaaaggtatttgcatgtggcggtatacctaaaaagaatgctgttatgatggatatctatgcgaatgtactgaataaaaaactaattgttatggatagtgagtatgcaccagcaataggcgcagcaatattaggtgcagtcagtggtggcgcacataattcaattaatgatgcagttgatgctatgaaagagccaattttatacgaaattaatccagaagcggaaaaagtacaaaggtatgaaacattatttaaagcttataaggctttacatgatatccatggttataaaaaagctaatataatgaaagatatccagagtttaagagttgagggataa

SEQ ID NO: 417283 - DNA, 1188 bp, Staphylococcus aureus
gtggttcaatcattacatgagtttttagaggaaaatataaattatctaaaagaaaatggtttgtataatgaaatagatacaattgaaggtgcaaacggaccagaaatcaaaatcaatgggaaatcatacattaacttatcttcaaataattatttaggactagcaacaaatgaagatttgaaatcagctgcaaaagcagcaattgatacacatggtgtaggtgcaggcgctgttcgtacaatcaatggtacattagatttacacgacgaattagaagaaacactagcaaaatttaaaggaacagaagctgcaatagcttatcaatcaggatttaattgtaatatggctgctatttcagctgtcatgaataaaaatgatgctattttatcagatgagcttaatcatgcatcaattattgatggatgtcgcttatctaaagctaaaattattcgagttaaccattcagacatggatgatttacgtgcgaaagcaaaagaagcagttgaatcaggtcaatacaataaagtgatgtatatcactgatggcgtttttagtatggatggtgatgtggctaaattacctgaaattgtagaaattgcagaagaatttggtttattaacttatgttgacgacgctcatggttcaggtgttatgggtaaaggcgctggtacggttaaacattttggtttacaagataaaatcgatttccaaataggtacgctttctaaagcaattggtgtcgttggcggctatgtagcaggtacaaaagagttaatagattggttaaaagcacaatcacgaccattcttattctctacatcattagcacctggggataccaaagcaataactgaagcagttaaaaagttaatggattcaactgaattacatgataaattatgggacaatgcacaatatttaaaaaatggattgtcaaaattaggatatgatacaggtgagtcagaaactccaattacaccagtaattattggtgatgaaaaaacaactcaagaatttagtaagcgtttaaaagacgaaggtgtctatgtgaaatctatcgttttcccaacagtaccaagaggtacaggacgtgtaagaaatatgcctacagctgcacatacaaaagacatgttagatgaagcaattgcggcttatgaaaaagttggaaaagaaatgaagttgatttaa

SEQ ID NO: 417284 - DNA, 1176 bp, Staphylococcus aureus
gtgttagattggttccaactagcaaataataaagaaaataaaacaattcaactcagacgttatttacaccaatatcctgagttatcttttgaagaatttcaaacacatgattatattgttaaccaattaagccagttatcttgtgatattgaaactcctatcggccgcaatggtatcaaagccacatttaaaggcttgggcacaggacctaccattgcattaagagctgactttgatgcgttacctgtcgaggaattaaacgatgtgccttataagtctaaaaatccaggatgtatgcatgcgtgtgggcatgatggtcatacagcaattttacttactgtagcagagattttagatgaacataaacatttattagaaggtaatgttgtattaatattccagtacggtgaagaaatcatgccaggtggttctcaagaaatgatagatgctggatgtctggaaaatgtagatagaatttacggtacacatttatggagtggttatcctactggaactattcattcacgtgcgggggcaatcatggcctctccagatgaatttagtgtcacaattaaaggtcgtggcggtcatggtgccaaacctcatgaaaccattgacccaatagtaatcatggcagagttcattttaagtgcacaaaaaataatttcacgtacgatcgatccagttaaacaagctgtactttcatttggaatgattcaagcaggcaccacagatagcgttattcctgatcaagcattttgtaaaggtacagttagaactttcgattcagatatacagaatcatgtaatggacaaaatggataagcttttacaaggtttagcaatagcaaatgatattaactatgatttgaattatattaaagggtatttgcctgtccataataacgagaaagcatatcaagttattaaagaagcaacaaatgacttacatgtacgctttaatgaatcagatttaatgatgattggagaagatttttcacattatttgaaagtacgaccaggtgcattctttctgactggttgtggtaatgaaagtaaaggtattacagcgccacaccataatcccaaatttgatattgatgaaaaatcattaaaatacgctgtagctgtatttttaaaaatcattgaattagagcaagtatttaaaacaaattaa

SEQ ID NO: 417285 - DNA, 1185 bp, Staphylococcus aureus; identical to SEQ ID NO: 406714

SEQ ID NO: 417286 - DNA, 2082 bp, Staphylococcus aureus
atggctagagaattttcattagaaaaaactcgtaatatcggtatcatggctcacattgatgctggtaaaacgactacgactgaacgtattctttattacactggccgtatccacaaaattggtgaaacacacgaaggtgcttcacaaatggactggatggagcaagaacaagaccgtggtattactatcacatctgctgcaacaacagcagcttgggaaggtcaccgtgtaaacattatcgatacacctggacacgtagacttcactgtagaagttgaacgttcattacgtgtacttgacggagcagttacagtacttgatgcacaatcaggtgttgaacctcaaactgaaacagtttggcgtcaggctacaacttatggtgttccacgtatcgtatttgtaaacaaaatggacaaattaggtgctaacttcgaatactctgtaagtacattacatgatcgtttacaagctaacgctgctccaatccaattaccaattggtgcggaagacgaattcgaagcaatcattgacttagttgaaatgaaatgtttcaaatatacaaatgatttaggtactgaaattgaagaaattgaaattcctgaagaccacttagatagagctgaagaagctcgtgctagcttaatcgaagcagttgcagaaactagcgacgaattaatggaaaaatatcttggtgacgaagaaatttcagtttctgaattaaaagaagctatccgccaagctactactaacgtagaattctacccagtactttgtggtacagctttcaaaaacaaaggtgttcaattaatgcttgacgctgtaattgattacttaccttcaccactagacgttaaaccaattattggtcaccgtgctagcaaccctgaagaagaagtaatcgcgaaagcagacgattcagctgaattcgctgcattagcgttcaaagttatgactgacccttatgttggtaaattaacattcttccgtgtgtattcaggtacaatgacatctggttcatacgttaagaactctactaaaggtaaacgtgaacgtgtaggtcgtttattacaaatgcacgctaactcacgtcaagaaatcgatactgtatactctggagatatcgctgctgcggtaggtcttaaagatacaggtactggtgatactttatgtggtgagaaaaatgacattatcttggaatcaatggaattcccagagccagttattcacttatcagtagagccaaaatctaaagctgaccaagataaaatgactcaagctttagttaaattacaagaagaagacccaacattccatgcacacactgacgaagaaactggacaagttatcatcggtggtatgggtgagcttcacttagacatcttagtagaccgtatgaagaaagaattcaacgttgaatgtaacgtaggtgctccaatggtttcatatcgtgaaacattcaaatcatctgcacaagttcaaggtaaattctctcgtcaatctggtggtcgtggtcaatacggtgatgttcacattgaattcacaccaaacgaaacaggcgcaggtttcgaattcgaaaacgctatcgttggtggtgtagttcctcgtgaatacattccatcagtagaagctggtcttaaagatgctatggaaaatggtgtcttagcaggttatcctttaattgatgttaaagctaaattatatgatggttcataccatgatgtcgattcatctgaaatggccttcaaaattgctgcatcattagcacttaaagaagctgctaaaaaatgtgatcctgtaatcttagaaccaatgatgaaagtaactattgaaatgcctgaagagtacatgggtgatatcatgggtgacgtaacatctcgtcgtggacgtgttgatggtatggaacctcgtggtaatgcacaagttgttaatgcttatgtaccactttcagaaatgttcggttatgcaacatcattacgttcaaacactcaaggtcgcggtacttacactatgtacttcgatcactatgctgaagttccaaaatcaatcgctgaagatattatcaagaaaaataaaggtgaataa

SEQ ID NO: 417287 - DNA, 471 bp, Staphylococcus aureus
atgcctcgtaaaggatcagtacctaaaagagacgtattaccagatccaattcataactctaagttagtaactaaattaattaacaaaattatgttagatggtaaacgtggaacagcacaaagaattctttattcagcattcgacctagttgaacaacgcagtggtcgtgatgcattagaagtgttcgaagaagcaatcaacaacattatgccagtattagaagttaaagctcgtcgtgtaggtggttctaactatcaagtaccagtagaagttcgtccagagcgtcgtactactttaggtttacgttggttagttaactatgcacgtcttcgtggtgaaaaaacgatggaagatcgtttagctaacgaaattttagatgcagcaaataatacaggtggtgccgttaagaaacgtgaggacactcacaaaatggctgaagcaaacaaagcatttgctcactaccgttggtaa

SEQ ID NO: 417288 - DNA, 414 bp, Staphylococcus aureus; identical to SEQ ID NO: 406717

SEQ ID NO: 417289 - DNA, 255 bp, Staphylococcus aureus; identical to SEQ ID NO: 406718

SEQ ID NO: 417290 - DNA, 3624 bp, Staphylococcus aureus
ttgattgatgtaaataatttccattatatgaaaataggattggcttcacctgaaaaaatccgttcttggtcttttggtgaagttaaaaaacctgaaacaatcaactaccgtacattaaaacctgaaaaagatggtctattctgtgaaagaattttcggacctacaaaagactgggaatgtagttgtggtaaatacaaacgtgttcgctacaaaggcatggtctgtgacagatgtggagttgaagtaactaaatctaaagtacgtcgtgaaagaatgggtcacattgaacttgctgctccagtttctcacatttggtatttcaaaggtataccaagtcgtatgggattattacttgacatgtcaccaagagcattagaagaagttatttactttgcttcttatgttgttgtagatccaggtccaactggtttagaaaagaaaactttattatctgaagctgaattcagagattattatgataaatacccaggtcaattcgttgcaaaaatgggtgcagaaggtattaaagatttacttgaagagattgatcttgacgaagaacttaaattgttacgcgatgagttggaatcagctactggtcaaagacttactcgtgcaattaaacgtttagaagttgttgaatcattccgtaattcaggtaacaaaccttcatggatgattttagatgtacttccaatcatcccaccagaaattcgtccaatggttcaattagatggtggacgatttgcaacaagtgacttaaacgacttataccgtcgtgtaattaatcgaaataatcgtttgaaacgtttattagatttaggtgcacctggtatcatcgttcaaaacgaaaaacgtatgttacaagaagccgttgacgctttaattgataatggtcgtcgtggtcgtccagttactggcccaggtaaccgtccattaaaatctttatctcatatgttaaaaggtaaacaaggtcgtttccgtcaaaacttacttggtaaacgtgttgactattcaggacgttcagttattgcagtaggtccaagcttgaaaatgtaccaatgtggtttaccaaaagaaatggcacttgaactatttaaaccattcgtaatgaaagaattagttcaacgtgaaattgcaactaacattaaaaatgcgaagagtaaaatcgaacgtatggatgatgaagtttgggacgtattggaagaagtaattagagaacatcctgtattacttaaccgtgcaccaacacttcatagacttggtattcaagcatttgaaccaactttagttgaaggtcgtgcgattcgtctacatccacttgtaacaacagcttataacgctgactttgacggtgaccaaatggcggttcacgttcctttatcaaaagaggcacaagctgaagcaagaatgttgatgttagcagcacaaaacatcttgaaccctaaagatggtaaacctgtagttacaccatcacaagatatggtacttggtaactattaccttactttagaaagaaaagatgcagtaaatacaggcgcaatctttaataatacaaatgaagtattaaaagcatatgcaaatggctttgtacatttacacactagaattggtgtacatgcaagttcattcaataatccaacatttactgaagaacaaaacaaaaagattcttgctacgtcagtaggtaaaattatattcaatgaaatcattccagattcatttgcttatattaatgaacctacgcaagaaaatttagaaagaaagacaccaaacagatatttcatcgatcctacaactttaggtgaaggtggattaaaagaatactttgaaaatgaagaattaattgaacctttcaacaaaaaattcttaggtaatattattgcagaagtattcaacagatttagcatcactgatacatcaatgatgttagaccgtatgaaagacttaggattcaaattctcatctaaagctggtattacagtaggtgttgctgatatcgtagtattacctgataagcaacaaatacttgatgagcatgaaaaattagtcgacagaattacaaaacaattcaaccgtggtttaatcactgaagaagaaagatataatgcagttgttgaaatttggacagatgcaaaagatcaaattcaaggtgaattgatgcaatcacttgataaaactaacccaatcttcatgatgagtgattcaggtgcccgtggtaacgcatctaactttacacagttagcaggtatgcgtggattgatggccgcaccatctggtaagattatcgaattaccaatcacatcttcattccgtgaaggtttaacagtacttgaatacttcatctcaactcacggtgcacgtaaaggtcttgccgatacagcacttaaaacagctgactcaggatatcttactcgtcgtcttgttgacgtggcacaagatgttattgttcgtgaagaagactgtggtactgatagaggtttattagtttctgatattaaagaaggtacagaaatgattgaaccatttatcgaacgtattgaaggtcgttattctaaagaaacaattcgtcatcctgaaactgatgaaataatcattcgtcctgatgaattaattacacctgaaattgctaagaaaattacagatgctggtattgaacaaatgtatattcgctcagcatttacttgtaacgcacgacatggtgtttgtgaaaaatgttacggtaaaaaccttgctactggtgaaaaagttgaagttggtgaagcagttggtacaattgcagcccaatctatcggtgaaccaggtacacagcttacaatgcgtacattccatacaggtggggtagcaggtagcgatatcacacaaggtcttcctcgtattcaagagattttcgaagcacgtaaccctaaaggtcaagcggtaattacggaaatcgaaggtgtcgtagaagatattaaattagcaaaagatagacaacaagaaattgttgttaaaggtgctaatgaaacaagatcataccttgcttcaggtacttcaagaattattgtagaaatcggtcaaccagttcaacgtggtgaagtattaactgaaggttctattgaacctaagaattacttatctgttgctggattaaacgcgactgaaagctacttattaaaagaagtacaaaaagtttaccgtatgcaaggtgtagaaatcgacgataaacacgttgaggttatggttcgacaaatgttacgtaaagttagaattatcgaagcaggtgatacaaagttattaccaggttcattagttgatattcataactttacagatgcaaatagagaagcatttaaacaccgtaagcgtcctgcaacagctaaaccagtattacttggtattactaaagcatcacttgaaacagaaagtttcttatctgcagcatcattccaagaaacaacaagagttcttacagatgcagcaattaaaggtaagcgtgatgacttattaggtcttaaagaaaacgtaattattggtaagttaattccagctggtactggtatgagacgttatagcgacgtaaaatacgaaaaaacagctaaaccagttgcagaagttgaatctcaaactgaagtaacggaataa

SEQ ID NO: 417291 - DNA, 3552 bp, Staphylococcus aureus
ttggcaggtcaagttgtccaatatggaagacatcgtaaacgtagaaactacgcgagaatttcagaagtattagaattaccaaacttaatagaaattcaaactaaatcttacgagtggttcctaagagaaggtttaatcgaaatgtttagagacatttctccaattgaagattttactggtaatttgtcattagagtttgtggattaccgtttaggagaaccaaaatatgatttagaagaatctaaaaaccgtgacgctacttatgctgcacctcttcgtgtaaaagtgcgtctaatcattaaagaaacaggagaagttaaagaacaagaagtctttatgggtgatttcccattaatgactgatacaggtacgttcgttatcaatggtgcagaacgtgtaatcgtatctcaattagttcgttcaccatccgtttatttcaatgaaaaaatcgacaaaaatggtcgtgaaaactatgatgcaacaattattccaaaccgtggtgcatggttagaatatgaaacagatgctaaagatgttgtatacgtacgtattgatagaacacgtaaactaccattaacagtattgttacgtgcattaggtttctcaagtgaccaagaaattgttgaccttttaggtgacaatgaatatttacgtaatactttagagaaagacggcactgaaaacactgaacaagcgttattagaaatctatgaacgtttacgtccaggtgaaccaccaactgttgaaaatgctaaaagtctattgtattcacgtttctttgatccaaaacgctatgacttagcaagcgtgggtcgttataaaacaaacaaaaaattacatttaaaacatcgtttatttaatcaaaaattagctgagccaattgtaaatactgaaactggtgaaattgtagttgaagaaggtacagtgcttgatcgtcgtaaaatcgacgaaatcatggatgtacttgaatcaaatgcaaacagcgaagtgtttgaattgcatggtagcgttatagacgagccagtagaaattcaatcaattaaagtatatgttcctaacgatgatgaaggtcgtacgacaactgtaattggtaatgctttccctgactcagaagttaaatgtattacaccagcagatatcattgcttcaatgagttacttctttaacttattaagcggtattggatatacagatgatattgaccatttaggtaaccgtcgtttacgttctgtaggtgaattactacaaaaccaattccgtatcggtttatcaagaatggaaagagttgtacgtgaaagaatgtcaattcaagatactgagtctatcacacctcaacaattaattaatattcgacctgttattgcatctattaaagaattctttggtagctctcaattatcacaattcatggaccaagcaaacccgttagctgagttaacgcataaacgtcgtctatcagcattaggacctggtggtttaacacgtgaacgtgctcaaatggaagtacgtgacgttcactactctcactatggccgtatgtgtccaattgaaacacctgagggaccaaacattggattgattaactcattatcaagttatgcacgtgtaaatgaattcggctttattgaaacaccatatcgtaaagttgatttagatacacatgctatcactgatcaaattgactatttaacagctgacgaagaagatagctatgttgtagcacaagcaaactctaaattagatgaaaatggtcgtttcatggatgatgaagttgtatgtcgtttccgtggtaacaacacagttatggctaaagaaaaaatggattatatggatgtatcgccgaagcaagttgtttcagcagcgacagcatgtattccattcttagaaaatgatgactcaaaccgtgcattgatgggtgcgaacatgcaacgtcaagcagtgcctttgatgaatccagaagcaccatttgttggtacaggtatggaacacgttgcagcacgtgattctggtgcggctattacagctaagcacagaggtcgtgttgaacatgttgaatctaatgaaattcttgtacgtcgtctagttgaagagaacggcgttgagcatgaaggtgaattagatcgctatccattagctaaatttaaacgttcaaactcaggtacatgttataaccaacgtccaatcgttgcagttggagatgttgttgagtataacgagattttagcagatggaccatctatggaattaggagaaatggcattaggtagaaacgtagtagttggtttcatgacttgggacggttacaactatgaggatgccgttatcatgagtgaaagacttgtgaaagatgacgtgtatacttctattcatattgaagagtatgaatcagaagcacgtgatactaagttaggacctgaagaaatcacaagagatattcctaatgtttctgaaagtgcacttaagaacttagacgatcgtggtatcgtttatattggtgcagaagtaaaagatggagatattttagttggtaaagtaacgcctaaaggtgtaactgagttaactgccgaagaaagattgttacatgcaatctttggtgaaaaagcacgtgaagttagagatacttcattacgtgtacctcacggcgctggcggtatcgttcttgatgtaaaagtattcaatcgtgaagaaggcgacgatacattatcacctggtgtaaaccaattagtacgtgtatatatcgttcaaaaacgtaaaattcatgttggtgataagatgtgtggtcgacatggtaacaaaggtgtcatttctaagattgttcctgaagaagatatgccttacttaccagatggacgtccgatcgatatcatgttaaatcctcttggtgtaccatctcgtatgaacatcggacaagtattagagctacacttaggtatggctgctaaaaatcttggtattcacgttgcatcaccagtatttgacggtgcaaacgatgacgatgtatggtcaacaattgaagaagctggtatggctcgtgatggtaaaactgtactttatgatggacgtacaggtgaaccattcgataaccgtatttcagtaggtgtaatgtacatgttgaaacttgcgcacatggttgatgataaattacatgcgcgttcaacaggaccatattcacttgttacacaacaaccacttggcggtaaagcacaattcggtggacaacgttttggtgagatggaggtatgggcacttgaagcatatggtgctgcatacacattacaagaaatcttaacttacaaatccgatgatacagtaggacgtgtgaaaacatacgaggctattgttaaaggtgaaaacatctctagaccaagtgttccagaatcattccgagtattgatgaaagaattacaaagtttaggtttagatgtaaaagttatggatgagcaagataatgaaatcgaaatgacagacgttgatgacgatgatgttgtagaacgcaaagtagatttacaacaaaatgatgctcctgaaacacaaaaagaagttactgattaa

SEQ ID NO: 417292 - DNA, 609 bp, Staphylococcus aureus
atgagtcattattacgatgaagatccaagtgtaattagcaatgaacaacgtattcaatatcaattaaaccatcataaaattgatttaataactgataacggagtgttttcgaaagataaagtagattatggttcagatgttcttgttcaaacttttttaaaagcgcatccacctggtccaagtaagcgaattgccgatgttggttgtggttacggaccaattggtttgatgattgctaaagtatcaccacatcattcaattacaatgctagatgttaatcacagagcgctagccttagttgaaaaaaacaaaaaattaaatgatattgataatgtgatcgtaaaagaaagtgatgctttgtctgctgtggaagacaaaagttttgattttattttaaccaatccaccaataagagcagggaaagaaaccgtgcatcgtatattcgagcaagcattacatagattagactcgaacggtgaactattcgttgtaattcagaagaagcaaggtatgccatctgcaaagaaaagaatgaatgaactttttggaaatgtagaagtggtaaataaagataaaggatattacattctgagaagtataaaagcttga

SEQ ID NO: 417293 - DNA, 369 bp, Staphylococcus aureus; identical to SEQ ID NO: 406722

SEQ ID NO: 417294 - DNA, 501 bp, Staphylococcus aureus; identical to SEQ ID NO: 406723

SEQ ID NO: 417295 - DNA, 693 bp, Staphylococcus aureus
atggctaaaaaaggtaaaaagtatcaagaagcagctagtaaagttgaccgtactcagcactacagtgttgaagaagcaattaaattagctaaagaaacaagcattgctaactttgacgcttctgttgaagttgcattccgtttaggaattgatacacgtaaaaatgaccaacaaatccgtggtgcagttgtattaccaaacggaactggtaaatcacaaagtgtattagtattcgctaaaggtgacaaaattgctgaagctgaagcagcaggtgctgactatgtaggtgaagcagaatacgttcaaaaaatccaacaaggttggttcgacttcgatgtagtagttgctacaccagacatgatgggtgaagttggtaaattaggtcgtgtattaggaccaaaaggtttaatgccaaaccctaaaactggaactgtaacaatggatgttaaaaaagctgttgaagaaatcaaagctggtaaagtagaataccgtgctgaaaaagctggtatcgtacatgcatcaattggtaaagtttcatttactgatgaacaattaattgaaaacttcaatactttacaagatgtattagctaaagctaaaccatcatctgctaaaggtacatacttcaaatctgttgctgtaactacaacaatgggtcctggagttaaaattgatactgcaagtttcaaataa

SEQ ID NO: 417296 - DNA, 423 bp, Staphylococcus aureus; identical to SEQ ID NO: 406725

SEQ ID NO: 417297 - DNA, 549 bp, Staphylococcus aureus; identical to SEQ ID NO: 406726

SEQ ID NO: 417298 - DNA, 183 bp, Staphylococcus aureus; identical to SEQ ID NO: 414867

SEQ ID NO: 417299 - DNA, 570 bp, Staphylococcus aureus
ttgaaatatgatttgacaactcaagacagtacaatcaaacgtagcaatgcaataaatgataaagacttcgaaaagttagtaatggatctacaaccattaattattcgacgcatcaaaacatttggatttaatcattatgatttagaagacttatatcaagaaatacttatacggatgtataggtcggtccaaacatttgattttagtggagagcagcctttcacaaattatgttcaatgtttaattacgtctgtaaagtatgattatttgagaaaatatttagctacaaataaaagaatggataatttgattaatgaatatagagttacgtatccatgtgcaataaagcgttatgatgttgaaaacaattatttgaataaattagcaattaaagagttgattcgtcagtttaagtatttgagtgcatttgaaaaagatgtcatgtatttaatgtgtgaacaatataagccgagagaaattgctcaactgatgcatgtaaaagagaaagttatttataatgccatacaacgatgtaaaaataaaataaaacgttatttcaaaatgatttga

SEQ ID NO: 417300 - DNA, 525 bp, Staphylococcus aureus
atgaaagaacgttacttaatcattgatggatacaatatgataggacaatcaccaacgctaagcgccattgcaaaagagaatttagaagaagctagaatacaattaatagatgcaattgcaaattataatgcagttatttcagatgaaattatttgtgttttcgatgcttatgaccaatcgggtgttgaaagagaatacatgtatcatggcgttaaaacgatttttaccaaggaaaaagaaacagctgatagtttcatagaacgttatgtttatgaactttatgacaaacacactaagcatattacagttgtaacaagtgatatgagtgagcaacatgctatctttggatcaggtgcatatagaatatcatctcgcgaaatgtggagagatttaaaagaaaatgaaattgatgtgagtaaatcattagatgatataagtgaaaacaagccaagaactcgaattccgttatcttctgaaatccttgcagaatttgaaaaaatacgaagaggacatcataagaaatga

SEQ ID NO: 417301 - DNA, 747 bp, Staphylococcus aureus
gtggaagatacggttattgttggtaggcatgctgttagagaagcgattattactgggcatccgataaataagatattgattcaagaaggtattaaaaagcaacaaattaatgaaattttaaaaaatgcaaaagatcaaaaaatcattgttcaaactgtaccaaaatctaaattagattttttagcaaatgcaccacatcagggtgttgcagcgcttattgcaccatatgaatatgctgacttcgatcaatttttaaaacagcaaaaagaaaaagaaggtttatcgacagtacttatattagacggcttagaagacccgcataacttgggatcaattttaagaacagccgatgcaacgggagttgatggtgttattattcctaaacgtcgttcagttacactaacgcaaacagttgcaaaagcctcaacaggtgcaattgaacatgtaccagttattcgagtgacaaatttagctaaaactatcgatgaactaaaagataatggcttttgggtagctggcactgaagctaataatgcaacagattatagaaatctagaagcggacatgtcattggctattgtaattggtagcgaaggacagggtatgagtcgcctagtaagtgataaatgcgatttttatattaagattccaatggttggacatgtaaacagtttgaatgcttcggttgcagcaagtttaatgatgtacgaagtatttcgaaaaagacatgatgttggagaaatataa

SEQ ID NO: 417302 - DNA, 405 bp, Staphylococcus aureus; identical to SEQ ID NO: 406731

SEQ ID NO: 417303 - DNA, 1401 bp, Staphylococcus aureus
atgattacattatataatacgcttacacgtcaaaaagaagtgttcaagcctatagaaccaggaaaagtaaaaatgtatgtatgtggtcctactgtatataactacattcatattggtaacgcaagaccagcaattaattatgacgtagtgagacgttactttgaataccaaggatataatgtagaatatgtatcaaattttacagacgtagatgataaattaattaaacgttctcaagaattaaatcagtctgttcccgaaattgcagaaaaatatatcgcagcttttcatgaagatgttggtgcgttaaatgttagaaaagcgacttcaaatccaagggtaatggaccatatggatgacattattcaatttattaaagatttggtggatcaaggttatgcatatgaaagtggtggcgatgtttactttagaacacgtaaatttgaaggttatggtaaattaagtcatcaatccatagatgacttaaaagtgggtgctcgtatagatgcaggagagcataaggaagatgcacttgattttacattgtggaaaaaagcgaagcctggcgagattagttgggatagcccatttggagaaggtagaccaggatggcatattgaatgttctgtaatggcatttcatgagctaggacctacaattgatatacatgcgggtggttcagatttacaatttccacatcatgaaaatgaaatagcacaatcagaagcacataatcatgcgccatttgctaattattggatgcataatggtttcattaatattgataatgaaaaaatgagtaaatcactaggcaactttattttagttcacgatattattaaagaagttgatccagatgtactaagattctttatgattagcgtacattatagaagcccaattaactataatctagaattggtagaatcagcacgtagtggactagagcgtattcgcaatagttatcaattaattgaagagcgcgcacaaattgctactaatattgaaaatcaacagacatatattgatcaaattgatgcgattttaaatcgttttgaaacagttatgaatgatgattttaatacagctaatgcaattacagcttggtatgatttagcaaaaattgcgaataaatatgtactagagaatacaacatcaacagaagtaattgataaatttaaagcagtttatcaaattttcagcgatgttttaggtgtaccgttaaaatctaaaaatgcagatgaattattggatgaagatgttgaaaaattaatcgaagagcgtaatgaagcaaggaaaaacaaagattttgcacgagcagatgagattcgagacatgctgaaatcacaaaacattatattagaagacacacctcaaggggttagatttaaacgtggataa

SEQ ID NO: 417304 - DNA, 681 bp, Staphylococcus aureus
atgtatttacgtagttcaatcattgaggaggaaatgatcttgttaaaaagaatgagagacgatataaaaatggtatttgagcaggatccagcggcacgttcaacattagaagtcattacaacgtatgcaggtttacatgcagtttggagtcatttgattgcacataagttatacaaccaaaaaaaatatgttgcagcacgcgcgatatctcaaatttcaagatttttcacaggtatagaaatccatccaggtgctaaaattggaaagcgtctatttatagatcatggtatgggcgttgtaataggagaaacatgtacaattggtgataatgtgacaatctatcaaggcgtgacacttggtgggacagggaaagaaagagggaaaagacacccagatataggagacaatgttttaatagcagcgggtgcgaaagttttaggaaatattaaaataaattcaaatgtaaatattggtgcaaattcagttgttttacaatcagttccaagctattcaacggttgttggtataccaggacatattgttaagcaagatggtgttcgagttggaaaaacatttgatcatcgccatctacctgatccaatttatgaacaaattaagcatttagaacgacaacttgaaaagactaggaatggagagattcaagatgattacattatataa

SEQ ID NO: 417305 - DNA, 1455 bp, Staphylococcus aureus
atgagcgatcgtataagagtaagatatgcaccaagtccaactggttatcttcatattggtaatgcaagaacagcattattcaattacttgtatgctaaacattacaacggagattttgtgattcgaattgaagatactgataaaaaacgtaatttagaagatggagaaacatcacaatttgataatcttaaatggttaggattagattgggatgagtctgtagataaagacaatggctacggaccatatcgtcaatctgaacgtcaacatatctaccaaccattaatagatcagttactagcagaagataaagcatataaatgctatatgacagaagaagaattagaagctgaacgtgaagcgcaaatcgctcgtggtgaaatgcctcgctatggtggacaacatgcgcatttgactgaagaacaacgtcaacaatttgaagcagaaggacgccaaccatcaattcgtttccgagtacctcaaaaccaaacgtattcatttgatgatatggtaaaaggaaatatttcatttgattcaaatggtattggtgactgggttatcgtaaaaaaagatggcattccaacgtacaattttgcagtagctatagatgatcattacatgcaaatttcagatgtaattcgtggtgatgatcatatttcaaacacgcctaaacaaattatgatttatgaagcatttggctgggagccacctcgttttggtcatatgtcattaattgttaatgaagaacgtaaaaagttaagtaaacgtgatgggcaaattttacaatttattgagcaatatcgtgacttaggttatttacctgaagcgttatttaattttattgcgttattaggttggtctcctgaaggtgaagaagaaatcttttctaaagaagaatttatcaaaatctttgatgaaaagcgtttgtcaaaatcaccagcatttttcgataagcaaaaattagcatgggttaataaccaatatatgaaacaaaaagatactgaaacagtattccaattagcattacctcatttaattaaagcaaatttgattcctgaggtgccgtcagaagaggatttatcttggggacgcaaattaattgcgctttatcaaaaagaaatgagttatgccggtgaaattgtacctttatcagaaatgttctttaaagaaatgccagctcttggtgaagaagaacaacaagtgattaatggagagcaagtaccagagttaatgacgcacttattcagtaaattagaagcacttgaaccatttgaagcggctgaaattaaaaagacaattaaagaagttcaaaaagaaacaggaataaaaggcaagcaattatttatgcctattcgtgttgctgtaacaggccaaatgcatggtcctgaattaccaaatacaattgaagtacttggtaaagaaaaagtgctaaaccgtttaaaacaatataagtaa

SEQ ID NO: 417306 - DNA, 1074 bp, Staphylococcus aureus
gtgaatatcgttaaactaatggttattattatttacttaattattgggagcgcattaggaataattattattcctgaaattgcaaatgatcttggattacaaaactccagctttttaaaaaatcactatgtagatggcattatcggtagtatttttatgttcttaatttttggtgtatttattagacgagttactaacgctataaaaggtttagaacattttattatgcgtagaagtgctgttgaaatactattcgcaacaataggtttaataatcggattacttatttctgttatggtgtcgtttatattagaatcaattggcaactctatttttaatcatttcattcctgtcataattacgatattactatgttatttcggtttccaatttggccttaaaaaacgagatgaaatgttaatgtttttacctgagaatatagcgcgttccatgtcacaacatactaaaagtgctacgccaaaaattatcgacacaagcgcaattattgatggtcgtattttagaagtcattcgttgcggttttatcgatggcaatattttaattccgcaaggtgttattaatgaattacaaattgttgcagattcaaatgatagtgttaaacgtgaaaagggtaaaagaggcttagatattttaaatgaattgtatgatttagattatcctacaaaagtcatacatccaactaaaacacatagtgatattgatacgatgttattaaagctagctaaacaatatcatgcaagtattataacgacagatttcaacctaaataaagtttgtcatgtacatggtatcaaagcattaaatgttaatgatttatcagaagcaatcaaacctaatgtacatcaaggtgatcaactgcatattttactgacaaaaatgggtaaagagcctggtcaggcagtaggatatctagatgatggtacgatggtagttgttgataatgctaaaaatcttattggcagtcatgtcaatttagaagtagtcagcttattgcaaacatcttcaggaagaattgtttttgctaaaaaaatcgaagatacagtatcattataa

SEQ ID NO: 417307 - DNA, 1365 bp, Staphylococcus aureus
ttggccaagaaaaaagtgatttttgaatgtatggcttgtggttatcaatctcctaaatggatggggaaatgtcctaattgtggcgcttggaatcaaatggaggaaattgttgaaaaagcagccaatcctaaacatggagttaaaaccaaggaattagcaggtaaagtacaaaaattaaatagtattaaacatgaaacaacgccgagagtgttaacagattcagcagaattcaaccgtgtattaggtggaggtattgtgagcggatcgttagtacttattggtggggatccaggtattggtaagtcaacgttacttttacaaatttgtgcatcgttatctcaaaagaaaaaagtactatatattactggagaagaatcgcttagtcagactaaattacgtgcagagcgattagatgaagattcaagtgaattgcaagtattagctgaaacagatcttgaagttatttatcaaacagtaaaagaagaacaacctgatttattagtagtggattcgattcaaacaatatatcatcctgaaatcagctctgcgccaggttctgtttcacaagttcgtgaaagtacacaaagtttaatgaatattgctaaacaaatgaacattgcaacttttatagtgggtcatgtaacgaaagaaggtcaaattgctggcccaagattgctagaacacatggttgatactgtgctttattttgaaggcgatgaacaccacgcatatcgaattttgcgagctgttaaaaaccgttttggttcaacgaatgaaatgggaatcttcgaaatgaagcaaagtggattaaaaggtgtaaataatccatctgaaatgtttttagaagaacgttcaacaaatgttccaggttcaacaattgttgcaaccatggagggaaccagaccacttttaatagaagttcaagcgctggtaactccaacgacttttaacaatccgagacgaatggcaacagggattgatcataatcgattaagtttgttgatggctgttttggaaaagaaagaaaattatctattacaacaacaagatgcttatatcaaagtagctggcggtgtaaagttaacggagccagcagttgatttaagtgtaattgtagcaactgcatctagctttaaagataaagctgtcgacggattagattgctatattggagaagttggtttaacgggtgaggtacgtcgtgtatctcggatagaacaacgcgtgaaagaggctgcaaaactaggtttcaaacgtgtaattattcctaaaaataatataggcggatggacatatcctgaaggtatacaagtaataggtgtaactactgtacatgaagcattgtcatttgctcttcattcataa

SEQ ID NO: 417308 - DNA, 2457 bp, Staphylococcus aureus
atgttatttggtagattaactgagcgtgcacagcgcgtattagcacatgcacaagaagaagcaattcgtttaaatcattcgaatataggaacagaacacctattattgggattaatgaaagaacctgaaggaattgctgcaaaagtattagaaagttttaatatcactgaagataaagtaattgaagaagttgaaaaattaatcggacatggtcaagatcatgttggtacattgcattatacacctagagctaaaaaagtcattgaattatcgatggatgaagctagaaaattacatcacaattttgttggaacggaacatattttattaggcttgattcgtgaaaatgaaggtgttgcagcaagagtttttgcaaatctagatttaaatattactaaagcacgtgcacaagttgtgaaagctttaggaaaccctgaaatgagtaataaaaatgcacaagctagtaagtcaaataatactccaactttagatagtttagctcgtgacttaacagtcattgccaaagacggtacattagatcctgttataggacgtgataaagaaattacacgtgtaattgaagtattaagtagacgtacgaaaaacaatcctgtacttattggagagccaggtgttggtaaaactgctattgctgaaggtttagcgcaagccatagtgaataatgaggtaccagagacattaaaagataagcgtgttatgtctttagatatgggaacagtagttgcaggtactaaatatcgtggtgaatttgaagagcgtctgaaaaaggttatggaagaaatccaacaagcaggtaatgtcatcctatttattgatgagttgcatactttagttggtgctggtggtgctgaaggtgctatcgatgcttcgaatattttgaaaccggcattagcacgtggtgaattacaatgtattggtgctactacattagatgaatatcgcaaaaatattgaaaaagacgcggctttagaacgtcgtttccaacctgtacaagttgatgaaccttcagtagtagatacagttgctattttaaaaggattaagagatcgttacgaagcacaccatcgtattaatatttcagacgaagctattgaagcagctgttaaattaagtaacagatacgtttcagatcgtttcttaccagataaagcaattgatttaattgatgaagcaagttctaaagtaagacttaagagtcatacaacacctaataatttaaaagaaattgaacaagaaattgaaaaagttaaaaatgaaaaagatgccgcagtacatgctcaagagtttgaaaatgctgctaacctgcgtgataaacaaacaaaacttgaaaagcaatatgaagaagctaaaaatgaatggaagaatgcacaaaatggcatgtcaacttcattgtcagaagaagatattgctgaagttattgcaggatggacaggtatcccattaactaaaatcaatgaaacagaatctgaaaaacttcttagtctagaagatacattacatgagagagttattgggcaaaaagatgctgttaattcaatcagtaaagcggttagacgtgcccgtgcagggttaaaagatcctaaacgaccaattggtagctttatcttccttggaccaactggtgttggtaaaactgaattagctagagctttagctgaatcaatgtttggcgatgatgatgcgatgatccgtgtagacatgagtgaatttatggaaaaacacgcagtgagccgattagttggtgctcctccaggatatgttggtcatgatgatggtggacaattaactgaaaaagttagacgtaaaccatattctgtaattttatttgatgaaattgaaaaagcacatccagatgtatttaatattctattacaagttttagatgacggacatttgacagatacaaaaggacgtacagttgatttcagaaatacaattatcataatgacatcaaacgttggagcacaagaattacaagatcaacgatttgctggattcggtggttcaagtgatggacaagattatgaaacaattcgaaaaacgatgttaaaagaattaaaaaattcattccgtccagaatttttaaaccgtgtagatgatatcattgtattccataaactaacaaaagaggaattaaaagaaattgtaacaatgatggttaataaattaacaaatcgattatctgaacaaaacataaatattattgttactgataaagcgaaagacaaaatcgcagaagaaggatatgatccagaatatggtgcaagaccattaattagagcgatacaaaaaactatcgaagataatttaagtgaattaatattagatggtaatcaaattgaaggtaagaaagttacagtagatcatgatggtaaagagtttaaatatgacattgctgaacaaacttcagaaactaaaacaccatcgcaagcataa

SEQ ID NO: 417309 - DNA, 1011 bp, Staphylococcus aureus
atgatgacgcataatattcatgataatatcagccaatggatgaaaagtaatgaagaaacaccaattgttatgtcttctagaattcggttagcgcgtaatttagaaaatcatgtgcatccactaatgtatgctactgaaaatgatggatttagagttataaatgaggtacaagatgccttgccaaattttgaattaatgcgtcttgatcaaatggatcaacaaagtaaaatgaaaatggttgcaaagcatttgattagtcctgaactaataaaacaaccagcagccgcagtattagtgaatgatgatgaatctttaagtgtcatgataaatgaagaggaccatattcgtattcaagctatgggaactgacacgacattacaggctttatataatcaagcttcatcaattgatgatgaattagatcgaagccttgatataagttatgatgaacaacttggttatttaactacatgtcctaccaatataggtactggtatgagagcaagcgtgatgctacatttaccaggtctatctattatgaaaagaatgacacggattgctcaaaccattaatcgttttggatatacaatcagaggtatttacggtgaaggttcgcaagtttatggacatacttatcaagtatccaaccaacttacacttggtaaatctgagttagaaatcatagaaacattaacagaagttgttaatcaaatcattcatgaagaaaaacaaatacgacaaaagttagacacttataatcaattagaaacacaagaccgtgtttttcgctcgctaggtattttacaaaactgtagaatgataactatggaagaggcttcttatagattaagcgaagttaaacttggtatagatttaaattacattgaattacaaaactttaaatttaatgaattgatggtagctatacagtcaccatttttattagatgaagaagatgacaaatctgtaaaagaaaaacgagcagatatactaagagaacatataaagtag

SEQ ID NO: 417310 - DNA, 567 bp, Staphylococcus aureus; identical to SEQ ID NO: 414855

SEQ ID NO: 417311 - DNA, 471 bp, Staphylococcus aureus; identical to SEQ ID NO: 411029

SEQ ID NO: 417312 - DNA, 360 bp, Staphylococcus aureus
atgaaattgttaaaagaatttaatttacatttacttgatattgttttgttagatgacgatgaatttaatgaattggagtatttagtgaatagcgaatcagcagttattaatatttttaatgtgttgagactagcaagaagatatattttaacaaataaatcaggcgcaaatgttcttaggtatttattatttgtttttaacaataggataattcgtttacagttaccttataataggaataaatgttataaattatctaaccttatattggattataaatgtgttccatttgatcaaatgccatttacagcctctttaacttttcttttaattctaacattaagtcataatactttataa

SEQ ID NO: 417313 - DNA, 1776 bp, Staphylococcus aureus
atgtattacagttatggaaattatgaagcatttgcgcgccctaaaaaacctgaaaatgtagaaaacaaatctgcttacttaatcgggtctgggttagcttcacttgcggcagcttgtttcttaattagggatggtcaaatggaaggttcgaagattcatattttagaagagttacctaaagcaggtggtagtcttgacggagaaaatattcctttaaaaggctatgttgtccgcggtggtcgtgaaatggagaaccactttgaatgtttgtgggacttattcagatctatcccttcattagaaatcgataacgcgtctgtattagatgagttctattggctaaacaaagaagaccctaactattctcgctgtcgtgttattgagaaacagggtcaacgtttagtcacagacggagacttcactttgactaaaacgacgattaaagaaattttagatttatgcttaacgaatgaagaagatttagatgatgtcaaaataacagatgtattttccgatgacttctttaattcaaacttttggatttactggaaaacgatgtttgcatttgaaccgtggcattctgcaatggaaatgcgtcgctatctaatgcgattcgttcatcatattggtggtctcgcagacttttcagctttaaaattcactaaatataatcaatatgaatctttagtattacctatggttgaatatttaaaatcgcatggggttcaatttgaatacgatgtaaaagtagaagatattaaagtagatgttacgacaagtcaaaaaattgcccgagaaatattaattgaccgtaatggtaatgcagaatctattaaactgactgtagatgatcttgtctttgtgacaaacggtagtattacggaaagctctacgtatggtgataacaatacgcccgcgccaccaactaacgaattaggtggtagttggacattatggaaaaatttagcgcgacaaagtcctgaatttggtaatcctgacaagttttgccaaaatattcctgaaaaaagttggtttgtttcagcaacttctacaacaaacaataaagagattatcgatacaatagaaagtatttgtaaacgtgacccacttgcaggcaaaacagttacaggcggtattattacaatcaatgattctgcatggcaaatgagttttacaatcaatcgtcagcaacagtttaaagaccaacctgaaaatgaaatatctacatggatttatgccttatattcagatgtaaacggcgattatattaaaaagccaattacagaatgtagtggtaatgaaatatgtcaagaatggctgtatcacttaggtgtatcaactgacaaaattgaagacttagcaaaacatgcatctaatacgattcctgtttatatgccatatatcacatcttatttcatgacgcgtgctatcggcgacagacctttagtcgtcccgcatcaatctcagaacttagcatttattggtaactttgcagaaacagagcgagatactgtatttactacagaatattcggttcgtactgcaatggaagctgtttatgaactactaaatatcgaccgtggcatcccagaagtcatcaatagtccatttgatcttcgcgtcttaatggatgctgtatatgagctcaatgaccaccaagatttgcgtgagattactaaagattcgaaaatgcaaaaactcgcattagctggattccttaaaaaggtaaaaggtacgtacattgagacattattaaaagaacacaaattgttataa

SEQ ID NO: 417314 - DNA, 2250 bp, Staphylococcus aureus
gtgcaagaaacgaacaaagtagaaagcgcaccggaagcgaaagctacagaaagtgtgcaagaaacgaacaaagtagaaagcgcaccggaagcgaaagctacagaaaatgtgcaagaaacgaacaaagtagaaagtgcacaacaacaagataaaggaaaatcagtagaggcaaatgaaaagtctttttatgatttaagtaaaaaaattgatcaagcagttaataaaaaagaagttgtggaaaagcaagttaaaaagcaattttcgagtgtattatctgaaaaaaaaataagagaaatattagatgataaaaatattacatttgacacaatgagtggagaagagattgtttccgaagtttacaaggaaatatttaaagaaatttcattaaatattgataaaaattctttgccaccagtaattactaatagattttttgctattgatagtttaagtgatgctgagtctataaataatcaacaagaaaacagctcaaaattagttacgctagaatcttataaaatatacgggccacatcaaactggtacattaaatgcatctgatcccaatacaaaagaaaatcaagctattaagttggttcctggtccaggtattgggaataaggaaaagaatagaacagctatatatgctccaaatactatagattttagaaaagactttaatatgaattttgatattgcgctatggccccaaggcatgtcttcaagacctgatggattaggattcatgttttcaaaatctacccctgaagaatatcttagtcaaggtggcattctaaatgatagtggtgtgtcaaatgcttttggattcaaaatagatacctataataatggtaatgtggacaatttagaaaaagatttttctaaagaaaaaggtgcttcgccgaaagcttatggaacgtttgtttataacgatgctaatggaacaactcatagttatactaagtacccgttagataatcaaaataggcaacaaaaaaacaatttatttaatggtttcactcaagcttttaatggctttagaggccaacaatataatactgtaaatattaattataatgctgatagcggtaagttgaccgtgaactatgctggactaacatggacagcactattatcagatattggagcagacaaaaatagtagatataatttcggaattatatcaagtaaagaaacagatagaaatgttccaggtagttatcatacagttaaagttaattctgcctcaataacttataccccaggttcaaatgatgcgcaagataatacaccaggatatgaagatggaagaacgaaaccaggtcaaaaagtagatattccgcaaacaggggataaagacttaccaccaggaacgaactttgagattccaaaagatcgagtaccagagggatggacagtaacagtagatccagatgggaaagtatcagtaacgccaccggcggacgtaacaccaggaacaaaagtagatattccagtgaaagtaacatatccagatggttcaacagaagaaacacctgtaaaagttacaatcattccaaatgatgcgcaagataatacaccaggatatgaagatggaagaacgaaaccaggtcaaaaagtagatattccgcaaacaggagataaagacttaccaccaggaacgaactttgagattccaaaagatcgagtaccagaaggatggacagtaacagtagatccagatgggaaagtatcagtaacgccaccggcggacgtaacaccaggaacagaagtagatattccagtgaaagtaacatatccagatggttcaacagaggaaacatctgtaaaagttataatcatttcagatgactcagactctgatgcggacagcgattcagattcagacagcgattcagactctgatgcggacagcgattcagattcagacagcgactcagactctgatgcggacagcgattcagattcagacagcgactcagactctgatgcggacagcgattcagattcagatagcgattctgactctgatgcggacagcgactcagattcagacagcgactcagactcaagaaaacatacatctgttaaaccgatgagtgttactaaagatcatcataataaagccaaagcattaccagaaacaggtagtggaaatgatgaatcaaataatggaacattattcggaggattattcgcagcattaggttcattattattattcggtcgtcgcaaaaaacaaaataaataa

SEQ ID NO: 417315 - DNA, 774 bp, Staphylococcus aureus
atgactgaaaaacctaatattgagaacttagtaaaatttattaaattaaaggaaagcataggtaactacatttttgttagtttagggaatccgttagttaaagctcaagtaaagattttgaaaaatattaattatttagaaaatgatttgaataaactgtgtcaaaagtttaaaaataaatcaggaaagtacccaacttgggtcaaattagatattgtaactagtcaaaaaacaattccttttcatattttgcaagatgaaatgattaacactaggaggaattatatagattttggcatttcgttagataaatactggaatgtaacatttctacctgaggaaattaatgccaatgcttttattagaccaaagaaaaatacaaacgaattatatttatctgaaaaaaatgtgaataattatattagtaaatacaaaaattataaatacaaattttctaaagaattctatgattctaaggacgtaattaaattttttacgaaatcgtttttttttgacggagaagagatttgtgaactaaaatctgaaggttaccaaaagggattaagggaagttgataaattagatgtggaaattaataaaatgatagaaactagcagtgcttttttaaaaggtatgttgaatgaaaatggtaaatatgattatggctattttccacatttcgataaaaatattaatttttacaatattttacgtcattcttcatcaatcatatacaatataccatttgctactttctgtgcttttttaagataa

SEQ ID NO: 417316 - DNA, 354 bp, Staphylococcus aureus
atgaaaatagaagaaaaactggcattaggttatacagttgtaaatgtaacttcagcagaatatgagttagatttaccgaatgaacttcgaaatttaggatatggcgttacgcactatgctgcgtttggtagagatggtagtcgtatggtgatgcaaattttaacaccaagaaaatatgaacgtaaattgatggatacgataaaaaatttagatccgaaagcatttatcattgcgtatgaacctcgaaacatacatggtggattctggactaaaggcattcgtcgtagaaagcttaaagattatgaaccagaagaactggaaagtgtagtagaacatgaaattcaaagtaaatga

SEQ ID NO: 417317 - DNA, 615 bp, Staphylococcus aureus
atggaaagacttataagattacctggaaaatttaaatattttgaacacaatgttgcagcacactcctttaaagtaactaaaattgctcaatatctagcaacagttgaagaatatcatggacgaaagattaattggaaaagcttatatgaaaaagcattaaatcatgatttcgccgaagtgtttactggtgatataaaaacacctgttaaatatgcgagtagtgaattaaaaaaattattttcgcaagttgaagaagaaatggtagagacctttattgaagaagaaattccattacaatatagagatgtttataagcaacgactgcaagaaggtaaagatgattcattagaaggccaaatactttcagttgctgataaaattgatttgctttatgaaacatttggagaaatacaaaaacgtaatcccgaagaattatttttcgaaatttatgaaatgagtctagaaacaattattcaatttgaccatttagcatctgtacaagattttattaataatatcattccagaaatgttgactgaaaactttatacctagaacagaattaagagaaacaaccatgaacattttaaataaaagaaaagaggaaaatgaatga

SEQ ID NO: 417318 - DNA, 966 bp, Staphylococcus aureus; identical to SEQ ID NO: 417281

SEQ ID NO: 417319 - DNA, 1638 bp, Staphylococcus aureus; identical to SEQ ID NO: 417282

SEQ ID NO: 417320 - DNA, 879 bp, Staphylococcus aureus
atgtcacaagatgtaaatgaattaagtaagcaaccaacgccagataaagcagaagataacgcatttttcccatcaccatattcccttagtcaatatacagcacctaaaacagattttgatggtgttgaacacaaaggtgcctataaagatggtaaatggaaagtattgatgattgctgctgaagagagatatgtattattggaaaatggaaaaatgttctctacgggtaatcatcctgttgaaatgttattacctttacatcatttaatggaagcaggttttgacgttgatgttgcgacattatctggttatccagttaaattagaattatgggctatgccaactgaagacgaggcagttataagtacttataataaattgaaagaaaaattaaaacagccaaaaaaattagcagatgtgattaaaaatgaattaggaccggattcagattatttatctgtctttatcccaggcggacatgctgcagttgttggtatttctgaaagtgaggatgttcaacaaacattagattgggcattagacaatgaccgctttatagttacattatgtcatggaccagcagcactactttcagcagggcttaacagagaaaaatctccattagaaggatactctgtttgtgtcttccctgactcattagatgaaggtgcaaatattgaaataggttatttacctggacgcttgaaatggttagttgctgatttattaactaaaaaaggattaaaagtagttaacgacgatatgacaggaagaacgttaaaagatcgtaaattattaacaggtgacagtcctttagcttcaaatgagttaggaaaattagcagttaatgaaatgttaaatgcaatacaaaataaataa

SEQ ID NO: 417321 - DNA, 1188 bp, Staphylococcus aureus; identical to SEQ ID NO: 417283

SEQ ID NO: 417322 - DNA, 1176 bp, Staphylococcus aureus; identical to SEQ ID NO: 417284

SEQ ID NO: 417323 - DNA, 1185 bp, Staphylococcus aureus; identical to SEQ ID NO: 406714

SEQ ID NO: 417324 - DNA, 2082 bp, Staphylococcus aureus; identical to SEQ ID NO: 417286

SEQ ID NO: 417325 - DNA, 471 bp, Staphylococcus aureus; identical to SEQ ID NO: 417287

SEQ ID NO: 417326 - DNA, 414 bp, Staphylococcus aureus; identical to SEQ ID NO: 406717

SEQ ID NO: 417327 - DNA, 255 bp, Staphylococcus aureus; identical to SEQ ID NO: 406718

SEQ ID NO: 417328 - DNA, 3624 bp, Staphylococcus aureus; identical to SEQ ID NO: 417290

SEQ ID NO: 417329 - DNA, 3552 bp, Staphylococcus aureus; identical to SEQ ID NO: 417291

SEQ ID NO: 417330 - DNA, 609 bp, Staphylococcus aureus; identical to SEQ ID NO: 417292

SEQ ID NO: 417331 - DNA, 369 bp, Staphylococcus aureus; identical to SEQ ID NO: 406722

SEQ ID NO: 417332 - DNA, 501 bp, Staphylococcus aureus; identical to SEQ ID NO: 406723

SEQ ID NO: 417333 - DNA, 693 bp, Staphylococcus aureus; identical to SEQ ID NO: 417295

SEQ ID NO: 417334 - DNA, 423 bp, Staphylococcus aureus; identical to SEQ ID NO: 406725

SEQ ID NO: 417335 - DNA, 549 bp, Staphylococcus aureus; identical to SEQ ID NO: 406726

SEQ ID NO: 417336 - DNA, 183 bp, Staphylococcus aureus; identical to SEQ ID NO: 414867

SEQ ID NO: 417337 - DNA, 570 bp, Staphylococcus aureus; identical to SEQ ID NO: 417299

SEQ ID NO: 417338 - DNA, 525 bp, Staphylococcus aureus; identical to SEQ ID NO: 417300

SEQ ID NO: 417339 - DNA, 747 bp, Staphylococcus aureus; identical to SEQ ID NO: 417301

SEQ ID NO: 417340 - DNA, 405 bp, Staphylococcus aureus; identical to SEQ ID NO: 406731

SEQ ID NO: 417341 - DNA, 1401 bp, Staphylococcus aureus; identical to SEQ ID NO: 417303

SEQ ID NO: 417342 - DNA, 681 bp, Staphylococcus aureus; identical to SEQ ID NO: 417304

SEQ ID NO: 417343 - DNA, 1455 bp, Staphylococcus aureus; identical to SEQ ID NO: 417305

SEQ ID NO: 417344 - DNA, 1074 bp, Staphylococcus aureus; identical to SEQ ID NO: 417306

SEQ ID NO: 417345 - DNA, 1365 bp, Staphylococcus aureus; identical to SEQ ID NO: 417307

SEQ ID NO: 417346 - DNA, 2457 bp, Staphylococcus aureus; identical to SEQ ID NO: 417308

SEQ ID NO: 417347 - DNA, 1011 bp, Staphylococcus aureus; identical to SEQ ID NO: 417309

SEQ ID NO: 417348 - DNA, 567 bp, Staphylococcus aureus; identical to SEQ ID NO: 414855

SEQ ID NO: 417349 - DNA, 1215 bp, Staphylococcus aureus; identical to SEQ ID NO: 412629

SEQ ID NO: 417350 - DNA, 561 bp, Staphylococcus aureus; identical to SEQ ID NO: 412630

SEQ ID NO: 417351 - DNA, 171 bp, Staphylococcus aureus
atgaaaaaagtaatggggatattattagcaagtacacttatcttaggtgcttgtggacatcatcaagatagtgcaaaaaaagagagcgctagtcacaaaaagaaagaaaatgacaatgaagaattaaatgaagaacttaaagaatttaaaagcaaaaaaatatggatataa

SEQ ID NO: 417352 - DNA, 1356 bp, Staphylococcus aureus
atgacaaaacgtaaattgcgcaataactggattattgttaccacgatgattacgtttgtcacgatatttttgttttgtttaattattatttttttcttgaaagatacactgcataatagtgagcttgatgatgcagaacgaagctcaagcgatattaataatttatttcattctaagcctgttaaagatatatctgcattagacttgaatgcatctttaggtaattttcaagagataattatttatgatgagcataataataaattatttgagacatcgaatgataacacagtgagagttgaaccaggttatgaacaccgttattttgaccgcgtaataaaaaaacgctataaaggcattgaatatttaattattaaagaaccaattacaacgcaagatttcaaagggtatagcttgttaattcattcactagaaaattatgataacatcgtaaaatcattgtatatcattgcgctggcatttggagtgattgcaacaattataactgccacaatcagttatgtattttcaacacaaattactaaaccgcttgtcagtttatcaaataaaatgattgagattcgacgagatggttttcaaaataaattgcaattaaatacaaattatgaagaaatagataatttagcaaatacgtttaatgagatgatgagccaaattgaagaatcatttaatcaacaaagacaatttgttgaagatgcgtcacatgaattacgaacaccattacaaattattcaaggtcatttaaatttgattcagcgatggggaaaaaaagacccagcagtattagaagaatcgttaaatatttctattgaagaaatgaatcgtatcataaaattagtcgaagaattacttgaattgactaaaggagatgtaaatgacatttcttctgaagcgcagaccgtgcatattaatgatgaaattcgctcgcgaatacactcattaaaacaattgcatcctgattatcaatttgatacggatctgacatctaaaaatctagaaattaaaatgaaacctcatcaattcgaacaattatttttaatctttattgataatgcaatcaaatatgatgtgaagaataagaaaattaaagttaagacaaggttaaaaaataagcaaaaaataattgaaattacagatcatggaattggtattccagaggaagatcaagatttcatttttgatcgcttttatcgagtggataaatctcgttcaagaagtcaaggcggtaatggactcggattatctattgctcaaaaaatcattcaattaaacggaggatcgattaaaattaaaagtgaaattaacaaaggaacaacgtttaaaatcatattttaa

SEQ ID NO: 417353 - DNA, 291 bp, Staphylococcus aureus
gtgacaggtaatcaagctattacacaagttcatgttcaaaaggttaagcaaaacaataataaagaactttatgaaatggctaaatattccggtaaagatagcgattatctcgttaatcaaaaagtattcgacgcattttataaagcattaaaaggcaaacaggtacttgtctattctggattgtttaaagatgcacaaaaagagtatctagcaagtgagatttacgacttaaccgaagaagaaaaacgagaagtaaacaaccaaatgattaacgaaattgaagaagagtaa

SEQ ID NO: 417354 - DNA, 1074 bp, Staphylococcus aureus
gtgaatatcgttaaactaatggttattattatttacttaattattgggagcgcattaggaataattattattcctgaaattgcaaatgatcttggattacaaaactccagctttttaaaaaatcactatgtagatggcattatcggtagtatttttatgttcttaatttttggtgtatttattagacgagttactaacgctataaaaggtttagaacattttattatgcgtagaagtgctgttgaaatactattcgcaacaataggtttaataatcggattacttatttctgttatggtgtcgtttatattggaatcaattggcaactctatttttaatcatttcattcctgtcataattacgatattactatgttatttcggtttccaatttggccttaaaaaacgagatgaaatgttaatgtttttacctgagaatatagcgcgttccatgtcacaacatactaaaagtgctacaccaaaaattatcgacacaagcgcaattattgatggtcgtattttagaagtcattcgttgcggttttatcgatggcaatattttaattccacaaggtgttattaatgaattacaaattgttgcagattcaaatgacagtgttaaacgtgaaaagggtaaaagaggcttagatattttaaatgaattgtatgatttagattatcctacaaaagtcatacatccaactaaaacacatagtgatattgatacaatgctattaaaactagcaaaacaatatcacgcaaatattataacgacagactttaatttgaataaagtttgtcatgtacatggtatcaaagcattaaatgttaatgatttatcagaagcaatcaaacctaatgtacatcaaggtgatcaacttcatattttactgacaaaaatgggtaaagagcctggtcaagcagtaggatatctagatgatggtacgatggtagttgttgataatgctaaaaatcttattggcagtcatgtcaatttagaagtagtcagcttattgcaaacatcttcaggaagaattgtttttgctaaaaaaatcgaagatacagtatcattataa

SEQ ID NO: 417355 - DNA, 1269 bp, Staphylococcus aureus
atgaaaaatttaatcctaagtgttcaacatcttttagctatgtacgcaggtgccatcttagttccaatcattgttggtacaagtttgaagtttacgcctgaacaaatcgcttacttagttacagtagatatatttatgtgtggagttgccacatttttacaagccaataaagtaacaggaacaggattaccaatcgttcttggatgtacattcacggctgttgcgcccatgattttaattggtcaaacgaaaggaatagatgtactttacggttcgctatttttatcagggatattagttattatcatcgcgcctttcttttcacatcttgtaaaattcttcccaccagtagtaacgggtagtgttgttactatcattggtatcaatttaatgccagtagcaatgaattacttagctggaggtcaaggtgcaaaggactatggagatgttaagaacattttgttaggtttaatgacattaatcattattcttgttttacaaagatttacaactggatttattaagagtattgccatattaattggactcgttttaggaacgataggcgctggcttacttgggatggtcgatattaatcaagtcaatcatgccggttggttaggcatcccagtgccgtttagattctcaggatttagctttgatgtgacatcgacgttagtgttctttattgtagctatcgttagtttaattgagtcgacaggtgtctatcatgcgttaagtgaaattaccggtaagaagttagaaagaaaagattttcgtaaaggttatactgcggaaggtctagcgatagtgttaggttctatattcaattcatttccgtatacagcctattcgcaaaatgtaggactcgtttctttatccggtgctaagaaaaataatgttatatacggcatggttgtgttattacttatttgtggttgtatacctaaacttggtgcattagcgaatatcattccgctacctgtgttaggtggtgccatgatagctatgtttggcatggtaatggcatatggtgttagtatattaggacatatcgattttaaaaatcaaaataatttattaattatcgctgtatcagtaggattaggtactggtataagcgctgtaccacaagcatttaaaggtttaggtgaacaatttgcatggttgactcaaaacggaattgttttaggcgcaatctctgcaattattcttaatttcttttttaatggaataaagtataaacaaacggaagaaaatgtgaaataa

SEQ ID NO: 417356 - DNA, 201 bp, Staphylococcus aureus; identical to SEQ ID NO: 413950

SEQ ID NO: 417357 - DNA, 1173 bp, Staphylococcus aureus; identical to SEQ ID NO: 413830

SEQ ID NO: 417358 - DNA, 267 bp, Staphylococcus aureus
atgcaagttatagacagttttgaaacaaaaccgaataaagatgaagtatggcaagtacttaaaaacctacagatgtttgaatcgggttatttacgatacgattatgatgaggtgcacgaaaatggtaagttacacccattaaatcatattgatataaattatactcctcacggtacctttaagattggaattaaagatacacttgattgtaacgcttttatggatattcttgacttaaatacggatagttattttatctcaaaatga

SEQ ID NO: 417359 - DNA, 735 bp, Staphylococcus aureus; identical to SEQ ID NO: 407375

SEQ ID NO: 417360 - DNA, 735 bp, Staphylococcus aureus; identical to SEQ ID NO: 407375

SEQ ID NO: 417361 - DNA, 735 bp, Staphylococcus aureus
atgaacgagaaaaatataaaacacagtcaaaactttattacttcaaaacataatatagataaaataatgacaaatataagattaaatgaacatgataatatctttgaaatcggctcaggaaaagggcattttacccttgaattagtacagaggtgtaatttcgtaactgccattgaaatagaccataaattatgcaaaactacagaaaataaacttgttgatcacgataatttccaagttttaaacaaggatatattgcagtttaaatttcctaaaaaccaatcctataaaatatttggtaatataccttataacataagtacggatataatgcgcaaaattgtttttgatagtataggtgatgagatttatttaatcgtggaatacgggtttgctaaaagattattaaatacaaaacgctcattggcattatttttaatggcagaagttgatatttctatattaagtatggttccaagagaatattttcatcctaaacctaaagtgaatagctcacttatcagattaaatagaaaaaaatcaagaatatcacacaaagataaacagaagtataattatttcgttatgaaatgggttaacaaagaatacaagaaaatatttacaaaaaatcaatttaacaattccttaaaacatgcaggaattgacgatttaaacaatattagctttgaacaattcttatctcttttcaatagctataaattatttaataagtaa

SEQ ID NO: 417362 - DNA, 735 bp, Staphylococcus aureus
atgaacgagaaaaatataaaacacagtcaaaactttattacttcaaaacataatatagataaaataatgacaaatataagattaaatgaacatgataatatctttgaaatcggctcaggaaaagggcattttacccttgaattggtacagaggtgtaatttcgtaactgccattgaaatagaccataaattatgcaaaactacagaaaataaacttgttgatcacgataatttccaagttttaaacaaggatatattgcagtttaaatttcctaaaaaccaatcctataaaatatttggtaatataccttataacataagtacggatataatacgcaaaattgtttttgatagtatagctgatgagatttatttaatcgtggaatacgggtttgctaaaagattattaaatacaaaacgctcattggcattatttttaatggcagaagttgatatttctatattaagtatggttccaagagaatattttcatcctaaacctaaagtgaatagctcacttatcagattaaatagaaaaaaatcaagaatatcacacaaagataaacagaagtataattatttcgttatgaaatgggttaacaaagaatacaagaaaatatttacaaaaaatcaatttaacaattccttaaaacatgcaggaattgacgatttaaacaatattagctttgaacaattcttatctcttttcaatagctataaattatttaataagtaa

SEQ ID NO: 417363 - DNA, 480 bp, Staphylococcus aureus
ttgcagtttaaatttcctaaaaaccaatcctataaaatatttggtaatataccttataacataagtacggatataatacgcaaaattgtttttgatagtatagctgatgagatttatttaatcgtggaatacgggtttgctaaaagattattaaatacaaaacgctcattggcattatttttaatggcagaagttgatatttctatattaagtatggttccaagagaatattttcatcctaaacctaaagtgaatagctcacttatcagattaaatagaaaaaaatcaagaatatcacacaaagataaacagaagtataattatttcgttatgaaatgggttaacaaagaatacaagaaaatatttacaaaaaatcaatttaacaattccttaaaacatgcaggaattgacgatttaaacaatattagctttgaacaattcttatctcttttcaatagctataaattatttaataagtaa

SEQ ID NO: 417364 - DNA, 237 bp, Staphylococcus aureus
atgaacgagaaaaatataaaacacagtcaaaactttattacttcaaaacataatatagataaaataatgacaaatataagattaaatgaacatgataatatctttgaaatcggctcaggaaaagggcattttacccttgaattagtacagaggtgtaatttcgtaactgccattgaaatagaccataaattatgcaaaactacagaaaataaacttgttgatcacgataatttctaa

SEQ ID NO: 417365 - DNA, 735 bp, Staphylococcus aureus
atgaacgagaaaaatataaaacacagtcaaaactttattacttcaaaacataatatagataaaataatgacaaatataagattaaatgaacatgataatatctttgaaatcggctcaggaaaagggcattttacccttcaattagtacagaggtgtaatttcgtaactgccattgaaatagaccataaattatgcaaaactacagaaaataaacttgttgatcacgataatttccaagttttaaacaaggatatattgcagtttaaatttcctaaaaaccaatcctataaaatatttggtaatataccttataacataagtacggatataatacgcaaaattgtttttgatagtatagctgatgagatttatttaatcgtggaatacgggtttgctaaaagattattaaatacaaaacgctcattggcattatttttaatggcagaagttgatatttctatattaagtatggttccaagagaatattttcatcctaaacctaaagtgaatagctcacttatcagattaaatagaaaaaaatcaagaatatcacacaaagataaacagaagtataattatttcgttatgaaatgggttaacaaagaatacaagaaaatatttacaaaaaatcaatttaacaattccttaaaacatgcaggaattgacgatttaaacaatattagctttgaacaattcttatctcttttcaatagctataaattatttaataagtaa

SEQ ID NO: 417366 - DNA, 480 bp, Staphylococcus aureus; identical to SEQ ID NO: 417363

SEQ ID NO: 417367 - DNA, 480 bp, Staphylococcus aureus; identical to SEQ ID NO: 417363

SEQ ID NO: 417368 - DNA, 480 bp, Staphylococcus aureus; identical to SEQ ID NO: 417363

SEQ ID NO: 417369 - DNA, 480 bp, Staphylococcus aureus; identical to SEQ ID NO: 417363

SEQ ID NO: 417370 - DNA, 480 bp, Staphylococcus aureus; identical to SEQ ID NO: 417363

SEQ ID NO: 417371 - DNA, 480 bp, Staphylococcus aureus; identical to SEQ ID NO: 417363

SEQ ID NO: 417372 - DNA, 480 bp, Staphylococcus aureus; identical to SEQ ID NO: 417363

SEQ ID NO: 417373 - DNA, 480 bp, Staphylococcus aureus; identical to SEQ ID NO: 417363

SEQ ID NO: 417374 - DNA, 480 bp, Staphylococcus aureus; identical to SEQ ID NO: 417363

SEQ ID NO: 417375 - DNA, 480 bp, Staphylococcus aureus
ttgcagtttaaatttcctaaaaaccaatcctataaaatatttggtaatataccttataacataagtacggatataatacgcaaaattgtttttgatggtatagctgatgagatttatttaatcgtggaatacgggtttgctaaaagattattaaatacaaaacgctcattggcattatttttaatggcagaagttgatatttctatattaagtatggttccaagagaatattttcatcctaaacctaaagtgaatagctcacttatcagattaaatagaaaaaaatcaagaatatcacacaaagataaacagaagtataattatttcgttatgaaatgggttaacaaagaatacaagaaaatatttacaaaaaatcaatttaacaattccttaaaacatgcaggaattgacgatttaaacaatattagctttgaacaattcttatctcttttcaatagctataaattatttaataagtaa

SEQ ID NO: 417376 - DNA, 480 bp, Staphylococcus aureus
ttgcagtttaaatttcctaaaaaccaatcctataaaatatttggtaatataccttataacataagtacggatataatacgcaaaattgtttttgatagtatagctgatgagatttatttaatcgtggaatacgggtttgctaaaagattattaaatacaaaacgctcattggcattatttttaatggcagaagttgatatttctatattaagtatggttccaagagaatattttcatcctaaacctaaagtgaatagctcacttatcagattaaatagaaaaaaatcaagaatatcacacaaagataaacagaagtataattatttcgttatgaaatgggttaacaaagaatacaagaaaatatttacaaaaaatcaatttaacaattccttaaaacatgcaggaattgacgatttaaacaatattagctttgaacaattcttatctcttttcaatagctataaattagttaataagtaa

SEQ ID NO: 417377 - DNA, 480 bp, Staphylococcus aureus; identical to SEQ ID NO: 417363

SEQ ID NO: 417378 - DNA, 480 bp, Staphylococcus aureus; identical to SEQ ID NO: 417363

SEQ ID NO: 417379 - DNA, 480 bp, Staphylococcus aureus; identical to SEQ ID NO: 417363

SEQ ID NO: 417380 - DNA, 480 bp, Staphylococcus aureus
ttgcagtttaaatttcctaaaaaccaatcctataaaatatttggtaatatgccttataacataagtacggatataatacgcaaaattgtttttgatagtatagctgatgagatttatttaatcgtggaatacgggtttgctaaaagattattaaatacaaaacgctcattggcattatttttaatggcagaagttgatatttctatattaagtatggttccaagagaatattttcatcctaaacctaaagtgaatagctcacttatcagattaaatagaaaaaaatcaagaatatcacacaaagataaacagaagtataattatttcgttatgaaatgggttaacaaagaatacaagaaaatatttacaaaaaatcaatttaacaattccttaaaacatgcaggaattgacgatttaaacaatattagctttgaacaattcttatctcttttcaatagctataaattatttaataagtaa

SEQ ID NO: 417381 - DNA, 480 bp, Staphylococcus aureus; identical to SEQ ID NO: 417363

SEQ ID NO: 417382 - DNA, 480 bp, Staphylococcus aureus; identical to SEQ ID NO: 417363

SEQ ID NO: 417383 - DNA, 480 bp, Staphylococcus aureus; identical to SEQ ID NO: 417363

SEQ ID NO: 417384 - DNA, 480 bp, Staphylococcus aureus; identical to SEQ ID NO: 417363

SEQ ID NO: 417385 - DNA, 480 bp, Staphylococcus aureus
ttgcagtttaaatttcctaaaaaccaatcctataaaatatttggtaatataccttataacataagtacggatataatacgcaaaattgtttttgatagtatagctgatgagatttatttaatcgaggaatacgggtttgctaaaagattattaaatacaaaacgctcattggcattatttttaatggcagaagttgatatttctatattaagtatggttccaagagaatattttcatcctaaacctaaagtgaatagctcacttatcagattaaatagaaaaaaatcaagaatatcacacaaagataaacagaagtataattatttcgttatgaaatgggttaacaaagaatacaagaaaatatttacaaaaaatcaatttaacaattccttaaaacatgcaggaattgacgatttaaacaatattagctttgaacaattcttatctcttttcaatagctataaattatttaataagtaa

SEQ ID NO: 417386 - DNA, 480 bp, Staphylococcus aureus
ttgcagtttaaatttcctaaaaaccaatcctataaaatatttggtaatataccttatagcataagtacggatataatacgcaaaattgtttttgatagtatagctgatgagatttatttaatcgtggaatacgggtttgctaaaagattattaaatacaaaacgctcattggcattatttttaatggcagaagttgatatttctatattaagtatggttccaagagaatattttcatcctaaacctaaagtgaatagctcacttatcagattaaatagaaaaaaatcaagaatatcacacaaagataaacagaagtataattatttcgttatgaaatgggttaacaaagaatacaagaaaatatttacaaaaaatcaatttaacaattccttaaaacatgcaggaattgacgatttaaacaatattagctttgaacaattcttatctcttttcaatagctataaattatttaataagtaa

SEQ ID NO: 417387 - DNA, 348 bp, Staphylococcus aureus; identical to SEQ ID NO: 416921

SEQ ID NO: 417388 - DNA, 1446 bp, Staphylococcus aureus
atgcaagcaaaaatgactaaagaagagtttatagaatggttgaaaacatctgaggggaaacaattcaatgcggacttatggtatggatttcaatgctttgattatgccaatgctgcttggaaagttttgtttggattacttctaaaaggtttaggtgcaaaagatataccatttgcaaacaatttcgatggactagctactgtataccaaaatacaccggactttttggcacaacccggcgacatggttgtgttcggtagtaattacggtgcaggatacggacacgtagcatgggtaattgaagcaactttagattacatcattgtatatgagcagaattggctaggcggtggctggactgacggaatcgaacaacccggctggggttgggaaaaagttacaagacgacaacatgcttatgatttccctatgtggtttatccgtccgaattttaaaagtgagacagcgccacgatcagttcaatctcctacacaagcacctaaaaaagaaacagctaagccacaacctaaagcagtagaacttaaaatcatcaaagatgtggttaaaggttatgacctacctaagcgtggtagtaaccctaaaggtatagttatacacaacgacgcagggagcaaaggggcgactgctgaagcatatcgtaacggattagtaaatgcacctttatcaagattagaagcgggcattgcgcatagttacgtatcaggcaacacagtttggcaagccttagatgaatcacaagtaggttggcataccgctaatcaaataggtaataaatattattacggtattgaagtatgtcaatcaatgggcgcagataacgcgacattcttaaaaaatgaacaggcaactttccaagaatgtgctaggttattaaaaaagtggggattaccagcaaacagaaatacaatcagattgcacaatgaatttacttcaacatcatgccctcatagaagttcggttttacacactggttttgacccagtaactcgcggtctattgccagaagacaagcggttgcaacttaaagactactttatcaagcagattagggcgtacatggatggtaaaataccggttgccactgtctctaatgagtcaagcgcttcaagtaatacagttaaaccagttgcgagtgcatggaaacgtaataaatatggtacttactacatggaagaaagtgctagattcacaaacggcaatcaaccaatcacagtaagaaaagtggggccattcttatcttgtccagtgggttatcagttccaacctggtggatattgtgattatacagaagtgatgttacaagatggtcatgtttgggtaggatatacatgggaggggcaacgttattacttgcctattagaacatggaatggttctgccccacctaatcagatattaggtgacttatggggagaaatcagttag

SEQ ID NO: 417389 - DNA, 759 bp, Staphylococcus aureus
atgacgatattatcagtgcaacatgtttcaaaaacatacggtaaaaagcacacatttcaagcacttaaagatattaactttgacatacaaaaaggcgaattcgttgcgattatggggccttctggatcaggtaagacaaccttattaaatgtactaagttcaattgaccaaatttctagcggtagcgtgattgctaacggacaagagcttaataaacttaatcaaaaagcacttgccaaattccgtaaagaatcattaggtttcatcttccaagattacagtattctgccgacattaactgttaaagaaaacattatgttacctttatctgttcaaaaaatgtcgaaggcaacaatggaagaaaattataaagcgattacgacagcattaggtatttatgacctaggaaataaataccctagcgaattatctggtggtcaacaacaaagaactgcagcagcgagagcatttgttcacaaaccacaaatcatatttgcagatgagccaacaggcgcactcgactcgaaaagtgcaaatgacttattacaacgtttggaagaaatgaataaatcgtttgataccactattgtcatggttacacatgatccggttgcagcaagttttgcagaacgtgtcatcatgctaaaagatggccaaattcatacacaactttatcaggaaggacgttctaaacaggccttttatgaagacattgtacatcttcaatcagtattaggtggtgtctcaaatgacatttaa

SEQ ID NO: 417390 - DNA, 330 bp, Staphylococcus aureus
ttggaaattatctcaggcgaatataatgatgttattaatgaaaaagttcatgtgaaaaataaagataattatttacattttaaacttaaaaatatgtctcatattactgatccaatgatgagtttaaaacaaatttatcctaatactttagcgctgacgaatgaaacttttaattacaatgaagaaaataatgctatagaaataagtgaaaaagatgacatgtcaatcatcgaaatgttttataaacatataactgatgaagaattatcggatatccaatctaaaaagataaaaaatattttagaaaacgaattgagaaaggaggattaa

SEQ ID NO: 417391 - DNA, 213 bp, Staphylococcus aureus
atgcgtttatggaaaatgctaattaacgcaggtaataaagtcagtgcactgaatacagcaaatataacactaattgccgaagcaaaccccatcactgctaagaaatctataccaactagcgataaaccgcatacagcaatcacaactgtcacaccagcgaagatgactgcgctacctgctgttcccactgcaagtccgatacctttaacatag

SEQ ID NO: 417392 - DNA, 381 bp, Staphylococcus aureus
gtgtataaaattttgttggaaaaacaaacagcacattttcgtgtgtatttaattggtggtgaaatgcgccatattacagaagcatttgtaggtgaaatggcgaatgctatgttggaaaaactaagatttagcaagatgttctttagtagtaacgcagtaaataaaggtgctgtgatgacatctacattagatgaagcctatacgcaacaactggcactcagtaattcaattgaaaaatacttgttaatcgatcatacgaaagttggcaaagaagattttacatcattttgtcagttaaacgaattgactgcagtggttatggattatgaagatgaagaaaaagtagaaacgattaaaacatatattgaagtagtcgactaa

SEQ ID NO: 417393 - DNA, 138 bp, Staphylococcus aureus
atgataattgcgataattactgcaattaatgtgactgtattttcatttgaaatgttcattcattttcactccttaacaataacattatatcatgctatagctttccaaaatattgaaatatgtagatatggctattga

SEQ ID NO: 417394 - DNA, 483 bp, Staphylococcus aureus; identical to SEQ ID NO: 407626

SEQ ID NO: 417395 - DNA, 888 bp, Staphylococcus aureus
atgacctttcttaaaagtattactcaggaaatagcaatagtcatagttatttttgctttatttggcttaatgttttacctgtatcatttgccattagaagcatatttactagcacttggcgttattttattattattactcatattcataggtattaaatatttaagttttgtaaaaactataagccaacaacaacaaattgaaaacttagaaaatgcgttgtatcagcttaaaaatgaacaaattgaatataaagatgatgtagagagctactttttaacatgggtacatcaaatgaaaacacccattactgcagcacaactgttacttgaaagagatgagccgaatgttgtgaatcgtgttcgtcaagaggtaattcaaattgataactatacaagtttagcacttagttatttaaagttattaaatgaaacttctgatatttctgtcactaaaatttcgataaacaatattattcgcccaattattatgaaatattcaatacagtttattgatcaaaaaacaaaaatccattatgaaccttgtcatcacgaagtattaactgacgttagatggacctctttaatgatagaacaattaataaataatgcacttaagtatgcgagaggtaaagatatatggattgaatttgatgagcaatccaatcaattatacgtaaaagataatggaatcggtattagtgagggagacttacctaaaatattcgacaaaggttattcggggtataatggacaacgtcaaagtaattcaactgggattggcttatttattgtaaagcaaatttcaaatcacactaatcattctgtttcagtcgtatctaaacaaaatgagggtacaacatttacgattcaatttccagatgaataa

SEQ ID NO: 417396 - DNA, 1491 bp, Staphylococcus aureus
gtgacatgtaaaaacacttggacaaatcgtccaggtgctgagtacatgtggttcaacaacgtagaaacgaagccaggtgtagggtatccgaaacgttgggaagaccaagaacactacaaaggtggttgggtactaaatcgtaaagggaaacttgaattaaaatctggaagtagaatttcaaagattgcattaggtaaaattttctataatccggatatgccactaattaaagattattacgagccatggaactataattatgaacatttaacaactgcgaaatcagggaagcattcgccagttgctagagcgtattcagaaattacaggggataacattgaaattgaatggggacctaactgggaagatgacttagcaggtggtcatgttacaggtccaaaagatcctaacatccaaaaaatagaagaagatattaaattccaatttgacgaaacttttatgatgtatttaccacgtttatgtgaacattgcttgaatccaagttgcgttgcctcatgtccttcaggtgctatgtataaacgtgatgaagatggcattgtattagttgaccaagacgcatgtcgtggatggcgttactgtatgacaggttgtccatataagaaagtttacttcaattggaaaacgaacaaagctgaaaagtgtacattctgtttcccgagaatcgaggcgggtatgcctacggtatgctctgaaacttgtacaggacgtatgcgttacttaggtgttttattatatgatgcagatcgagttcatgaagcggcttcagcagtagacgagaaagatttatacgaaaaacaattagatatattcttaaatccatttgacgaagaagtcattgctcaagctgaaaaagatggtattggttacgattggattgaagctgcacaaaactctccaatttataagttagcaattgaatataaacttgcatttccgttacatcctgaatttagaacgatgccgatggtttggtattgcccaccacttagcccaattatgagctattttgaaggtaaaaatacaactcaaaatccagatgcgatttttccggctattgaagaaatgcgtttaccaattgaatacttagctaatattttcactgcaggagatacagaaccagtaaaaggagccctacaacgtatggcaatgatgagaagttatatgagatctcaagttactcaacagccatttgacacgtctcgattagagcgattaggtataacggagcgccaaactaaagacatgtatcgtttattaggactagcaaaatatgaggatcgattcgttattccaacgtcacataaggaaacatatttagatacgtatcatgctcaaggtagtacgggatataactatggtggcgaacactttggtgataactgtgaaggttgtggtgttgcagtaggttcaggaaaaactggtcaagaaatttataatgagaatttctatggagggattttccgtgattaa

SEQ ID NO: 417397 - DNA, 417 bp, Staphylococcus aureus
atgatattagtcatgtcagaagacaaagctaaagaattaaatatcgaaccattggcagtgcttgatggctttggaagtcatggtgtagatccttctattatgggtattgcaccagttggtgctgttgaaaaggctttgaaacgtagtaaaaaagaattaagtgatattgatgtatttgaattaaatgaagcatttgcagcacaatcattagctgtagatcgcgaattaaaattacctcctgaaaaggtgaatgttaaaggtggcgctattgcattaggacaccctattggtgcatctggtgctagagttttagtgacattattgcatcaactgaatgatgaagttgaaactggtttaacatcattgtgtattggtggcggtcaagctatcgctgcagttgtatcaaaatataaataa

SEQ ID NO: 417398 - DNA, 201 bp, Staphylococcus aureus
atgaatgctttaatcaactttacaaaacatgaaggtattatacctgcaattgaaagtgcacatgcactgagttatgttgaaagactagcgcctacgatgtcgaaagaagatattattgtagtaacaatttctggacgtggcgataaagatatggaaacaattagacaatatatggcagagcgaggtcttgcaaatggctaa

SEQ ID NO: 417399 - DNA, 453 bp, Staphylococcus aureus
atggaatcagtgacgaacgcgatttatccaattggtatgatgttattaatcattggcggtggcggtacatttaaacaagtattaattgacggtggtgttggaaatacaattgctaaaatgtttgaaggtacagagatgtcgccgattttgctagcgtggattgttgcagctgtgctacgtatcgcattaggttcggctacagtagctgcgatttcaactacaggtattgtcttaccattattacaatcatcagatgtaaatgttgcattagttgtacttgcgataggtgcaggtagtgtgattttgtctcatgtaaatgacgcaggattttggatgtttaaagaatattttggtttaactgtaaaagaaacattcttaacatggtcattattagaaacgattatttccgtttcgggtatcattttcattttattcatcagcttatttgtttaa

SEQ ID NO: 417400 - DNA, 1488 bp, Staphylococcus aureus
atgacagtattcggtgacccgaactatgctatgacggcattatttagttctacaggatcaaatagtttattgaaagataaacatgtagaccagttgttaaataaagcttctactcaaaatgaagcagatgttaaacaaacatataagcaaattgaagatgaagttgtatttgataaagggtatatggcgcctttatatggatcaaaaaagaatttagtatatgacaataaagtgttggataaaaatagtgttggattgccaaattcacgtgcattaatatggcaacaatttgattacaacaatagtagagaacgagatacgcggccacttgtgatgacacaacaagatggtgaaattcctacattggatccaatacgttcaattgcgccgtcagtatattcaattaatatgaatatgtacacaaggttattattattagatgaaaatgaccacttaacaacgaaaggttcgttaagtcgtgattatgctgtgaataaggacaataaagcattttatttcttgttaagagatgatgattattttgcgaaagtggtcaatggacaagcacgtaatactggagagcgtgtatcggctgaagatgttaagttttctttagatagagcacgtgataaaaagtctgtgcctaacaataatacttacaatatgcacaaacatataaatgacatcaagatattaaaagatgaggacatcgatcagttgcgtaaagagaaagacaaggacgataaatccatctatgataagttgattaaagcttataacgtcaaatcgttaacgacagatggtcaaaaagtaaataataaagacggtatttatcaaattgttaaaattacgacagatcaatcgatgcctcgagaggtaaattacttaacacactcttcggcaggcattttatctaaaaaatttgttaatcaagtaaatcaagaatatccaaaaggatatggggatagcagtacaattcctgcaaattcagatgggaaaaatgcgctgtatgcaagtggcgcatacattatgacacagaaaaatgcatatcaagcaacgtttcaacgtaatccaggattcaacgaaacagaaaaaggtagttatggaccagctaaaattaaaaatattacattgaagtttaatggtgacccgaataatgcattgtcagaacttagaaatcattcaattgatatgttggcagatgtgaatcaaaaacattttgatttaattaagtcggataaaaatttaagcattattcgcaaaaatggacgcaagtcagtctttttaatgctaaatattaaaaaaggtatatttaagacgcatccaaacttgagacaagcagtagttaatgcgatagatcaggatcaatttattaagttttatcgtggcgataaatttaaaattgcatcaccgattacaccacttgtcgatactggtaacgagcaacgtcaagatttagaaaaagtagaaaaagccattaatcaataa

SEQ ID NO: 417401 - DNA, 1134 bp, Staphylococcus aureus
atggttaatgcattaacaccaaaacatttagctgaaaagcgtgcaggattccatgagttgttctttgatttaattttcgtctatgccattcaaaaaattgcacatgtgattttaacaacacaaaacggttctatttcagctgatttatttttcaaatacatcgtcatgagtttgttcttatggttaatgtggtctcatcaaacattttttacaaatcgatttggtcaagttacattcaaagacgtctcgtttatgatgtttaatatgtttatcatggtctttctatctaatagtttatatccagactttgaaaaaacattcttcccattcttcttatgcgtggcaattatgtatttaagtatcggattacagtatttattacatatacgtacaggattagattatggcgataagcgtacatgtcaagcttttgcgaccgtagcctttgtgatttcatttttatcatttctatcattagtactaccacaaagtatccattacatccctggatttttaggcgtattcattgcagcgacaggacttattccatttcaaaaatatctcgtattatcacctgttaatatgatgcatttagtagaacgtttttcgttactaacaattattatctttggcgaggtactggttggtttagcttcgtcatcatttagcattgatcattttagttacatttatatattccaatttatgattttaattagtcttttcggtgtatattggatcattactgaaaattacattaatcataaattgtcatctatcggtttccgtttatcgtatacgcatttattaatcaatatcgctttaggcgttattaatgcagcaattgtttttagtaatagtaataaactaaatgacttatttgaaattaatatgatgtacatcagtgttttaatattctatattggattatggttaatcacgccttatttccataacgaattgacaaatgcgaagtatatttcatattcactagggatactcgttatgtcttatattgtcagccttttatttaaaggtcacgaccatgtaatgattatctcagtatcagttgcaaccttctgcatcatgctgatttattttaaaaatcaacgtctacgtaataaacatgaataa

SEQ ID NO: 417402 - DNA, 765 bp, Staphylococcus aureus; identical to SEQ ID NO: 407632

SEQ ID NO: 417403 - DNA, 1260 bp, Staphylococcus aureus
atggtagtagaaaaaagaaacccaatcccagttaaagaagcaattcaacgtatcgttaatcagcagagttcaatgccggcaattacggtagcacttgaaaaaagtctaaatcatatcttagcagaagatattgtagctacttatgatataccaaggtttgataaatcaccttatgatggttttgcaattcgcagtgttgattcacaaggggcaagtggtcagaatcgcattgagtttaaagtgattgatcatattggtgcaggttcagtttctgataaattagttggggatcacgaagcggtgcgtattatgactggagcacaaatacctaatggcgcagatgctgttgttatgtttgaacaaacgattgaactagaagatacatttacaattcgtaagccattttcaaaaaatgaaaatatatctttaaaaggtgaagaaacaacgacaggagatgttgttctaaaaaaaggacaagtaattaatccaggggctattgcggtccttgcaacatatggctatgcagaggttaaagttattaagcaaccgagcgtcgctgttattgcaacaggaagcgaattattagatgttaatgatgtattagaagatggaaaaattcgtaactctaatggtccaatgattcgtgccttagcagaaaaattaggtcttgaagttggtatttacaaaacacaacaagatgatttagatagtggtatacaagtcgttaaagaagctatggaaaaacacgatatcgttattacaacgggtggagtttctgtaggagactttgattatttacctgagatttataagtccgtaaaggcggaagtgttatttaataaagtagcaatgcgtcctggtagcgtaacaacggttgcatttgcagatggaaagtatttgtttggattatctggaaatccatcagcttgttttacaggatttgaactatttgtgaaaccagctgttaaacatatgtgtggcgcactagaagtcttcccgcaaataattaaagcaacattaatggaagattttaccaaggcaaacccattcacacgatttatacgtgctaaagcaacgttaacaagtgctggagctactgtagtaccttcaggattcaataaatcaggtgcggttgtagcgattgcacatgctaactgtatggtcatgttaccaggagggtcacgtggttttaaagcgggtcatacagtagatattatattgactgaatctgacgctgctgaagaggaacttcttttatga

SEQ ID NO: 417404 - DNA, 1323 bp, Staphylococcus aureus
ttgccagaaaatcagatagatgatacctataaacgattacgtctccaagtatttcttggtattttcatcggttacgctgggtactatttattacgtaaaaacttttcattagcgatgccggcattgcaagagcaaggttttacaaaagcggaactaggttttgcactttctgctgtttccatcgcatatggatttagtaagttctttatgggtactgtaagtgatcggagcaatgctcggatattcttagttcttggattagtactcactgctatcgtcaatttgttaatgggatttgtaccgttctttacatcaggtatcggtattatgtttgtcctattattcttaaatggatggtttcaaggtatgggctggccaccttcaggccgtgttctcgttcactggtttagtgtaagtgaacgcggaagtaagactgccctttggaacgttgcgcataatgttggtggaggtattatggctcctattgctgcttggggtattacaacaacagcatttatcaactttggttatttaaaaggtttcgaaggtgtattcatttaccctgcactcttagcacttatcattgccgcaatttcatacgtattgattagagacacacctcaatctcaaggtttacctccaatcgaaatttataaaaatgactttgctacaagcgataagaaaacattagaaacagaattaactacaaaagaaattttatttaaatatgtactgaacaataaatgggtatgggcaattgcctttgcaaatatatttgtttatttcgtgcgttatggtgtacttgattgggcgccggtctacttaagtgaagaaaaacatttcgacttaaaagcatcaggttgggcatacttcttatacgaatgggctggaattcctggtacattattatgtggttacatttctgataaattattcaaaggtcgccgtggacctgcaggtttcttctttatgttaggtgtcacagtatttgtattaatttattggttaaatcctccaggcaatgcttggttagacaatgtctcattaattgccattggtttcttaatatatggaccagttatgttaattggtttacaagcattagattatgttcctaaaaaagcagctggcacagcagctggattaacaggattatttggttatctgtttggtgctgtaatggccaacatcgtcttaggtgctgtagttgataaattcggatgggatgtcggttttattttattaacagcaatcagtgtgtttgcaatgttgagctttatcctcacttggaataaagtaggacaagaaaccgttcatcattaa

SEQ ID NO: 417405 - DNA, 282 bp, Staphylococcus aureus; identical to SEQ ID NO: 407821

SEQ ID NO: 417406 - DNA, 546 bp, Staphylococcus aureus
atgacgaattatccatttgaaagtattgaaacatttaacgatgttgctgttaagaatgactatcaaattgtgaaagctcaaggtggagatgtagacgctttacttgcgaaatataaagatgagaaccgagataactctcgcacaccaatgcaatgggatgatacgttaaatggaggatttacaaatggtgaaccttggttcccagtgaatccgaattataaatctattaatgttgcacaacaattagaagatgagcattcagtattacaattttataaagatttaattcaattaagaaagtctaatgatgtatacgtatatggtcaatttgatttagtagatgctgaaaattcacaagtttttgcatacacgagaacattaaatgaaaagcaagttcttattgtaggtaatcttactaaccacgaagcagaattaactgtaccatttgatgtaagtcatggagaagtgaagctatttaattatgatgccaaagttaatttaaaacagttacgtccatatgaagcatgtgttatcgaattaaattaa

SEQ ID NO: 417407 - DNA, 321 bp, Staphylococcus aureus; identical to SEQ ID NO: 411474

SEQ ID NO: 417408 - DNA, 936 bp, Staphylococcus aureus
atgaaaattgcaattgcggggtctggtgcactaggcagtggctttggtgctaaattatttcaagcaggttatgatgtaacgcttattgatggttatagttctcatgttgaagcggtcaaagagcatgggttaaatataacgattaatggcgaaaaattcgtattagatatcccaatgtgtcatttaaatgaacaaccacaagatagtatttatgatattgtttttctatttccaaaatctatgcaattaaaatctgtgatggatgctatgaaatcaaatattaatgacgacacaatcgtcgtgtgtacaatgaatggtttgaaacatgaagaaatcatctcgcaatatgttgctgaatcacaaattgttagaggtgtcacaacttggactgcaggtctggaaagtccagggcatagtcacttgcttggtagcggtccggttgaaattggtgcgttagttgacgaaggtaaagaaaacgttaagaaagtggctgaaattcttaacaaagcaggattaaatggcgttattagtcaagatttacatcaatcaatttggaagaagatttgcgttaatggtacagccaatgccttaagtacagtgttagaatgcaatatggcagcacttaatgaaagcagttatgcgaagtgtttaatttataaattgacacaagaaatagtgcatgtcgcaactatagatgacgttcatttaaatgttgatgaagtatttgaatatttaatcggcttaaatgacaaagtaggtgcacactatccgtctatgtatcaagacctaatcgtcaacaatagaaagactgaaattgattatattaatggtgcagttgcaactctaggaaagaaacgtcatatagaagcacctgtgaatcgatttattacggatttaatacatgctaaagaaagtcagcgacaagcccaagattaa

SEQ ID NO: 417409 - DNA, 465 bp, Staphylococcus aureus
ttgaaaaaattaagttcattaattgtagtagtattaatatgtatcattgcattatcagcttgtagtaaggaacaaacaaagacctatgaaggtgacgtaaatggtaaacacgtacttacgtcaatcacttataaagacgataaagttttaaaacagtctacaataaacacaattaagtacgatgatcttggcataagcaaagatgaagctaaaaagttattcgcaaaaactgaagatatcttcaaagaccttaaaggtgctaaatataaagtcgactataaagacaaaaaagcaattgaacatttagacattaattataaagaagttgatatgaaagaattaaacaaacgttttggtgtatcatctaaagatagtaaagataataaatatcttagctttgaaaaagttgaaaaacagttaaagcatagcggtttaaaagaaaaagacaaaatggatgacaaatag

SEQ ID NO: 417410 - DNA, 750 bp, Staphylococcus aureus
gtgattaaagttacagatgttgaaaaatcatatcaaagtgcacatgtatttaagcgccgtcgaacaccaatcgtcaaaggtgtatcattcgaatgtccaataggggcaacgatagcaatcatcggagaaagtggtagtggtaaatcgactttaagccgtatgatattaggtattgaaaaaccagacaaaggtcgcgtgacattaaatgatcaacctatgtataagaagaaagtgagacgtcatcaaattggtgcagtgtttcaagattatacatcatcattacatccatttcagacagttagagaaatcttatttgaagtgatgtgtcaatgtgatggtcagcctaaagatgtaatggaagttcaagctatcacattgttagaagaagtcgggctatcgaaagcatatatggataaatatcctaatatgttatcaggtggtgaggcgcaacgtgttgcgattgcacgtgctatttgtattaatcctaaatatattttgtttgatgaagctattagttcgctcgacatgtctattcaaacacaaatactagatttattgattcatttacgagaaacgcgccagctgagctatatttttattacacatgatattcaagctgcaacgtatttatgtgatcagttaattatttttaaaaatggaaaaatcgaagagcgaatttcaacaagtgcattgcataaaagtgacaatgcttatacaagagaattaatagaaaaacaactatcattctaa

SEQ ID NO: 417411 - DNA, 423 bp, Staphylococcus aureus
atgccctataactttacgacgcagaataaaggtttaatgtctgtgatgaatcaaggtgagacatttattcatcagtcacccgttaatgatgaactaagtgctttgattaagttacttatttcgaaaattaatggctgtgactattgtgttgatcttcataagaaagaactgaaagatttaggtgtaacgcaaatgaaaatcgatgaagtgatgagttataatcatctagatttattttcagaggaagaaagagtgaccttagaatttgctgaaaaattaaatgcgattaaagattttaaaaaattcgatattatcgaaaggctaaaaatattttatgatgaagagcaaattacagatttagtattcgtggtaaatcaaatcaatagttggaatcgattgaacattattagtgaaaatttatag

SEQ ID NO: 417412 - DNA, 279 bp, Staphylococcus aureus
atgaaaggctctaaacaaatacttttgattatgggcattatctctttaattgttttatttattttcactttatttattatggcgcaactagccaaacattatgaacataaatccgatagttccgatgcgcatactttcaactcatcaaccattgtaaaacaccatactatgtcgaaatttatgtcacaaaatataaatactccaattcaaaatattacttctagtcatgatattcatcccgtctatttcatgacaaataatcaaaactttcttttttaa

SEQ ID NO: 417413 - DNA, 309 bp, Staphylococcus aureus
atgacagtcaacatcgtatttagtatcgtattctgcataagtgtggttatatttggcatttatgtcgcaataactaaaaatttcacattagtttctggcttataccaaacgacatttgcagataaacacaaagcaaaaattgcatatatatttgggctatgcataagtttgagtgcagtatttttaatgcttacattgctgagctttgaatatgattatattgtattggcattcgtatttttagcgatagcattattacttatctcattattctatgtttgcttttataaaatcacaaaatatccataa

SEQ ID NO: 417414 - DNA, 3105 bp, Staphylococcus aureus
gtgaaaaacagtcttaggtacggcattaggaaacataaattgggcgcagcatcagtatttttaggaacaatgatcgttgttggaatggggcaagataaagaagcagcggcatcagaacaaaatacaacagtagaagaaaatgggaattcagctactgaaaataaatcaaaacaaacaactacaaacaatgttaataatatagatgaaacacaaacgtatagtgcgacatcaacagaacaaccatcaaatgcaacacaagtaacagcagaagcagcaccacaagcggtagaggcaccacaaacatcacaagcaccacaaaaagtacaatcaacaaatgtagaaacagttaaagaagaggtagttaaggaagaagtgcaacctcaagttaaggaaacagcacgatctcaagaaaatagcggagatcaaagacaagtagatttaacacctaaaaaggttacacaaaatcaagggacagaaccccaagtagaagtggcacagccaagaactgtatcagaaagtaaaccacgtgtgacaagatcaacagacgtagcggaagctaaggacgcttcagaaattaaaggtacagatgtgacaagtaaagttacagtagaaagtggttcaattgaggcacctcaaggaaataaagtagagccacatgctggtcaacgtgtcgtattgaagtacaaattgaaattcgaaaaaggtttacataaagatgattattttgatttcactttgtctaataatgtcaacacacatggtgtatcaacagcgagaaaagtgcctgatattaaaaacggtacggtggtaatggctacaggtcaacttcttggaaatgggaaaattaggtatacatttacagattatattgattataaagtaaatgtgactgctgatttagaaatcaatttatttattgaccctaaaactgtacaaagcaatggacaacaaataataacttcaacgttgaatgataaggaaacaagaaccacattgccaattcaatataatccaggtgtaagtaatagttatgctaatgtaaatggatctattgaaactttcgataaagggaacaataaattcactcatgttgcttacataaaaccacaaaatgggcataaatcagatagcgtttcaattactggtacactaactcaaggtagcaaagcaaatggaaatgctcctactgtaaaagtatatgaagtcttaaaggatgctaaagaattgccagaaagtgtatatgcaaacatatcagactctacaatgtttaaagatgtaactcaggaaatgaaagataaattaaaagtagaaaataatggaagttataaattagacattgagaaattagaaaaaagttatgttatacactatgatggtgaatacttaagtggttcagatcaagtgaattttagaacgcatatgtttggatatccagaacagcagtataaatactactatactcatttgggataccaacttacatgggataatggattagttttatatagtaacaaagcaaaaggtgatggaacgaatggaacaataacagaatcgaataatatgacatttgatgaagaatatggaaatggagttattacaggtcaatacgataagaatttagtaactactgttgaagaggaatatgattcatcaactcttgacattgattaccacacagctatagatggtgaaggtggatatgttgatggatacattgaaacaatagaagaaacggattcatcagctattgatatcgattaccatactgctgtagatagcgaagcgggtcacgttggaggatacactgaatcatctgaagaatcgaatccgattgattttgaagaatctactcacgaaaattctaaacatcatgctgatgttgttgaatatgaagaggatacaaatccaggtggaggtcaagtaacaactgaatctaacttattagaatttgatgaagagtctacaaaaggtattgtaactggagctattagcgatcatacaacagttgaagatacgaaagaatatacaactgaaagtaatcttatcgaactagtggatgaattacctgaagaacatggtcaagctcaaggtccaatcgaagaaattactgaaaataaccagcatatttctcattctggtttaggtactgaaaacggtcatggtaactatggcatcgttgaagaaattgaagaaaacagtcatgttgatattaagagtgaattaggttacgaaggtggtcaaaatattggcaatcaatcattcgaggaagatacagaagaagataaacctaagtatgaacaaggtggcaatatcgtagatatcgacttcgatagcgtacctcaaattcaaggtcaaaataaaggtgatcagtcattcgaggaagatacagaagaggacaagcctaagtatgaacaaggtggcaatatcgtagatatcgacttcgatagtgtacctcaaattcaaggtcaaaataaaggtaaccagtcattcgaagaagacacagaaaaagacaaacctaagtatgaacatggcggtaacatcattgatatagacttcgacagtgtgccacatatacacggattcaataagcacactgaaattattgaagaagatacaacgcctccaatcgtaccaccaacaccaccgacaccagaagtgccgagtgagccagaaacaccaacaccgccaacaccagaggtaccaagtgaaccagaaacaccaacaccaacaccgccgacaccagaagtaccgagtgagccagaaacaccaacgccaccgacaccggaagtaccaagtgagccggaaacaccaacaccaccaatgccagaaataccagctgaacctggtaaaccagtaccacctgcaaatgaagaacctaaaaagccttctaaaccagtggaacaaggtaaggtagtaacacctgtcattgaaatcaatgaaaaggttaaagcagtgaagccagctaaaacgtcacaatctaagaaaacggaattacctgaaacaggtggagaagaaacaacaaacaacggcgtacttttcggcggactattaagcattataggattagtattattacgcagaaataaaaagaatcacaaagcataa

SEQ ID NO: 417415 - DNA, 417 bp, Staphylococcus aureus
atgccctgtacattgaaaggttaccccgaaaaatggaaggaatttgaaacattaaaacgagaaaaagcgatagaaattgcgaatgcaatgttgagagaaggatatcttgaaaaagatgttattcctatcgcaacgaaaaaagcaaaagattggtatcgaacgctatcgaaagaagaaatcaaagcattagaagaagaaaacatcgtacaattccatacagcaacaatggaaaaaacagaggtggatagtgaagatgcaacaactgataatgaaaaacgtattcaagaagtatcaaatcaaaataagtcaaaatttaatattgaaccaaatgaaagtgaaagtagtggcgttcgccaaagagagtcaattattgatggtccacatgcaaaagctgtgggatcatttaaagacttataa

SEQ ID NO: 417416 - DNA, 1953 bp, Staphylococcus aureus
atgtatactaataaaaaattatggaaatattttcgcaatggaaggagacgtcgtaatgacatctttttgacatcacttattaaaatcaatcgacaaaacttagatttttataaagggataagacaaggtttattaatgataatccctgctttaattggatatttatgtggtaattttcaatttggattacttgttgcaaccggaacattggcgcatatttatgtgtttaatgggtctgctaaatcaaagattagaactgtaattatatgtaatttagccttcgccatttgtatgattttaggtacactaacggctacaacgccattagtttttggtttgaccttgctcattgtcacggttattcccttttacatttttacagctttgaaaattgcaggaccatcatctacatttttcatcgtaacatttagtcttcctattaatttgccgatagcaccagaagatgcattgtatagaggctttgccattattttaggtggaatcttagccactttaatggtgttactaacaatcttcctatctaaaacgaaagcagaagaacaagcgattcgaaatgatttcacgctaatctcgaagttattacatcattataatgataaagataaatttttaaaagttgctacttcagcggtaaatgtatttaaagcatcagataaattattgattacttcaaattcaagtagtggaaaattgagctcacgctttcaaaagttactattgttgcatacatctgcacaaggtatttactctgaattgttggaattaaatgctaaaaatataagaccattaccggttgaattgatagaaatgatggattacattactcaacaactaagtaatcctaaccaacagatggattattggcgtaaagaagttaccgtgacgaatgattttgaaaatttatttaatcacattttgaaaattgacgaaatagcacatgcaaattctgaacgtattgaatatgaagcagatattcataagccgctttatagtaaacgaatttatcaaaatttaacattagactctattgtctttcgtaatacattgcgatatgccgtcattatgatggtggcaatatttattgcactgatgttcgatttcgacaaagcgtattggataccgttatctacacatacggtattgttaggtacttcgacagttcatgcgattgaaagaggtatggcacgaggtctaggaacaatgtttggtgtattagtgctttcaatcatattattcatttcaataccaacaccagttgcagttgtacttatgggtgttgccgctttatttactgaagcattagttgctgcgaactacgcaatagctgtagtctttattactatccaagttatattaatgaatggtttggcatcaagaaatttatctattgatatagcctttccacgaatgacagatgtaacgataggaatcatcatagctattataggcttatttgttcttggtcaacgtactgcatcagtactgcttccaactgtaatggctgaagtaatccgtaaagaagcaacaatttttcattatttgttctctgaaaataaatataaagatgaggcttatttgaaaaatgaggcaataaacttatcggtgaaattaaataatatgacgcaagtttatcatgctgcatgtggtgaattattcagtaataaaactatagttcgaaattattatccgagtatatttgcaattgaagaaataagttttatgttaaatagagcaatgacaaacgagtcgcgttatacgatagatgaacaattaatgggtacgtatttagttgtgttcgaaaatattgcgaagcattttgaattacaagagaacttaacgattaaaactttatcagatttgccacaatacaattatattcaaacagcattaatgcatattcaagaaagtagtatagaagtaaatgaaaagtag

SEQ ID NO: 417417 - DNA, 204 bp, Staphylococcus aureus
atgaacaaaaatttagagaaatatattaaaagtttacctattttaggaataattacaagtgtatttttaattatcctatactttttcatatggcatgcggatggtaatttttatgtgattattttatattgcttaataccagtttttgttaatacatctttgtatctacttcacacgttcatgaaccattttttaaagaaataa

SEQ ID NO: 417418 - DNA, 537 bp, Staphylococcus aureus
gtgctaaactcaatatgtatttcctaccaaagaaaacataaggagtttggacatcttgaaggagatactattgttggtcgtcgtcatggtagtgcaatcattactttggtagaaagagtatccaagatgattatcaccttacgacccttaggtcgtaaggcaactgatatagaaaacgctctacactcaatgttttcatctttaccttctcatatatttaaatcaattacttttgattgtggtaaggagttctcaaactggaaaacattatgtaactgtcacgatatatctatattttttgctaatccaggcacgccatcacagcgaggtttaaatgaacattctaacggaatacttagacgcagtggattagataaagaactagatttcaatttagtaacagactatcatatcatcagtgttgctcaaaaaatcaatcatcgtcctagaaaatctttaggttatagaacaccattggaagtatttatgagtttcatcgaagatgataaacttgtccagcttaatttgacaatctaa

SEQ ID NO: 417419 - DNA, 639 bp, Staphylococcus aureus
atgtttaaagagaacatttttactgtacatgatttacctatgaaatgtaaaagaaagccaaatgaccattctgaaaaaagaggtagacagacttttaaaagacatatttctgaaagaatagaagaatttcctttattcaataaggagtttggacatcttgaaggagatactattgttggtcgtcgtcatggtagtgcaatcattactttggtagaaagagtatccaagatgattatcaccttacgacccttaggtcgtaaggcaactgatatagaaaacactctacactcaatgttttcagctttatcttctcatatatttaaatcaattacttttgattgtggtaaggagttctcaaactggaaaacattatgtaactgtcacgatatatctatattttttgctgatccaggcacgccatcacagcgaggtttaaatgaacattctaacggaataattagacgcagtggattagataaagaactagatttcaatttagtaacggatgatcatatcatcagtgttgctcaaaaaatcaatcatcatcctagaaaatctttaggttatagaacaccattggaagtatttatgagtttcatcgaagatgataaacttgtccagcttaatttgacaatctaa

SEQ ID NO: 417420 - DNA, 645 bp, Staphylococcus aureus
atgaatttgaaagaaattgtaggaaatataaaaagaccatatttaactcccatggtaattttcagcattatatttactttgttttttagttcatttatgtattttgctggaaatattcaaggtaaattacctatttatttagatgtgtttcttatttttggagttgttatttcgattcttatgtatattcaagaaaaaagtgaaacggtgaaagtaagtaaacgaaatgtattaatatatttaactttgaatgtattaacaggatatacattagtattacttatagcttcagtttatgtatttggtgcaacagttaatggttttgatgtatttaattactggttaggtattatattaatgctatttgtatcgtggtttgctctatttttgttttataaaaatgaatttgatagtgaaaatccaaataaagcagttaatgtcatagcaattattataaagttatctgcttttggaggacttttctatatcagaacagtcgttcctaatactgcagatgaagagaaatttataactctaagtatcttaattaatatagctgtcgatgcattacttgttagatcatattttaactatgcattatataagagtgtaaataaagatatcgaaaacggggtggatgattaa

SEQ ID NO: 417421 - DNA, 306 bp, Staphylococcus aureus
atgtttgggctttttaacaaacgcttttatgagcaaaattggcgtatacaaagacttgaagataatgacaaaacaatgtttgagaagttggacaaaattgaacatggtcaaaaagctcaagaaaaagtaagtgataaactagatagaacgctcgacgagatgaagcgagaaagagaattagacaaagaaatgaaagaaaagaacgctaaaaatatcaaagatttaaaaacgtgggttatggggcttataggcactattttaggttcgttaatcatcgcgattttaagaactgttttcggtatttaa

SEQ ID NO: 417422 - DNA, 186 bp, Staphylococcus aureus
atgcaacaacaagcatatataaatgcaacgattgatataaggatacctacagaagttgaatatcagcattttgatgatgtggataaagaaaaagaagcgctggcagattacttatataacaatcctgacgaaatactagagtatgacaatttaaaaattagaaacgtaaatgtagaggtggaataa

SEQ ID NO: 417423 - DNA, 1479 bp, Staphylococcus aureus
atgaatcaagcagtcatagttgcagctaaacgaactgcatttgggaaatatggtggcactttaaaacatttagagccagaacaattgcttaaacctttattccaacattttaaagagaagtatccagaggtaatatctaaaatagatgatgtagttttaggtaatgttgttgggaatggtggcaatattgcaagaaaagcattgcttgaagcggggcttaaagattcaatacctggcgtcacaatcgatcggcaatgtgggtctggacttgaaagtgttcaatatgcatgtcgcatgatccaagccggagctggcaaggtatatattgcaggtggtgttgaaagtacaagtcgagcaccttggaaaatcaaacgaccgcattctgtgtacgaaacagcattacctgagttttatgagcgtgcatcatttgcacctgaaatgagcgacccatcaatgattcaaggtgctgaaaatgtggccaagatgtatgatgtttcaagagaattacaagatgaatttgcttatcgaagtcatcaattgacagcggaaaatgtaaagaatggaaatatttctcaggaaatattacctataaccgttaaaggagaaatattcaacactgatgaaagtctaaaatcacatattccgaaagataactttggccgatttaagcccgtgatcaaaggtgggaccgttaccgctgcgaatagttgtatgaaaaatgatggtgcagttttattgcttattatggaaaaagatatggcatacgaattaggtttcgagcatggtttattatttaaagatggtgttacggtaggtgttgattctaattttcctggcattggtccagtaccagccatttccaacttactaaaaagaaatcaattaacgatagaaaatattgaagtcattgaaattaacgaagcgttcagtgcacaggtagttgcctgccaacaagctttaaatatttcaaatacgcaattaaatatatggggtggtgcattagcatcaggtcatccatacggtgcaagcggtgcccaattagtgactcgattattttatatgtttgacaaagagactatgattgcatctatggggatagggggaggtctaggaatgcagcattatttactcgattctaaccagcgattaaatgtgtcattttctaaggatagtgtggctgcatattatcagtgttttaaccaaccttatagaaaagaagtaccaccattaatgtgtgcgtcattatggccaaaatttgatttatttaaaaaatatgcaaatagcgaactgattttaacaaaatcagcaattaatcaaactcaaaagatagaagtagacacaatatatgtagggcatttagaagatattgaatgccgacagactcgcaatatcacacgttatacaatggctttaacattaactaaaaatgatcaacatgtcataacggttacacaaacttttattaaggcgatgaagtag

SEQ ID NO: 417424 - DNA, 363 bp, Staphylococcus aureus
ttggataatgtagaagattcaaagctcaaaaataaaatagaaaattttaaattctttagtcagtacgctgattttagagattttaaaaactataaaaatggaaatatatcaagtgcagataatgtaccaagtttcgatgcagaatatcaaataagtaatacggataaaaatgtaaaaaaacttagagaggtttatccaatcacaacaaaaaaatctccagtattaaaattacatatagatggtgacataaaaggaagttcaattggatataaaaatatagaatttaatttttcaaaagtaaaagacgaagaaacagctgttagagattttgtgaattttggaccatctgatggagttagctaa

SEQ ID NO: 417425 - DNA, 357 bp, Staphylococcus aureus
atgaagtataaaacagagagacgtgaaacgatgggatatttaaaagggtttgcattgtacataagtatcttaattttaatagtttttatagcaggttgtggcaaaagtgataaaacaaaagaagattcaaaagaagcacaaattaaaaagagctttgagaaaactttagatatgtatccaatcaaaaatctcgaggatttatacgacaaagaaggctatagagatggtgaatttaaaaagggtgataagggtacatggactttactcacaagttttgctaaaagtaacaaaccaggtgagatagatgatgaaggcatggttttatttttaaatggcagtgtgtcaatagaaaaatga

SEQ ID NO: 417426 - DNA, 153 bp, Staphylococcus aureus
gtgaagccagctaaaacgtcacaatctaagaaaacggaattacctgaaacaggtggagaagaaacaacaaacaacggcgtacttttcggcggactattaagcattataggattagtattattacgcagaaataaaaagaatcacaaagcataa

SEQ ID NO: 417427 - DNA, 234 bp, Staphylococcus aureus
atgttcaaagtgaattattcgattttaagttattatccagaatataatatcgcagtaagttggcaacgtttaagagaaggaaaaacaataaaaaaacaagatttaatactgctgcgtcatgaggcgcttgaacattatttgatgaataagtataatttcaactatgattatgcacataaaattgtatcaaaaaaatacgattattcaatttttataaaaaagaaggtggattaa

SEQ ID NO: 417428 - DNA, 1704 bp, Staphylococcus aureus
atggtatatcttgaatgggcaaaggcagatagaaatattcaatatcgtgtaattaacgccattattaaagaacgtatttaccccgagcaaacatttatttcgcaaaaaggatctttaattgaaattcagtatcatatgcatgtgttgactattgaagttgttagaaaaagtgcattagaacgctatgagtttacaggtgatattgcttatttaaataaaggtgaaacgtcattaattataactttagaaggtttgttagatgtgttgaatcatgactttgatatccctatttcagagcgactacgcgaagagttaatacacagtcgagatagtttagttgaaacatataagcaaatgtctcacagacaaacattaataagtcaaagttttaaattttcaagattaccacaagatattaactttttttcatggttacaacatgtaaaagatagtgataagacagatgatttaacttattctgagagcttggtaccagaggggcatccaacacaccctttaaccaaaacgaaattgcccttaactatggaagaagtacgagcatatgcacctgagtttgaaaaagaaatccctttgcaaattatgatgattgaaaaagatcatgttgtgtgcacagctatggatggtaatgatcaatttattattgatgaaataattcccgaatactacaatcagattcgtgtgtttttaaagagtttaggtttgaaaagtgaagactatagagcgattttagtacatccttggcaatatgatcatacgatagggaaatattttgaagcatggattgctaaaaaaatattaattccaacgccgtttacaatactttcaaaagcaactttatcatttaggacgatgtctttaattgataaaccataccatgttaagttgcccgtcgatgcacaagcaacaagtgccgttagaacagtctcaactgtgactactgtagatggaccaaagttaagttatgctttacaaaacatgttgaatcaatatccaggatttaaagttgctatggaaccgttcggtgaatatgcaaatgttgataaagatagggcacgtcagcttgcttgtattataagacaaaagcctgaaattgatggaaaaggtgcaacagtagttagtgcaagtctagttaataaaaatccaatagatcaaaaagttatcgtggatagttacttagagtggttaaatcaaggaattactaaagaaagtattacgacatttattgaacaatacgctcaagcattaatcccgcctttaattgcttttattcaaaattatggaattgcattagaagcacacatgcaaaatacagtagtgaacttggggccacattttgacattcaatttttagtgagagatttaggtggttctagaattgatttagaaacattacaacatcgtgtatcagatattaaaattacaaatgatagtttaatagctgattctatagatgcagtgattgcaaaattccaacatgctgttattcaaaatcaaatggcagaattaatccatcattttaatcagtatgattgtgttgaagaaaccgaattatttaacatagtacagcaagtagtagcgcatgccattaacccaacactaccacatgcaaatgagttaaaagatatttttgtttggaccaacaattactgtcaaagcgttgttaaatatgagaatggaaaataa

SEQ ID NO: 417429 - DNA, 312 bp, Staphylococcus aureus
atgaagaattataattgggaatactttaaagcccaaattaatcaaaagctttctgaaccaaaaacgaaaaaaatctatagtcaaagaaaaattgatgtagagcctgtttttggatttatgaaggctattttgggtttcactcgaatgtcagttcgaggaataaataaagttaaacgagagctaggttttgtattaatggcacttaatataaggaaaatagcagctcaacgagctgtacattataaaatacatatcaaaaaagctgatttctatcaaataaataatagaaatcagcttttttacattgcctaa

SEQ ID NO: 417430 - DNA, 366 bp, Staphylococcus aureus
atgcatttaataaatgaaatttatattgaagatgagttagtcacatatgataatttattattgaatcctaataaacaatcgatcaatgaaataggttatatggaacattactctcattatggctctgcttacttcatacatgaagatgttaaccaaaaactaatcgattcagtttatgaaaccattagttcttatagcaatacattcgattgtcgtgttgctatttctcaattgcctacacatggttttgcagttagaatttttgcttatcgcacacaaattatagagaaaatacttggaaccatccaaagctatatcgcagaaaatatttatgatcgtaaacttgattttctaagaaaatattaa

SEQ ID NO: 417431 - DNA, 321 bp, Staphylococcus aureus
atgaatgattacgtgcaagccttgttaatgattttattgactgtcgttttatattatttcgctaaaagattacaacaaaaatatccgaatccgtttttgaatccagcattaattgcatctttaggaattatttttgtcttacttatctttggaattagttataatgggtatatgaaaggtggcagttggatcaaccatattttaaacgcaacggtcgtatgtttagcgtacccactttataaaaatagagagaaaattaaagataatgtctctatcatttttgcaagtgtattaactggcgtcatgctaaatttcatgtga

SEQ ID NO: 417432 - DNA, 369 bp, Staphylococcus aureus
gtgttcttaacacttaaagcatttggctattctaaagacgtcattgtaacattattgccccgatctataacagccgctgttggtatagaagtgtcacatgaacttggtggcacagatacgatgaccgtactttttattatcacaacgggtttaataggtagtattttaggttcgatgttattacgatttggaagatttgaatcttctatcgccaaaggtttaacgtatgggaatgcgtcacatgcatttggcacagctaaagcactggagatggatattgaatctggtgcatttagttcaattgggatgattttaactgcagttattagttcggtgttaatacctgttctaatcatactgttctattaa

SEQ ID NO: 417433 - DNA, 582 bp, Staphylococcus aureus
atgacgatttatttagttagacatggcgaatcaaaatcgaattatgataataaacattttagatcttatttttgtggacaattagatgtgccgttaacggatactggcacaaaaagtgcagacgatttatgtgattattttaaagagaaacagattaaacatgtatatgtttcagacttattaagaacacagcaaacgtttgaacatatttttccatatgacattgcatcaacgactacgcctctattaagagaacgttcacttggcgtatttgagggtgaatataaagatgaaatcagtgcgaatccgaaatatgaaaaatatttcaatgacccaaactttaaagactttcgtcatagtttttcacaaaaagcgcctgaaggagaaagttatgaagatgtatatcaacgcgtagaacattttatgaatcatgttgtcaatgaagatacacaaaaagatgatattgtcattgttgcacatcaagttgtcattcgttgtttaatggtttattttaataacgtttcacgggaagaagctgtggatttaaaagttgaaaattgcaaaccatatatcattgaatag

SEQ ID NO: 417434 - DNA, 429 bp, Staphylococcus aureus; identical to SEQ ID NO: 410368

SEQ ID NO: 417435 - DNA, 249 bp, Staphylococcus aureus; identical to SEQ ID NO: 407650

SEQ ID NO: 417436 - DNA, 585 bp, Staphylococcus aureus; identical to SEQ ID NO: 409425

SEQ ID NO: 417437 - DNA, 555 bp, Staphylococcus aureus; identical to SEQ ID NO: 416975

SEQ ID NO: 417438 - DNA, 600 bp, Staphylococcus aureus; identical to SEQ ID NO: 416976

SEQ ID NO: 417439 - DNA, 786 bp, Staphylococcus aureus; identical to SEQ ID NO: 416977

SEQ ID NO: 417440 - DNA, 570 bp, Staphylococcus aureus
atgagtgagttaacggcaaaacaagcacgttttgtgaatgagtatattagaacactaaatgtaacacaaagtgccataaaagcaggctatagcgcaaatagtgcacatgtgacaggatgtaggttattaaagaagccacacatcaagcaatatatacaagaacaaaaagataagattatagatgagaatgtattaaccgcaaaagagttactacatgtgcttacgaatgcggcagtcggtgatgaaacagaaacgaaagaagttgtagtaaagcgtggagaatataaagagaatccacaaagtggcaaagtacagttagtctataacgaacatgttgaactggtagaggtgccaattaagccaagtgatcgtttaaaagctcgtgatatgttgggtaaataccataagttatttacagataagcatgatattaacgggaatgtgcctatattcattaatattggtgaatgggatggcgatgatgaagatttagataagacggtacaagaggtatctaacgctaatcctaatcatactgtgattgtggatgatataccgttagaagattaa

SEQ ID NO: 417441 - DNA, 342 bp, Staphylococcus aureus
atggataaaaagcaaataaaagacttcgtttgtgattatcataagcgaactagaagtgatgtgttgatagatgatgaaataaataccgatgaattcttttcaataggtgatgaaaattctaatgaatggatggcagacgataacattgatgatcatattgtaaagaatcacttagaaatgattgttgaccaagtagctaatgataaagagttttatattttcgattctttaatacaaggacgtagttatcaagatattagtggtgtcttagattgttcagaacaatctgtaagattatggtatgaaaccttattagataaaattgtggaggtgatagaatga

SEQ ID NO: 417442 - DNA, 528 bp, Staphylococcus aureus
atgaaactgagtaaatctaagaacgttttttattatcgtaatagcgacaataaattatctgagtatcaactattaacgcaatttaacccagcatttattaataaaaaaattaagatgtgtgaattccaaattgaaagtatgtaccatatgagtgcgtcgaccacaacatgtgatgaaataatgggggtcgtgtctgtctcatatccaattgaaaaactagttatcaaaattattgaaacaaaggcaagattacaaaactataaaaatcgatctataagtaatatggtgttgttgaaaacggtactaaatcattatacagaaaaagagcagaagcaagttgtaaaatatatgcgttcaaatggacgatataagcccttcaacgtcattgaacgcttacaggttgatttgtatcaagcaagtattaaacaacgttcagaacgtcaaaaacaaagaaatacagcaattgaaaacagtaagattgcacgagtaaatgcatatcaccaatcttcatatgtaaaagtggtgtaa

SEQ ID NO: 417443 - DNA, 177 bp, Staphylococcus aureus; identical to SEQ ID NO: 407605

SEQ ID NO: 417444 - DNA, 579 bp, Staphylococcus aureus
atgaaaacaaatcatttatttgaaaaatattccgatgaagtaaaaggctacaaagaagaaattaataatttagaatctaaaattgaaaatactacaaaaactattgaagatctatcttccaaatataaagactatataaaagttggcaacgataatgaggctgataagacgtttaataagatttcaaaattagaagatgagaaagcaaaagataataaaagatttgaaattaaaaaggaattatttaacagcattaagcgcgaaaaactcatagacttattgttgaataggaagaatattcctgagttatatcaagaggaagcacaaagtttagcgcgtgaattagaaggtacaataaaacagtttaataatgttattgataaaatcaacaatatgaatgaagaatatcgagaagatatgtataagttcgattccttgatagatcaaaatgaaatgaaaaaagataatttatttagacaacgatatggcgaagtgattgtactttacctcaacaactttcttattaatacaaaatcaattcgtttcaatgaacacaaaaaattggaggttaagaaataa

SEQ ID NO: 417445 - DNA, 345 bp, Staphylococcus aureus
atgagtgaatttgaagtaaaagaaaagacgtacaacttaccgaatgaacaccgccaagtactcaatgtgataagaaatacgtctaataaatatattactaaaacaaagctgcttaatcaattaggatatgaagtgaataaggctaacaatagatggttaacacaagtcattacaagcttaatcattaattatcattatcctatcggatatagctataaaaaagatactagaggctattacatcattaaaacacaagctgataagatagaagctatcaaaagtattaagggcttaattgagggcagtcagaaccgtttaaaagccctagaagaaattgaagtgtaa

SEQ ID NO: 417446 - DNA, 642 bp, Staphylococcus aureus
atgaacatagaaactgtagtaaatgaatttgaaacacgagcaggcacgttattaaggtattacacaggtttattagaaagtagtagagaaacgcatttcgctttcaaaatatataatgatccatttgatatggcatacgtgatgatgaatgggaagttattcggtcatgtatatattaaagattgtaaagtaaggcaatcatttgaattagcgtcacctaagcacactgaggggcttataagaagcatagaaggtcattatgtaggttatgaattacatgatggtaaacagctttctattagtgatatgatggccagtcaattatttgaagatgagtattttatgtatggattacaaacatatgcagaatcaaataatagtgatgtgtttgagtacctagaaaatggatttgatacagatacacttgagggcattcaatcgagtaatactgatgtgatagcgaatattgaaatgttgtatcagttagctacgggaatcaatgaaccagcaacggaattagtagagggattaaaattagtaactgagtttgtacaagatgagaatgcgacacaagaggattacacggcgttagaacgtaaattgaatgatctaaaagcgtcttattatagtataagtaaataa

SEQ ID NO: 417447 - DNA, 285 bp, Staphylococcus aureus
atgaatgacaaagagaaaatttataatcaacttcatcatgatgcaccaattcaaattataccagcacccgaaaatttatttgtcgaatatatagaagctgatgaagtatggtattcaccagttgtatgtatggctttaagtaaagcgcataatattaatttttatgacagtgatgatgtggggtgcattgataaagcagccacatgtagcattaaaaaatttaatcctgagacaggtgagtttgaacaattcagcaaaatggctcaaaaggagataacgcaatga

SEQ ID NO: 417448 - DNA, 363 bp, Staphylococcus aureus
atgaataaaaatcaattaaagtcagaaattttagaatatataaagacgcatgatggtacatcatttgtagaaatagaacgtgtatttgaagaaaataattttgattacaaaggtgtcggcgcatatacaagtggtcaacatcctaatgttgtgttttgggttgggtggaatcaagaagcgtttgatgttatcgctgaacttaaaaaagatggacatattgagatggatatttgtgagccaattgtttatatggttgatggtaaaggtttggatttgcctattgtaaggtcgaaaaacattaaaacagatcattggctacctgtcacgtttactattagtaagaaagaaacggagtgtgtctaa

SEQ ID NO: 417449 - DNA, 870 bp, Staphylococcus aureus
atgaatgaaattaaattagaatatgacacacatgtttcagtggtacattatgaaagtttagactcacgttcatttaagagcttttcaaaacctaaatggagtaagttaattaataaactgtctgtgcctatagaagcaaattataagtatgcacgtggtgttgctgtttacggtgatattaaaaacggtgcaaatgatcatgatgaaattatcaaaaagcatcgcaatgacgttaatgtcgtatacagagatgtgattgtacttgattacgatgaaataaatgatttaaagcaattacatgaagcaatcagctcagctttaagcaatgttgcatggttttggcacacaagttactcgcacagaactgaacaagctagaatacgcctgtatatccctctaaatgagcgaataagtgcagatgattatcgtaaatattcaaaggtattagcaaacaaaattggtcataaagtggatgaaggttcatatcagccaagtagatgttttgcattaccagttattcaaaaaggacacatatttattaagcgagtgaatgactgtccaattatcgatgttgatatgctcgaacagtggtcaaaggagtttgaacaatcaaatggtagttctaatatcaaagggtacacacgacgtgatagtgcgtattggcgagatatagcttttggtgtaagtgagggagagcgcaattcaacattggcttcaattacaggttatcttttgcgtaggtatgtagatccaaacttagtttatgggttagtgagtgcgtgggcaagtgtatgcaaaccacctattaatcaaagtgaagtaaacaatacttttaaaagtattttgaaaaaagatagtaaaagcagttag

SEQ ID NO: 417450 - DNA, 324 bp, Staphylococcus aureus
atgaattgggaaattaaagatttaatgtgtgacattgaagtgataaaacaaaaaattaatgatgtagctaccaaacatgcttggtttgttgaagatagatttgtaaaaaatgaattagaaacaaaacgggaacatattaatttttctgctagctatttagaacatcgtatacaaaatgaacatacagttgagttattacaggtttatttaaaagagttcgatgaacttatacaaaaatttcatgaaatagaaaaagcgtcatctgatgtaagtttggcgacagaatcagatgacgcaaagaattcaataaaagtagcagagtaa

SEQ ID NO: 417451 - DNA, 210 bp, Staphylococcus aureus
atgaataatgaacaaaaagaagtaatagaacacttggtttatcaacttgagttaagtgtcatgaataatttggaaagttacgaacacacagaatatgttaatggtattgaagtggtttcagagatcagtcgtgaaaagcacttagaattgataatgaaatggtgcgcacaagaattaaagaataattttcaattagagaaaggagaataa

SEQ ID NO: 417452 - DNA, 147 bp, Staphylococcus aureus
atgaaaatgtatttagcttatatctgcttagtttcattgttaacaattttattactagcaatatctaacatgtatgtcgcttttagcgtttatgcttggctaataactttaggatgtaatttaacaggaggattagaaaatgaataa

SEQ ID NO: 417453 - DNA, 273 bp, Staphylococcus aureus
atgcctagaacaaagttacaagattttccattaaaagaaaatacagttacagaaccaaagcaagttgtagtaaatccgttgtttgcgaaacctaatgcactagctggtatttttggaatttcatatagttcggtcaatcgtattttaaaagagtgggaaaaagattctaaaggtgttgatgatttgtattactcgttgtcatcaacaatgattgttgtcagtattcctcgattcgaggagtacatgaaggtgcgtcataaaaaatggatgtag

SEQ ID NO: 417454 - DNA, 213 bp, Staphylococcus aureus; identical to SEQ ID NO: 413074

SEQ ID NO: 417455 - DNA, 726 bp, Staphylococcus aureus
atgaaatttggagaattattagatgaatatagaaataatttagggttatctataaataaactaggtgaactagcaaatgtatcacctacttatataagtagattgcaaaacaatccagaaaaaaaaccgtcaaaaaaaatcttgtttaagatattaaatgcacttttcattgaaacagctaatcaagaaatcaaaaccactcatcttttttcagatttcatcacaaattatttgtatgatgataaaaacgaattctctgattatgatataaatcaagtccaaaaattacttgatgaatttttcgaatacaacaataaatggaataatcataaaagaaagaaactttatagccttagtgaatcaattgaaaaaaatagagtgatttatcaaaaaaatcaacaaataagttttactaataacaaagaagatttacaaaaacatctatataacaaaccaatttttgatctcgattggtatctaaagcaaaacgattttgaaattttatttccaagagaactaattactaattcaaattatgaagatatagattacaacgttttaactgaaaatgataaaaagatgatcctaagtttagtgcacgcatatatgaataccaaatacaccaaaatacaaaataaacaagagtttttcgataaaaactttgatttatttattgcacgcatgagcgatgttgaattacagtcttttgaatacaaaaacgaataa

SEQ ID NO: 417456 - DNA, 1215 bp, Staphylococcus aureus
atgtgggttcgtgaaatcaccaaaaacaatagtacggcttatcgctatttagagcgctatacagaccctttaactggcaagtataaaacagtatcagttacacgtaacaagaataatgtacgtagccaaaaggacgctcaattagaattaaataaaataattgagcaacgtttgaaacataatagcacgaaacaacttgaaaaattaacgtttcacgatgtgtgcgatgaatggttagaacattacaagacacattcaggttcaaaaccaaccactattaaagaaaagaaaagtaatgctaatacagtcaaaaatgctattgatagcaaagtactcatcagcaagattacgcacacctacttacaaaacatcattaatgaatgggctaaatcacatagtattggccatgttcaatctcttgttattgttattcgttccgttttcaaatatgcgtttaaatattatgatctgcacgatattagtgtgttagataaaatagatatacccaagaaagcccaaaccagaaacgaacttcaagctaaacgtaataactatttagaagatagcgaagtaaaggagttactagagtgcttcgactatctaattaaacataagcgtcatgctacacgtaaacgtaactatgaaatggtaaaagcattagtagaatttcaaattaacaatggaatgcgcattggcgaactcctagcaatcaagacagacaatataaatattgagaataaaacactagagattgacggaacaataaattgggttactgatgcagaaactggaacatttggcgttaaagaaacaactaagacaagtaagagttatcgaacaataggcctcacaactcaaagtattaatttacttaaaaagctcatgctagaaaataaaaaagaaaatcagtggaatgctaaattcatagatagaggttatatatttactaacactgctggtagccctattgacttaaataaggtgaataatattattaaagaagctactgatataagttcaattaacaagcatgtgacaacacacacattacgtcacacacatatatctacacttgcgcaattaggaataaacctaaaagcgatacaagatagagttggccacagtgattataaaacaactttagagatatacacgcatgttacggataaaatggcacaagatatgatgaataaattagaggggatagggagttaa

SEQ ID NO: 417457 - DNA, 900 bp, Staphylococcus aureus
atgggcagaaaactaaaattaaactacgaagaacaaattaaaaagttaaaatcactaggtattttatttaacgaaataaatgaaaacaaagctaaagagatactgaaaaacaacacatacttttttaaattatcttctttcagaaaaaacatacgtaaagataatagtggaaattataactttgaattttctgcactatctgatttagcaaccttagatatgagattacgctacatgttattacctatgtgtttagacattgaacactcacttaaaacagacattcttgaaaaaataactaatgacgattcagaggatggttatcaaattatgaaagattttattaacaatcatcaaggagatttagacaaaattttttctactgttataaaaagagataacactgttatgcctagttttcaaaaatactatgaagatccaccagtgtgggtgtgtttagaattaatgtctttcggacaattttctgcatttgtggaattctattcagatagaaccaatgacgccgaattaagaaaggcaggtaagtttattaaattcactaaaaatattagaaataagtgtgctcatagtcagcccatattactaaatttaactcctagatataaattgaaaacggaaagcgaactaaaaagacttggtcaaaaacaaggtttatcagaagttagtttaaaagttttaccaattatagatatactttcattatttatattacattctaaatattgcagtgaaggtattaaaaataatagaaaaaacgatttaattgcctttaaaaaacgtaaagatagaaaatataaacattacagaaatgtaccatccttatcttattttttcctatccctcaacaaaatgattgactattacactaagagcaattaa

SEQ ID NO: 417458 - DNA, 243 bp, Staphylococcus aureus; identical to SEQ ID NO: 405255

SEQ ID NO: 417459 - DNA, 504 bp, Staphylococcus aureus
atgctaaatagagttgtattagtaggtcgtttaacgaaagatccggaatacagaaccactccctcaggtgtgagtgtagcgacattcactcttgcagtaaatcgtacgttcacgaatgctcaaggggagcgcgaagcagattttattaactgtgttgtttttagaagacaagcagataatgtaaataactatttatctaaaggtagtttagctggtgtagatggtcgcttacaatcccgtaattatgaaaatcaagaaggtcgtcgtgtgtttgttactgaagttgtgtgtgatagtgttcaattccttgaacctaaaaatgcgcaacaaaatggtggccaacgtcaacaaaatgaattccaagattacggtcaaggattcggtggtcaacaatcaggacaaaacaattcgtacaataattcatcaaacacgaaacaatctgataatccatttgcaaatgcaaacggaccgattgatatcagtgatgatgacttaccattctaa

SEQ ID NO: 417460 - DNA, 297 bp, Staphylococcus aureus; identical to SEQ ID NO: 405253

SEQ ID NO: 417461 - DNA, 192 bp, Staphylococcus aureus
atgaatttaaatattgattggtctaaagattttcaagaattccaagagatacttaatagtggcattcatcctgaatggctttattgtgcaaaggctaatcttgttttagagcctgcttatactggcgaaggcaaacaatttttcagcactcaagatattattaacgcgagtaaaattattccattcttttaa

SEQ ID NO: 417462 - DNA, 1098 bp, Staphylococcus aureus
atggctttaacagcaggtatcgttggcttaccaaacgttggtaaatcaacattatttaatgcaattacaaaggcgggtgccttggcagcaaactatccgttcgcaactatagacccaaacgtgggtattgtagaagtgccagatgcaagactacttaaattagaagaaatggttcaacctaaaaaaacattacctactacatttgaatttacagatattgccggaattgttaaaggtgcttctaaaggtgaaggtttaggtaataaattcttatcacatattagagaagtagatgcaatttgtcaggttgttcgtgcttttgacgatgataatgtaacacatgtagctggtcgagttgatccaattgatgacatcgaagttatcaatatggaattagtacttgcagacttagaatcagttgaaaaacgcttacctagaattgaaaaattggcacgtcaaaaagataagactgctgaaatggaagtgcgtattttaacaactattaaagaagctttagaaaatggtaaacccgctcgtagtattgactttaatgacgaagatcaaaaatgggtgaatcaagcgcaattactgacttctaaaaaaatgctttatatcgctaatgttggtgaagacgaaattggtgatgatgataatgataaagtaaaagcgattcgtgaatatgcagcgcaagaagactcagaagtgattgttattagtgcaaaaattgaagaagaaattgctacattagatgatgaagataaagaaatgttcttagaagatttaggtatcgaagaaccaggattagatcgattaattagaacaacttatgaattattaggattatcaacatattttactgctggtgtgcaagaagtacgtgcttggacatttaaacaaggtatgactgcacctcaatgtgctggtatcattcatactgattttgaacgtggatttatccgtgccgaagtaacaagttatgatgactatgtacaatatggcggcgaaagtggcgctaaagaagcgggcagacaacgattagaaggtaaagaatatattatgcaagatggcgatatcgttcatttcagatttaatgtataa

SEQ ID NO: 417463 - DNA, 204 bp, Staphylococcus aureus
atggcgtcaaaatatggaataaatgatatagtagaaatgaaaaaacaacatgcgtgtggaaccaatcgttttaaaattattagaatgggtgctgacattagaattaagtgtgaaaattgtcaacgaagcattatgattccacgtcaaacgtttgataaaaaactaaaaaaaatcatcgtatctcaggatgatacacaaaaatag

SEQ ID NO: 417464 - DNA, 882 bp, Staphylococcus aureus
atggatcaagttatgagtattatttcatcgctagtcgaaccattaactaaaattgaaacatatgaaagtattgctactaaattagcgatgataattatatatattatcgttgcattaatcgtaattaaaatactagataaaatgattgcccaaggatttaaaatacaaaacaagagtaaaaagggtaataaaaaacgttcgaaaacattaatctcattggtgcaaaatgttgttaaatatatcgtgtggtttatagttatcactaccattttaagtaaatttggcattagtgttgaaggggtaattgccagtgctggtgtcgtaggcttagcagtaggttttggtgctcaaactatagttaaagacgtaattacaggattctttattatatttgaaagccaatttgatgtaggtgattatgttaagataaataacggtggtacaactgtagcagagggaacagttaaatcaattggactccgttcaacacgtataaatacaatatctggagaacttacaatcttgccaaatagtagcatgggtgaaataacgaattactcaattacgaatggaacagcaattgttaaaattccagtatctgtagatgaaaatattgataatgttgagaagaaattaaacaaattatttacatctctgcgtagtaaatattatttatttgtaagtgatcctgttgtgattggtattgatgcctttgaagatactagagtaatattaagggtttcagcagaaacaataccaggtgaaggtttctctggtgctcgtattattcgtaaagaagtacaaaaaatgtttttacaagaaggtattaagacaccacaaccaataatgacaccttttaatcatagtgaaaacggtgtttag

SEQ ID NO: 417465 - DNA, 846 bp, Staphylococcus aureus
gtgagtgaattgtcaaaaagtgaagatcaacgtattactaaaacaaaagatgaacaaattaagcaaatagatatatcggatatcaaaccgaatccgtatcagccccgaaaaactttcgatgaaaatcatttaaatgatttggcagattcaattaagcaatatggtattttgcaaccaattgtgcttagaaaaacagttcaaggttattacattgtagttggtgaaagaaggtttagagcttcgaaaattgctggtctaaaatacgtatcagcgattatcaaagatttaacagatgaagatatgatggaactggcggtcatcgaaaatttacaacgagaagacttaaatgcgattgaagaagctgaaagttatcaacgtttgatgacagatttgaaaattacacaacaagaagtagcgaagcgattgagtaagtcgcgcccgtatatagcgaatatgttgaggttattacatttaccgaaaaagattgctgacatggtaaaagatgggcgactgacaagtgcacatggacgaacgttattggcaattaaagatgaacaacaaatgcttaggttagcgaaacgggttgttaaagaaaagtggagtgttagatatttagaaaaccatgttaatgaattaaaaaatgtttcgtcaaagtcggaaacagacaaagtagatataactaagcctaaatttataaagcaacaagaacgacagttgcgagaacagtatggcgcaaaagtagatatatcgataaaaaaatcagtcggcaaaatctcatttgagtttgaatcgcaagatgactttgtgagaatcattgaacaattaaatcgtaagtatggtaaatag

SEQ ID NO: 417466 - DNA, 1104 bp, Staphylococcus aureus
atgaaggatacacagttagcccaaatcacattaactgatgattcaaccggtgctatagcgaatccaatccatttatctactgcctacaagcatccaaaactaggacaatcgacaggttttgattatacacgtactaaaaatcctacacgctcaacatttgaaacctgttttgccaaacttgagcatggtattgcatcattcgctacatcaagtggaatgtcagccattcaattaatatgtaatctatttaaacctcatgatgaaattttagtttcattcgatttatacggcggcacatttagattatttgaattttacgagcaacaatacgatatcaaatttaagtacgttgattttacagattatgaacaagttgaaaaagaaatcactgataaaacagtagcattattcattgaaccaatatctaatccacaaatgattgctattgatgtaaagccatattaccaactttgtaaagataaaggtttattatctatcatcgacaatacctttttaacaccttatctttcgacgcctttagcagatggtgctgatatcgtcttacattcagctacaaaatatattggcggacataacgatgtactagcaggtgtcgtaatcgtcaaagatgaatcactcgcgcaacagttgtttgattttcacaacatgactggcgcaacactatcaccaatagatagttatttgttgttacgtggacttaaaactttgcatttacgcattgagcgtgcgcaatcaaacgcaagaaaacttgctaaaaaatgtcagtcacttcaagcaattgatgaagtactatatagcgggcaaactggcatgcttagtttaagacttaacaaggcctatagcgtcgctaaattattagaaaatttagatatttgtatttttgcagaaagtttaggaggtactgaaacattagtgaccttcccttacacacaaacacatgttgatatgccagatgctgaaaaagataaacgtggcattgatgagtatttaatccgcttatcactaggcgttgaaaattatgaagacatcgaacgcgatatcatccaagcattagataaagctcagattggagagattgtatga

SEQ ID NO: 417467 - DNA, 1161 bp, Staphylococcus aureus
atgacactttcaaaagagacagaagtgatattcgattggcgtagaggtgtggaatatcattcagctaacccaccactctatgattcttcaacattccatcaaacaagtcttggtggcgatgttaaatatgattatgcacgaagtggcaaccctaaccgtgaacttttagaagagaagttagcacgattagaacagggaaaattcgcttttgcttttgcatcaggtattgctgctatttcagcagtacttttgactttcaaatctggtgatcatgtcattttacccgatgatgtatatggcggtacttttcgcctcactgagcaaattttgaatcgttttaatattgaatttacaaccgtagatactaccaagctcgaacaaatcgagggtgccattcaatcaaacacaaaattaatttatatcgaaacaccatcgaatccctgttttaaaattactgatatcaaagctgtttctaaaatagccgaaaagcatgaactactggtagctgtagacaatacatttatgacaccgttaggtcaatcacctttattacttggcgctgatattgtcattcatagtgctacaaaatttttaagtggacatagcgatttaattgctggtgctgtcattactaataataaggcaattagtgaagcactttatttaatacaaaatggtacgggcaatatgttatctgctcaagatagctggacgcttgctaaacatttgaaaacatttccaatcagatttaaacaatctgttgaaaacgcgcaaaaaatcgtgtcatttttaataaagcaaggtgaaatttcagaagtttattatccgggacttactgcatctcatttagaacaagctaaaaatggcggtgccgttattggcttacgtttagctgatgagtctaaagcacaacaatttgtcgatgcactgacattaccactcgtttcagtgagtctgggcggtgttgaaacgatcctttcacatccagcaacaatgtctcacgctgcactacctgaagaagtgagacaagaacgtggtatcactttcggtctattccgattaagtgttggtctcgaagatcctgatgaactcattgcagacatcaaatacgcattaaaggaggcattcaatgagtcaattcctcacacaattgaaagataa

SEQ ID NO: 417468 - DNA, 1842 bp, Staphylococcus aureus
atgagtcaattcctcacacaattgaaagataatgttttagtagctgatggcgctattggaaccattttatactctgaagggttagacacctgtccagaagcatataatcttagccatccagataaagttgagcgtatccatcgttcatatattgaagctggtgctgatgtcattcaaaccaatacttatggtgcaaattttgaaaagttaaaacgattcgatctcgaagataaagttaaagcaatacatcaagccgccgttcgcatcgcaaaaaaagcagcaaataaagatacgtatatattaggaacagttggtgggtttagaggtatcaaacaagaggatatcagcttacaaactattctttatcatactgaaattcaaatagacaccttaattgaagaaggcgttgacgcgctacttttcgaaacgtattacgacctagaagagttaacaaatgtcatttcacgaacgagaaagaaatacgacattccaatcattgctcaattaaccgcttcaaacacaaattacttagttaatggtcaggcaatcaatgaaggattaaaacaactcgttcaatgtggcgcaaacatcgtgggactcaattgtcatcatggcccgcaccatatgcaagagtctttcacacatattgaattaccagagcacgcattcttatcttgttatccaaatgccagcttattagatattgaaaatagtgaatttaagtatagtgacaatgcacaatatttcggtcaagttgctcaaaatctaattcgcgaaggtgttcgtttaattggtggttgctgtggtacaacgcctgagcacatcaaatttattaaagaatctattcagacacttaaacctgttaatgacaaaaaagtgattccgataccaaagaaagcacttttcaatccatctcaaaataaagttagacaatcattaacatctaaggttcaagaacgtccaaccgttattatcgaattggatacaccgaaacatttagacacggatagattttttgaaaatatcgctaaacttgataaagctaatgtagatgcggtaacactcgcagataattcattggcaactgtcagaattagcaacattgctgctgcaagcttaattaaacaatattacaacattgaaccactcgtacatattacatgtcgagaccgaaacttaatcggcttgcagtcccatttacttggattatcgctcattggcgttaacgaaatattagccataactggtgatccttcaaaagttggtcacttaccaggtgcaaccaatgtctatgatgttaattctaaaggattaactgaactcgctctaagatttaatcaaggtattaacactgacggtgatgcgctgaagaaacgtacacacttcaacatcgctggcgcctttaaccctaatgttcgtaaattagatggtgccgtaaaacgattagagaaaaagatagaaagcggaatgtcttattttataacacaacccgtgtacagcaaagagaaaatcattgaaatttaccatgccactaagcacttgaacaaaccatttttcataggcattatgcctatcgcaagttacaaaaacgcactctttttgcataatgaagtgccaggaatcaagatgtcagatgaaattttacaacagtttgaagcagttaaagatgataaagccaaaacacgagaactaagtcttaagatttcaaaggatttaatcgatactgttcatgaatattttaatggtttatacattatcacaccgtttcaaaatgtcgaagattcattagaacttgcagcatactcaaaatctattactgctcacaaggaggcaatattatga

SEQ ID NO: 417469 - DNA, 2229 bp, Staphylococcus aureus
atgacaacaattaaaacatcaaacttaggattcccaagattaggtagaaaaagagaatggaaaaaagccatcgaaagttattgggcaaagaagatttctaaagaagaattagatcaaacattaactgatctacataaagaaaatttattattacaaaagtactatcacttagatagcatcccagttggtgatttctctttatatgaccatattttagatacgtcattattattcaacatcatcccagaacgtttccaaggtagaactatcgatgatgacttattatttgatattgctcgcggtaataaagaccatgttgcaagtgcacttataaaatggtttaacactaactatcattacatcgtacctgaatgggacaatgttgagcctaaagtgagtcgcaatgtattattagatcgctttaaatatgcccaatctttaaacgttaacgctcaccctgtcattgttggtccgattacttttgttaaattatcaaaaggcggtcaccaaacttttgaagaaaaagttaaaacgttattaccactttataaagaagtgtttgaatcattaattgatgcaggtgctgagtacattcaagttgatgagccaatcttagttacagacgacagtgaaagctatgaaaatattacacgtgaagcttatgactatttcgaaaaagctggtgttgctaaaaaattagtcattcaaacatactttgaacgtgtacatcttaaattcttaagttctttacctgttggtggtttaggtttagactttgtccatgataatggctataaccttaaacaaattgaagcaggagattttgataaatcaaaaacattatacgctggaattatcgatggtcgtaatgtatgggcaagtgacattgaagctaaaaaagtcttaatcgataaattgttagcccacacgaatgagcttgtcattcaaccatcatcttcattattacatgttccagtatctttagatgatgaaacattagatacaagcgttggcgaaggcttaagctttgctactgaaaaattagacgaattagatgcattgcgtcgcctatttaatcaaaacgatagtgttaaatatgataaattaaaagcacgttatgagcgtttccaaaatcaatcattcaaaaacttagattatgatttcgaaagcgtgcgtacttcaagacaatcaccattcgcgcaacgtattgaacaacaacaaaaacgtttgaacttaccggatttaccaacaacaactattggatcattcccacaaagccgagaagttcgaaaataccgtgcagattggaaaaacaaacgcattacagacgaagcatatgaaacattcttaaaaaatgaaattgctcgatggattaaaattcaagaagacatcggcttagatgtattagttcacggtgaatttgaacgtaatgacatggttgaattcttcggagaaaaattacaaggtttcttagtaactaaattcggttgggtacaatcatatggttcacgtgccgtaaaaccaccaatcatttatggtgatgtaaaatggacagcgcctttaactgttgatgaaacagtttatgcacaaagcttaacagataaaccagttaaaggtatgttaactggtcctgtaacaattctaaactggtcatttgaacgtgttgatttaccacgtaaagttgttcaagatcaaattgctttagcaatcaacgaagaagtattagcacttgaagctgcaggaatcaaagttatccaagttgacgaacctgcattacgtgaaggcttaccattacgctctgaatatcacgaacaatatcttaaagatgctgttttatcatttaaacttgcaacgtcttcagttcgtgatgaaactcaaatccatacacatatgtgttattctcaattcggtcaaatcattcatgctattcatgacttagatgctgatgttatttcaattgaaacatctcgtagccatggtgatttaattaaagactttgaagatattaattatgatttaggtattggtctaggtgtatatgatattcatagtccacgtattccaacaaaagaagaaattactacagcaatcaatcgttcactacaacaaatcgatcgctcattattctgggtaaaccctgactgtggtttgaaaacgcgaaaagaagaagaagttaaagatgcattgactgtacttgtgaatgctgttaaagctaaacgccaagaataa

SEQ ID NO: 417470 - DNA, 753 bp, Staphylococcus aureus
atgacacaatatcctttatggcaacaattaaatactttaaaacaagcaacttgggttgatttaacgcatacatttgatccggaaataccacgttttagtgagtttgaaaaaggcgaagtttcaactttattcacggttaaagatcatggtttctatgtgcaacgttggaatattgtaacgcaatatggtactcacattgatgcaccaattcactttgtcgagaataaacgttatttagaagacattgatttaaaagaattggtattgccgttaattgtattagacttttcaacagaagtagcgaataacaatgatttcatcgtaacacgtgaacatttagaagcatgggaaaaagagcatggtactattgaatctggcacttttgttgcacttcgtaccgattggtcaaaacgttggcctaatattgaaacgtttgaaaacaaagatgcgaacggacaacaacatgcaccgggttggggattagatgctttgaagtacttaattgaagaacgccgtgttgaagctgttggtcatgaaacattcgataccgatgcatctgtggacgttgtaaaaaatggtgatttagttggcgaacgttatattcttggtcaggataaataccaagtcgagttattaactaatttagttcaattaccaactcgtggcgccatcatttacgctatcagccctaaaccaaaagatgcacctgggttccctgttagagcatttgcaattaaaccatcaaatgactaa

SEQ ID NO: 417471 - DNA, 1182 bp, Staphylococcus aureus
atgacgagagtcgtattagcagcagcatacaggacacctattggcgtttttggaggtgcgtttaaagacgtgccagcctatgatttaggtgcgactttaatagaacatattattaaagagacgggtttgaatccaagtgagattaatgaagtcatcatcggtaacgtactacaagcaggacaaggacaaaatccagcacgaattgctgctatgaaaggtggcttgccagaaacagtacctgcatttacagtgaataaagtatgtggttctgggttaaagtcgattcaattagcatatcaatctattgtgactggtgaaaatgacatcgtgctagctggcggtatggagaatatgtctcaatcaccaatgcttgtcaacaacagtcgctttggttttaaaatgggacatcaatcaatggttgatagcatggtatatgatggtttaacagatgtatttaatcaatatcatatgggtattactgctgaaaatttagtagagcaatatggtatttcaagagaagaacaagatacatttgctgtaaactcacaacaaaaagcagtacgtgcacagcaaaatggtgaatttgatagtgaaatagttccagtatcgattcctcaacgtaaaggtgaaccaatcgttgtcactaaggatgaaggtgtacgtgaaaatgtatcagttgaaaaattaagtcgcttaagaccagctttcaaaaaagacggtacagttacagcaggtaatgcatcaggaatcaatgatggtgctgcgatgatattagtcatgtcagaagacaaagctaaagaattaaatatcgaaccattggcagtgcttgatggctttggaagtcatggtgtagatccttctattatgggtattgcaccagttggtgctgttgaaaaggctttgaaacgtagtaaaaaagaattaagtgatattgatgtatttgaattaaatgaagcatttgcagcacaatcattagctgtagatcgcgaattaaaattacctcctgaaaaggtgaatgttaaaggtggcgctattgcattaggacaccctattggtgcatctggtgctagagttttagtgacattattgcatcaactgaatgatgaagttgaaactggtttaacatcattgtgtattggtggcggtcaagctatcgctgcagttgtatcaaaatataaataa

SEQ ID NO: 417472 - DNA, 1134 bp, Staphylococcus aureus; identical to SEQ ID NO: 417401

SEQ ID NO: 417473 - DNA, 630 bp, Staphylococcus aureus
atgaaaggtatgttcctaagtagtttttatgcaacgagaaagcaaacatatatttattttatagtcgctatcatagctgcgggatactttgcagtatttaatccgttgatgagttcggcaatggctggagttatgttaattacacctattactgataatattaaacatgaaaaagactcaagatggatgtattatgtatctactttaccggttaaacgtagtgattatattaagtcatactttgccttttatttaatcttattcggtgcaagtttaatgattggattagttgtgactacaatcgtgacccaaagtgtgatgattggtattatgtcaggtttaatgagttttggtatcataggggcatactctatcattttcccattgacatttaaatttggcgctgaaaactctaatgtcattatgatatttgcatctatcctactgcttttctctttcgtggtctttttctttatatatggtatggttagtggtgcatctgcattagaatttgaaaaaattagcactgaaggatggctagttgtcatagcatatgcggttattggtatagttataacgagcgtttcttatatattgtctattaaaatttttaacaaacaagaactataa

SEQ ID NO: 417474 - DNA, 843 bp, Staphylococcus aureus
atgacaacattgttaaacttagattgtgtgaacaaacaatacaagtcttcggattttaaattacaagatgcatctttaacgatttctactaatgagacagttggattaattgggaaaaatggctcaggtaaatcgacattaattaatattctagtaggcaatcgacataaagataacggtagtattgcattttttggggaagaacatgctatggatgatgtcgaatataaagaacacataggtgtagtgtttgatgatttgagagtacctaataaattgactattaaagatattgataaagtatttcaatctatttatatgacttggaatagtcaaaaattctttgatttaatcaaatattttgagttgccactacaaactaagattaaaactttttcaagagggatgcgaatgaagatagctttgacgattgcactttctcatgatgtgaaacttttgattttagatgaagcaactgcgggtatggatgtttctggacgagaagaagtaatggaactattagaagattttgtcgcgcaaggtggaggcatcttaatatcatcgcatatttctgaagatatagaacaattagcggataaattagtgtttatgaaagatggacgaatgattttaactgaacagaaagatatacttttagcacaatatggaattgttacgacagaagataaagatgttgaaattcctaagcatttaattatagcttctagattgtcaaaggggaaatatcaaattttagttaaagattatgcagaaattgaaaatgcagaacctttaaaacacattgatgacgctacgaaaatcataatgcgaggtgaagtataa

SEQ ID NO: 417475 - DNA, 714 bp, Staphylococcus aureus
atgaaaatactaagatatatcggatatcttttactaggtggacttgtaggtggtatcataggtggaattttaggtaactttgatggattgggtattgagaatttgacgttcgcaacgcgtaataatgtcgttgtaatatcaattattgcgactatgatcatcatattaatagaaatcattgttttgatgaatcaaagacgtgcattgaagtataagcgacttgtagatgaagaggtagataacgaagaaacagatcaatatgaattgcttgcgaatcgtcatgttttaaatggaagtatattaagtattctacagacagttattgccttgttagtgttgcttatttttgtggtaggacaagctgaagcaaatggaatactattctttttaataccattttttgctagtggtattttcaatacacaatttacactgtttaatagaagatttgatgacagaatgccaaaaattgcagataagaattacactgaaaagcgattggaaatattggatgaaggtgaacgccatatagaattaattgcattatttaaaacatatgcgatcaacttatcaatattgatactagccattgtagtaattgggctttattcaattaccactggaattaatcaaagattcagtttgctacttatcattgctattttcatatataacgcctttagttatttattgaagagtagacgtttttattaa

SEQ ID NO: 417476 - DNA, 204 bp, Staphylococcus aureus
gtgcgtaatcgattgaaagaattacgagcacgagatggcttaaaccaaacgcagcttgctaaacaagcgggtgtttcaagacaaaccatttcgctaattgagcgaaacaactttatgccatcggtattaactgcaataaagattgctcgtatcttcaatgaaacggtggaaactatttttattattgaggaggatgaggcatga

SEQ ID NO: 417477 - DNA, 390 bp, Staphylococcus aureus
atggcatttacattatctgaaattcaacaagcacatcaacaatttactggtgttgattttccaaaactattcaaagcttttaaggatatgggtatgacgtacaatattgttaatattcaagatggcactgcaacatacgtacatcaatcagaagatgatattgttacttcatctgtaaaaagtaatcatcctgtcgctccaagttcaaatcaatctatcgttcaagatgtattaactagacatcaacaaggacaaacagatttcgaaacattttgtaatgaaatggctgaagctggcatttataaatggcatatcgatattcaagctggtacttgtacttatatcgacttgaaagaacaagctattatttcagaattaatacctcagtaa

SEQ ID NO: 417478 - DNA, 216 bp, Staphylococcus aureus
atgataactaacacttttattttaggcatcacaggcccaacaagtcttgtcgtcattagcattattgctttaattatttttggtccgaaaaaattaccacaatttggtcgtgctatcggttctactttaaaagaatttaaatctgcaacagaagatttagataaagagtctcacgatacacccagtaaggaatcgaagcaacagcgagagcaatag

SEQ ID NO: 417479 - DNA, 702 bp, Staphylococcus aureus
atggttcactttagcgaactacgccatcggttagtaaaaattttattgtcgttcgtcattacggtcatcgtcgtatatgtttcatcattttggtggatgacaccattcataacgtatattacccgtgcacatgtgtccttacatgcattttcattcacagaaatgatccaaatatacgtgatgattatatttttcatcgcgttttgtttcatttcaccagtcatgttttatcaattgtgggcgtttattgcgcctggtttgcataataatgagcgccaatttatttataagtatagtttttttagtgtgttattattctgtgctggcgtcgcttttgcattttatgttggctttccaatgatcattcaattcgcgttaaaattatcattaactttaaacatttcgcctgtcattggctttaaagcatatttgattgaactcatacgttggttattcacatttggcattctatttcaattaccaatattatttatgggtcttgcaaaattcggtcttatagatacatattctttgaaacattatcgtaaatatatttactttgcttgctttgtgctggcgagtatcattgcaccaccagacataacattaaatatattactcacattgccactcatattgctctttgagttcagtatgttcattgttaagttcacatgccgaggcaaactgccaacacattaa

SEQ ID NO: 417480 - DNA, 1713 bp, Staphylococcus aureus; identical to SEQ ID NO: 407653

SEQ ID NO: 417481 - DNA, 1230 bp, Staphylococcus aureus
atgacaaattacgaacaagttaatgacagcacacaattttcaagacgtacatttctaaaaatgttaggtattggtggtgctggtgtggcaattggcgcgagtggtgtgggtagtgtttggtctttcaaatcgatgtttaatacacctgaagacccagaaaaggatgcatatgaattttatggtaaagtgcaaccaggcattaccacacccacgcaaaaaacatgcaatttcgttgcgttagatttgaagtcaaaagatagagatgcaattaaggcaatgtttaaaaagtggacggttatggctgatcgtatgatggatggagatacagttggcaaggccagtaacaatcctttaatgccgccagtagatactggtgaatcgattggattaggggcgagtaagttaacaatcacctttgggattagtaagtctttgatgaagaaaattgggttatctagtaagattcccgatgcctttaaagatttaccgcattttccgaatgatcagttaatagacgattacagcgatggcgatattatgattcaagcatgttcaaatgattcacaagtgtcttttcatgcggttcataatttagttcgtccgtttcgagatattgttaaggtgcgttgggcgcaatctggttttatctctgctaaaggtaaggaaacgccaagaaatttaatggcatttaaagatggaacaattaatcctaggaagaataatcaacttaaagattatgtgtttattgatgatggatgggcgaagcatggaacttattgtgttgtcagacgtatccaaatacacattgaaacgtgggatcgaactgcattagaagaacaagaggcaacatttggtcggaaacgacatagtggtgcgccgttaacaggcgggaaagaatttgatgaaattgacttaaaagcgaaagatagtcatggcgaatatattattgataaagatgcccatacgagactagcgaaagaagctaatacgtcaattttacgtagagcctttaattatgtggatggtacggatgatcgtacaggtaacttcgaaacaggcttgttgttcattgcttttcaaaaagcgacccaacaatttatcgatattcaaaacaatttaggtagtaatgataaattaaacgaatacattacacatagaggttctgcttcatttttagtattaccaggtgttagtaagggaggataccttggtgaaacattatttgactaa

SEQ ID NO: 417482 - DNA, 855 bp, Staphylococcus aureus
atgaaaaaattaacaacgctattattagcatcaacgttattaattgctgcatgtgggaacgacgatagtaagaaaaatgattcaaaggcatcgaaaaaagatgacggtattaaagcagagttgaaacaagcaactaaagcatatgataaatatactgatgaacagttgaatgaatttttaaaaggaacagagaaatttgttaaagcaattgaaaataatgatatggctcaagcaaaagcattatatccaaaagtgcgtatgtattatgaacgctctgaaccagttgccgaagcatttggtgacttagatcctaaaattgatgcgcgtctagcagatatgaaagaagagaaaaaagaaaaagaatggtcaggatatcataaaattgaaaaagacttatatgaagataacaaaattgatgatatgactaaaaaagacgcacaacaattattaaaagatgctaaagaattacatgcaaaagcagatactttagatattacaccgaaattaatgttgcaaggttctgtagacttattaaatgaagttgcaacttctaaaattacaggtgaagaagaaatttactcgcatacagatttatatgattttaaagcgaacgttgaaggtgcacaaaaaatttatgatttattcaaaccaattctagagaaaaaagataaaaaattaagtgacgatattcaaacaaacttcgataaagtaaaccaacttttagataaatataaagataagaatggtggttatgaatcatttgaaaaagtatcgaaaaaagatcgtaaagcatttgcagatgccgttaatgcattaggagagccactaagtaagatggctgtgattactgaatga

SEQ ID NO: 417483 - DNA, 546 bp, Staphylococcus aureus
atgtttggaatgaaagtgaatgaacaaatgacattaaaaattttagaagctcatgacacagaagcgcttttcaatttagtcaatcgttcaagagattcacttagggaatggttaccttgggtagatgcaactgagcaaccatcagatacgcgtgcatttatcaaaagaggacttttgcaatttgctgatggtaatggatttcagtgtggtatttggtatgtgggaacgctagttggtgtcataggtttacatgaaattaatcacatgcacagaaaaacttctttagggtattatttagataaacaatttgagggtcgtgggattatgacacaagcagttgaggcattgataaagtattgcttcgatgagattgacttaaatcgaattgagatcagtgccgcagctaataatgaaaaaagccaagctattcctgaaagactgggatttactagagaaggtatgttacgtgacaatgaattactaaatggtatttattcatcgagttatatctatagtttattgaaatcagaatacaactccaaataa

SEQ ID NO: 417484 - DNA, 996 bp, Staphylococcus aureus
atggcatcattgaaaaataagcattttatgattggactatcattaacatttatagtcgcattatttagctttttagcagctaaattgccaatcttagataaggttggcgcattaactatcgcgatattaatcgctattctatatcgtcactttagaggatatcctgaacaatatagctcaggtattacgttttcatctaaatatttattaagatttgcaatcatcctatatggacttaaactcaatatattcgatattatcggtcaaggtagtagactattagccatcgatgtaggtgtcgttattttcagtattgtaatgatgctctttgtcaacaaactgttgcatggtgacaaaaacatcgcattattactaggtgtaggtacaggcgtttgtggtgctgccgctattgctgcagtagctccaatattcaaatcacgtgaaaaagatacagctattagtatcggtatcatcgcattgattggtacgatattttcacttatatatacagctatctacgctatcttttcaatgacgacaaatgtttatggcgcttggtctggcgttagtcttcatgaaattgcacacgttgtcttagctggtggctttggtggtagtgatgcacttaaaatcgcacttcttggtaaacttggtagagtattcttactgattccattaaccatcgtacttattttaattatgcgtttccgttcatcagaatcatctagcaagggtcgaataagcattccatactttttaattggatttgtcattatggccttagtgaatacatatgtaactatcccgtcagcattgctaaatattttaaatactgtatcaaccatttgcttattaatggccatggttgctttagggttaaatgttgcatttaaagatcttaaaaatcgtgcacttaaaccgcttatgacaatcattattacctcaatatgcttgtcatcacttgcctttatcgtcgttcactggctatatagttaa

SEQ ID NO: 417485 - DNA, 567 bp, Staphylococcus aureus; identical to SEQ ID NO: 407654

SEQ ID NO: 417486 - DNA, 1062 bp, Staphylococcus aureus
atggcaaaattagaaatgaataaaaatacgcctcttgagtttggtttgtattccttaggtgatcatttattgaatccatttaaaggtgaaaaagttagttatgagcaacgtattaatgaaattattgaagcaagtaaattagcagatgaagcaggtattgatgtttttgcagttggtgaaagtcatcaggagcattttacaacacaggcacatacggttgtgttaggtgcaattgcccaagcgacaaagcatattaaagtttcaagttcttcaacgattattagtgcaacagatcctgtaagagtatttgaagacttcgcgacattagatttgatttctcatggtagagccgaaattgtggctggtagagcatcaagaacaggtatttttgatttgtttggctatgatttaaaagactatgatgaattgtttgaagaaaaattaggtttacttttagagttaaataaaactgagcgtattacttggtctggaaaatatcgtccagaacttagaaatatgaaaatattcccaagaccaatcgataatatattgccaatatggcgtgctgttggtggtccacctgcaagtgctatcaaagcgggaaaacaaggtgtgccaatgatgattacaacccttggtggcccagcaatgaactttaaaggttctatagatgcttatcgtcaagcggcaactgaagcaggtttcgatgcttcgcctaagtctttaccagtaagtacagcgagtttgttttatacagctgaaacaactcaggatgctatgagagaattttatccacatttgaatacagggatgtcatttattcgtggcgttggttatccgaaacagcaatttgctaattcaccagattatagagaagcgctaatggttggaagcccgcaacaaattattgaaaagatattgtatcaacacgagttgtatggtcatcaacgttttatggcacagattgattttggcggtgtgccatttgaaaatgttatgaagaatattgagttaattggcaacgacattataccggcgattaaaaagcatttatcaaaatag

SEQ ID NO: 417487 - DNA, 927 bp, Staphylococcus aureus
atgaatatagtagggcatcatcacatatccatgtatacaaaagatgcaaaacgtaataaggatttttacacaaatgtccttggattacgattggttgaaaagtcggttaatcaagacaatccttcaatgtatcatttgttttatggggacgaagtaggtacagccggaacaattttaagcttttttgaaattcccaatgcgggtcataagcagccaggtactgaaacgatttatcgattttcattattagtaccaaatcaagcggcacttcattattttgaaaaacgtcttgagaataatggtattaagtctgaacgtttgtactatcttggacgagaaggtgttgtctttaaagatgaagacgacttagaaatcatactgcttgttaatgatagttttgaagtaccacatcaatggcaacataacgcttatagtgaaatacctctagcatatcaaattttaggaatagggccagtagaattaagagttagaaatgcagcgcgtacggtagaatttttggaaaatgtcttaggttatcgcaaaagagataatgaatcattcgatgtgctgacattagcaccacaaggtttatattcggattttgtagttattgagcaacagggacaacgtgaaagacctggacgaggttatatccatcatattgcagttaatacaccacaaatgaatgacttagatgcaatttacaagaaattacagcaacaaccacaaagtaattcaggtataattgatcgctatttctttaaatcattatactatcgccataattcaattatgtatgaatttgcgactgaagcgcctggatttactattgatacacctgttgaacaattaggaagtcaattgaacttgcctgactttttagaagcaaaacgtgaacaaattgaaagtaagttacacgaaatataa

SEQ ID NO: 417488 - DNA, 1359 bp, Staphylococcus aureus; identical to SEQ ID NO: 408795

SEQ ID NO: 417489 - DNA, 306 bp, Staphylococcus aureus; identical to SEQ ID NO: 407657

SEQ ID NO: 417490 - DNA, 1356 bp, Staphylococcus aureus
atgaaagacgaacaattatattattttgagaaatcgccagtatttaaagcgatgatgcatttctcattgccaatgatgatagggactttattaagcgttatttatggcatattaaatatttactttataggatttttagaagatagccacatgatttctgctatctcactaacactgccagtatttgctatcttaatggggttgggtaatttatttggcgttggtgcaggaacttatatttcacgtttattaggtgcgaaagactatagtaagagtaaatttgtaagtagtttctctatttatggtggtattgcactaggacttatcgtgattttagttgctttaccattcagtgatcaaatcgcagcaattttaggagcgagaggtgaaacgttagctttaacaagtaattatttgaaagtaatgtttttaagtgcaccttttgtaattttgttcttcatattagaacaatttgcacgtgcaattggggcaccaatgatttctatgattggtatgttagctagtgtaggcttaaatattattttagatccaattttaatttttggttttgatttaaacgttgttggtgcagctttgggtactgcaatcagtaatgttgctgctgctctgttctttatcgtttattttatgaaaaatagtgacgttgtgtcagttaatattaaacttgcgaaacctaataaagaaatgctttctgaaatctttaaaataggtattcctgcatttttaatgagtatcttaatgggattcacaggattagttttaaatttatttttagcacattatggaaacttcgcgattgcaagttatggtatctcatttagacttgtgcaatttccagaacttattatcatgggattatgtgaaggtgttgtaccactaattgcatataactttatggcaaataaaggccgtatgaaagacgttatcaaagcagttatcatgtctatcggtgttatctttattgtatgtatgattgctgtatttacaattggacatcatatggtcggactatttactactgatcaagccattgttgagatggcgacatttattttgaaagtaacaatgacatcattattattaaatggtataggtttcttgtttactggtatgcttcaagcaactggtcaaggtcgcggtgctacaattatggccattttacaaggtgcgattatcattcctgtattatttattatgaatgctttgtttggactcacaggtgtcatttggtcattattaattgctgagtcactttgtgctttggcagcaatgttaatcgtctatttattacgtgatcgtttgacagttgatacatctgaattaatagaaggttaa

SEQ ID NO: 417491 - DNA, 420 bp, Staphylococcus aureus
atggaattcacttattcgtatttatttagaatgattagtcatgagatgaaacaaaaggctgatcaaaagttagagcaatttgatattacaaatgagcaaggtcatacgttaggttatctttatgcacatcaacaagatgggctgacacaaaatgatattgctaaagcattacaacgaacaggtccaactgtcagtaatttattaaggaaccttgaacgtaaaaagctgatctatcgctatgtcgatgcacaggatacgagaagaaagaatataggactgactacctctgggattaaacttgtagaagcattcacttcgatatttgatgaaatggagcaaacactcgtatcacagttatctgaagaagaaaacgaacaaatgaaagcaaacttaacgaaaatgttatctagtttacaataa

SEQ ID NO: 417492 - DNA, 1956 bp, Staphylococcus aureus; identical to SEQ ID NO: 407658

SEQ ID NO: 417493 - DNA, 444 bp, Staphylococcus aureus
gtggcattagacattttgaccacaacacgcatcattgtaaaagaacaagtcaatagttggcatgaagccattactgtagcttcgcaacctttattacaagaacaagttattgaacaaggttatgttgaagcaatgattgaaagtgtaaatgaattaggaccatacatcgttatcgcacctgaaattgcaattgcacatgcacgccccaataataacgtgcatcaagttggattaagtctattaaagttgaatcaacacgtggcgttttgcgatgaagatcattacgcatctctcatattcgtattaagtgccatcgacaatcattcacacttatctatattgcaaaatttagcaacaatattgggcgataatcaaacagtacaacaattattaaatgcaaaaaatgcacaagaaattaccactattttaaaggagcatgattaa

SEQ ID NO: 417494 - DNA, 285 bp, Staphylococcus aureus
atgaaaattttagtagtatgtggccacagcttaggtagtagttttatagtagaaatgaacgcacaagaagcgcttaggcaacttaatgcaccatctgatatagaagttgagcatagtgacattatgacagcaagtccagagatggctgacttgtttatttgtggtagagatttagctgaaaatgccgaacgtctaggggacgtcttagttcttgataatattttagacaaagctgaattacaacaaaagctcgcagaaaaattacaacaacttaacatgatttaa

SEQ ID NO: 417495 - DNA, 1344 bp, Staphylococcus aureus
atgcaagcaatccttaattttatagtcgatattttaagtcaaccagccattcttgttgcactgattgcctttataggtttaatcgttcagaaaaaacctgccgcaacaatcacttcaggaaccattaaaacgatattaggcttcttaattttaagtgcaggtgctgatgtcgtcgttcgatctcttgagccattcggtaaaatattccaacacgcattcggtgtgcaaggtatcgtacctaataacgaagctatcgtctcactagccttaaaagattttggaacaacagctgcactcatcatggtctgtggcatgattgttaatattttaattgcccgcttcactaatttaaaatatatctttttaacaggtcatcatacattttacatggctgcgtttttagcaatcattttaacagtcagtcatattaaaggctggctaacgattgttatcggcgcactcgtattaggattaatcatggcagtcttacctgcactactccaacctacgatgcgtaaaattactggcaataatcaagtagcattagggcatttcggttcaatcagttactttgccgcaggtgctgtaggtcaattattcaaaggtaagtctaaatcaacggaagagattaaatttccaaaaggattaagtttcttacgagaaagtacaattagtatctcgattacgatggcattactttacttcatcgcatgcttatttgcgggcgttagttatgtacacgaatctattagtgatggtcaaaactttattgtattttcattaattcaaggcgtgacatttgctgctggtgtatttattattttaacgggcgttcgcttaatcttagctgaaatcgtcccagcatttaaaggtatctctgaaaaacttgtaccaaattctaaacctgcattagactgccctattgtgttcccttatgcacaaaatgcagtactaattggattctttgtcagctttattacaggtgtcatcggtatgtttatcttattcttatttggtggcgtcgtcattttacctggcgtagttgcacacttcttcttaggtgcaacggctgctgtattcggtaatgcaagaggcggtattaaaggtgctgttgctggcgccgctctaaatggtatcctaataacgtttttaccattattattcttgccatttttaggcgaattaggtggtgctgcaacaacattctcagatacagactttttagctgtcggtatcgtgttcggtaacgcagtaaagtatatgggattattgggtgctgttctatttattatcatcgtaggagctacagcgattttattaaaaggtcgtcaaaaagcacaataa

SEQ ID NO: 417496 - DNA, 1023 bp, Staphylococcus aureus
atgtacttaatagaaccaattagaaatggagaatatattactgatggtgcgattgcactcgccatgcaagtttatgttaatcagaatatctttttagatgaagatattttattcccttattattgtgatccaaaagtggaaattggacgttttcaaaatactgctatagaagtgaatcaagattatatagataaacacagtattaaagtagttcgccgagatactggtggtggcgctgtgtatgttgataaaggtgccgttaatatgtgttgtattttagaacaagacacttcaatttatggtgattttcaacgattttatcaaccagctataaaggcgttgcatacattaggtgcaacagatgtgatacaaagcggtagaaatgatttaacattgaatggtaaaaaagtgtcaggcgccgcaatgacattaatgaacaatcgtatttatggcggttattcgctattacttgatgttaattatgaagcaatggataaagtgttaaagcctaatcgcaaaaagattgcatcgaaagggattaaatctgtgcgtgcacgtgttggtcatcttagaggagcactggatgaaaagtatcgggatataacaattgaagcattcaaaaatttaatggtgacacagattttgggaatcaatgacattaaagaggcaaaacgatatgaattaacggatgcagattgggaagcgattgatgaattagctgataaaaagtataaaaattgggattggaattatggcaagtcacctaaatatgaatacaatcgaagtgaaagattatcatcaggtactgtagacataacaatttctgttgaacaaaatcgtatcgcagattgtcgcattcatggcgatttctttggacaaggtgatataaaagatgtggaacaagcattacaaggaacaaaaatgacaagagaagatttaacgcatcagttaaagcaattagacatcgtttattattttggcaatgttacggttgaatcattggttgagatgattttaagttaa

SEQ ID NO: 417497 - DNA, 945 bp, Staphylococcus aureus
atgcagagtagtaaatggaatgcaatgtctcttttaatggatgacaagacaaagcaggctgaagtattacgtactgcaattgaggaagcggaggcaatagtgattggaattggtgcaggcatgtctgcatcggacggctttacatatgttggggaacgctttacaaaaaatttccctgactttattgaaaagtatcgtttctttgatatgttgcaagcaagtttgcatccgtacggaagttggcaagaatattgggcatttgagagtcgctttatcaaattaaactatttagatcaacctgtaggtcagtcttacctcgctttaaaagcactaatgaaagataaaaaatatcacatcataactacaaatgcagataatgcttttgaggttgctgattatgatatgactcatgtatttcatatacaaggagagtatattttgcagcaatgtagtcagcattgccacgcgcaaacatatcgtaatgatgacttaattcgtgaaatggtcatggcacaacaagacatgcgtattccttgggatatgattccaagatgtccaaaatgtgatgctccaatggaagttaataaacgtaaagcagaagttggcatggttgaagatgcagattttcaggcacaattgcaacgttataatacatttctagagcaacatcaagatgataaagtattgtatttggaaattggaattggctatacaacagcacagtttgtgaaacatccgtttcagcgtatgacgcgtaaaaatgaaaatgcactttatatgaccatgaataaaaaagcatatcgcattccgaattcaattcaagaacgtaccatacatttgactgatgatatctcaacattgattacagcagcactccggaacgacagcacaacgaaaaataacaacattggagagacggaagatgtacttaatagaaccaattag

SEQ ID NO: 417498 - DNA, 801 bp, Staphylococcus aureus
atgaagacgttgaagacaaatgaagaacgattagaatatttaatcgattatatgtggcgtgagcgaaatgacaatgatgaattagagatgccaacatcatttgaagcattgtgggaattgtatcgaggtttagctaatgtaagaccagccttacctgttagtgagacatatctagccgttcaagatgcgttgttaagtgatttgaaccgccaacatgttatggatgtaaatgatttgaagccgataaaaggggacaatatctttgtttggcaaggtgatattaccacattgaagattgatgcgattgtaaacgcggcgaatagtcgctttttagggtgtatgcaagcaaatcatgattgtattgataatatcattcatacaaaagcgggtgtccaagttcgactagattgtgcagatattattcgacagcaaggtcgcaaagaaagtgttggtaacgctaaaatgacgcgcgcatacaatttgcctgcaaagtatattgtgcatacggtaggacctcaaatacgccgattgcctgtttcaaagatgaatcaggacttgttagttaaatgctatttgagttgtcttaaattggctgatcaacaaagtttaaatcatatagcattttgttgtatttcaacaggtgtatttgcttttcctcaagatgaagcagcagaaattgctgttcgaacagtagaaagctatctcaaagaaacaaattcaacattgaaagtcgtgttcaatgtatttacagataaggatttacaactgtataaggaggcatttaaccgtgatgcagagtag

SEQ ID NO: 417499 - DNA, 333 bp, Staphylococcus aureus
atgaaaaagttagccaattatttatgggtagaaaaagtaggagatttgtatgtgtttagtatgacacctgaattgcaagatgatattggtacagtaggttatgttgaattcgtgagtccagatgaagttaaagtggatgatgaaattgtgagtattgaagcatcgaaaacggtgattgatgtacagacgcctttgtcaggaacgattgttgagcgtaatacgaaagcggaagatgaaccaaatattttaaattctgaaaagccagaagaaaattggttgttcaagttggatgatgtggataaagaagcgttcaatgcattaccggaggcgtaa

SEQ ID NO: 417500 - DNA, 1002 bp, Staphylococcus aureus
ttggttaaattaagcgtattagactatgccttaatagatgaaggtaaggatgcacaaaaggcattgcaagattcagtgacacttgcaaaattagcagatcgacttggctttaagcgaatttggtttacggaacatcataatgtaccagcgtttgcgtgtagtagtccagaactgatgatgatgcatgttttgtcacagacatcacaaattcgtgttggttctggtggtgtgatgttgccgcactatcgaccttataaaattgctgagcattttagaatgatggcagcgttatatccaaatcgtattgatttaggtattggcaataatccgggtactactatggtaaagcaagctttagatggaatagatcctacatatgatagttatgatgaatcgatttcgttattacgtgattatcttacaataaaggataaaccaagtgcgcatacgttaggtgtccaaccacacattggtcattttccagaaatgtggttattaagtagtagtccatcctctgccaaaatagctgccgaacaaggtatagggctatcagttggaacatttttactgccagatataaatgcgatacatgcagcgaaggataacattgatatttacaaaaaacatttccaagtatcaacgattaaaatggacgcaaaggtgatggcatctgtatttgtcattgtagctgataacgaagcggaagtagcagcattacaacatgccttagatgtttggttattaggtaaattacaatttgcagaatttgaacattttccatcggtagacacagcgcaaaagtataagcttaatgatcgagacaaagagatgattcaagcacatcaagcacgtatcattgcaggtacacaagaacaggttaaagcgcaattagatgatttcattgctacgtttgaagttgatgaggtgttagtagcaccgcttattccaggcattgaacagcgttgtaaaacattaaaattactcgcggaaatctatttgtag

SEQ ID NO: 417501 - DNA, 1215 bp, Staphylococcus aureus
atgtaccgatacaaaccacttttacaatcaatccacttacctaatggcatcaaaatttcgaatcgctttgtattatcaccaatgaccgtaaacgcatcaacaaaagaaggctatattacaaaagcagacttggcttatgctgcacgtcgctctaattcagctggaatgcaagtcaccggcgctgcttacattgaaccttatgggcaattgtttgaatatggctttaatattgatcatgatgcttgtatccctggattaactaacatggcatctacgatgaaacaacatggtaacctcgctattattcagctagcgcatgctggtcgtttttcaaatcaagcaattttacattttggaaaggtgtatggaccaagccctatgacgttgcattcaccgattgaacacgatgttatcgccatgtctcatgagaaaatcaatagcatcattcagcagtatcgcgatgctacattacgcgcgattaaagcaggttttgatggtgtggaaatttcgattgcacaacgtttgctgattcaaacatttttctcaactttttcgaataaacgtacagaccattacggtgccgactcattaaaaaatcgtgcaagattatgtttagaagttatgcgtgcggtacaagaagtgattgataaagaagcacctgacaattttattttaggatttcgagcaacgccagaagaaaccagaggtagtgatttaggatataccattgacgagttcaatcaattaatcgattgggtcatggacgtttcaaacatccaatatttagcaatcgctagctggggtcgacatatttatcaaaatacgtcgcgtacaccaggtgaacatttcggtcggccagttaaccaaattgtctatgaacatttagcaggtcgcatccctttaattgcaagtggcgggattaattctccagagtctgctttagatgctttacaacatgcagatatggttggcatgtcttcgccttttgtcacagaacctgactttgtgcataaacttgctgaacagcgaccacatgatatcaatcttgaattttctatggaagatttagaaaatttagccattccgcgtgccgcttttaaagatattgttaaaatgatggattatggggaaggtctaaagaaacatacccgtgacgctttacgtcaattagaacagaattatcatgacacaccatcaaaagataatttttcatag

SEQ ID NO: 417502 - DNA, 828 bp, Staphylococcus aureus
gtgactgaaattaaagataaagtaattactaaagatgcatttgaattaccctacacaattattaaagcgaagcatcaaccaacaaaaggtgccattgtctacattcatggtggcggtttaatgtttggaaaggccaatgatttatcgccacagtatatcgatatccttacggaacattacgatttaattcaactaagttatcgtttattaccagaagtaagccttgattgcatcatcgatgacatcttcacatcattcgatgcgattcaatcacaatattctaattgccctatttttacctttggcagatcatcaggtgcatatttaagtctattaattgcacgagacagagatattgatggtgttattgatttttatggttatagtggcatcaacactgaaccgtttaaaatggcaaatagctattacgctaaaacagctcaaagtgtgaatgaaacagtacttgctcaacttacttcaccaacaccgattattcaagatcaaatcgcccaacgttttttaatctacggttatgcacgtggtacaggtgagtggatcaatatgattaacattgctgattatactgattcaaaatacaacatctcaccaaatgaacttaaagcacttccacctgttttcattgcgcattgtaatggcgattatgatgtccctgttgaggaaagcgaacatatcatgaaccatgttccacattcaacatttgaacgcgtgaataaaagcgagcatgattttgatcgtagacctaatgacgaagcaatcactatttatcgtaaagttgttgatttcttaaacgctataacaacggcgtaa

SEQ ID NO: 417503 - DNA, 2076 bp, Staphylococcus aureus
atgttaagaggacaagaagaaagaaagtatagtattagaaagtattcaataggcgtggtgtcagtgttagcagctacaatgtttgttgtgtcatcacatgaagcacaagcctcggaaaaaacaccaacgtctaatgcagcggcacaaaaagaaacactaaatcaatcgggagaacaagggaatgcgataacgtcacatcaaatgcagtcaggaaagcaattagacgatatgcataaaaagaatgataaaagtggaacagtgacagaaggtaaagatacgcttcaatcatcgaagcatcaatcaacacaaaatagtaaaacaatcagaacgcaaaatgatgatcaagtaaagcaagattctgaacgacaaggttctaaacagtcacaccaaaataatgcgactaacaaaactgaacgccaaaatgatcaggttctaaatacccatcatgctgaacgtaatggatcacaatcgacaacgtcacaatcgaatgatgttgataaatcacaaccatccattccggcacaaaaggtaataacaaatcatgataaagcagcaacaacttcaacaacacccccatctaatgataaaactgcacctaaatcaacaaaagcacaagatgcatccacggataaacatccaaatcaacaagacacccatcaacccgcgcatcaaatcatagatgcaaagcaagatgataatgttcatcaaagtgagcaaaaaccacaagttggcgatttaagtaaacatatcgatggtcaaaattccccagagaaaccgacagataaaaatactgataataaacaactaatcaaagatgcgcttcaagcgcctaaaacacgttcgactacaaatgcagcagcagatgctaaaaagattcgaccacttaaagcgaatcaagtacaaccacttaacaaatatcctgttgtttttgtacatggatttttaggattagtaggcgataatgcacctgctttatatccaaattattggggtggaaataaatttaaagttatcgaagaattgagaaagcaaggatataatgtacatcaagcaagtgtaagtgcatttggtagcaactatgatcgtgctgtagaactttattattacatcaaaggtggtcgcgtagattatggcgcagcacatgcagctaaatacggacatgagcgctatggtaagacatataaaggaatcatgcctaattgggaacctggtaaaaaggtacatcttgtagggcatagtatgggtggtcaaacaattcgtttaatggaagagtttttaagaaatggtaacaaagaagaaattgcctatcatcaagcgcatggtggagaaatatcaccattattcactggtggtcataacaatatggttgcatcaatcacaacattagcaacaccacataatggttcacaagcagctgataagtttggaaatacagaagctgttagaaaaatcatgttcgctttaaatcgatttatgggtaacaagtattcgaatatcgatttaggattaacacaatgggggtttaaacaattaccaaatgagagttacattgactatataaaacgcgttagtaaaagcaaaatttggacatcagacgacaatgctgcctatgatttaacgttagatggctctgcaaaattgaacaacatgacgagtatgaatcctaatattacgtatacgacttatacaggtgtgtcttcacatactggtccattaggttatgaaaatcctgatttaggtacatttttcttaatggatacaacgagtagaattattggtcatgatgcaagagaagaatggcgtaaaaatgatggtgtcgtaccagtgatttcgtcattacatccgtccaatcaaccatttgttaatgttacgaataatgaacctgccacacgaagaggtatctggcaagttaaaccaattttacaagggtgggatcatgtcgattttatcggtgtggacttcctggatttcaaacgtaaaggttcagaactcgccaacttctatataggtattataaatgacttgttgagtgttgaagcaactgaaggtaaaggtacacaattgaaagcaagttaa

SEQ ID NO: 417504 - DNA, 1362 bp, Staphylococcus aureus; identical to SEQ ID NO: 407659

SEQ ID NO: 417505 - DNA, 669 bp, Staphylococcus aureus
atgttaccacatggattaatagtatcttgtcaggcactaccagatgaaccattacattcatcttttattatgtcgaaaatggcattagctgcgtatgaaggtggtgctgttggtattcgcgcaaatactaaggaagacattttagcaattaaagaaacggttgatttaccagttattggcattgtgaaacgtgactatgatcactcagatgttttcattactgcaacgtcaaaagaagttgatgaactgatagaaagccaatgtgaagtcattgcattggatgcaacgttacagcaacgtccgaaagaaacgttagacgaattagtgacatatattagatcacatgcacctaacgttgaaatcatggctgatatcgcgaccgttgaagaagctaaaaatgcggcacgacttggctttgattatattggcacgacgttacatggttatactagttatacgcaaggacaattactttatcaaaatgacttccaatttctaaaagatgtactacaaagtgttgatgcaaaagttattgcggaaggtaatgtcattacaccggatatgtataaacgcgtgatggacttaggcgttcattgttcggtcgttggtggtgcgataacacgaccaaaagaaattacgaaacgttttgttcaagttatggaagattaa

SEQ ID NO: 417506 - DNA, 801 bp, Staphylococcus aureus
atgaaatttgagaatcgtgttcaacgttatcaacatttatttacaaaaactgataaacgcatcgtcaattatataagacaaaatggttatagcgatgccttttcaacgattaactccttagcccatgcgattggtacatcaccagcaacgatgacacgctttagtcataagctggattatgagaatttccaagatttaaaatttaatatccaacaagaaatgacagagacagttattgaaaatagcccaatcattcaaagaattcataaatatcatcaacaaatcattcaacaaactggcgaatttattgataacgacattatccaaacctttatcgacaaacttcaatcaagtcgacatatactctttgctggactaggtagctctggtttatcagcgactgaattttattatcgtatgattcgtatggggctaaaaggtaatgttactaccgattcacatttaatgaaaatatcggcatccctactatctcaatcggatatgtttattgctatgtcaaatagtggtaatacttcagaattaatttcagcagcggaagtcgccaaatctcatggtgcatatgtcgttgccatcacaaatttcgaaggtagtaaacttacagattgtgcagatttagtacttttaacaacggatcaatcgcgtaataccgaccatcaatttatcaacacacaaattgcgacactctttttaatcgatattgtgagttatcatttattagaaaatacaaatctgagtcaaacttatcaacatactaaatctattatcctagacaacaaataa

SEQ ID NO: 417507 - DNA, 861 bp, Staphylococcus aureus; identical to SEQ ID NO: 407660

SEQ ID NO: 417508 - DNA, 882 bp, Staphylococcus aureus
atgaacaaagatttaaaaggtttatatgcagcgttactcgttccttttgatgaaaatggtcaagtaaatgaacaaggacttaaacaaattgctcaaaatgccattgaaactgaagaattagacggtctttatgtaaatggtagctcaggcgaaaactttttattaaatacagagcagaagaagcaagttttcaaggttgccaaagaggcagttggggataaggtgaaattgattgctcaagtaggttcgttagatttaaatgaagccattgaacttggaaaatatgccacagaactcggttatgatgcactttctgccgtaacaccattctactatccatttacttttgaagaaattagagattactatttcgatattatcgaagcaacacagaacaatatgattatttatgcaataccagatttaacaggtgtgaatatttctattgaacaattcagcgagctttttaatcacgaaaaaattgttggtgttaaatatacagcgccgaacttcttcctactcgaacgtattagaaaagcattcccagacaaattaatcttatctggctttgatgaaatgttagttcaagctacgatttctggtgtagatggtgcaattggttctacatataacgttaatggtcgccgcgctagaaaaatattcgacttagcacgacaaggtcaaattcaagaagcttaccaactacaacatgattcaaacgacattatcgaaacagtgttatcaatggggatttatccaacattgaaagaaatattacgtcaccgtggcattgatgcaggattaccgaaacgtccattcaaaccttttaacgaagcacatcgacaaacattagatcacctcattgcaaaatacgatttatag

SEQ ID NO: 417509 - DNA, 1533 bp, Staphylococcus aureus; identical to SEQ ID NO: 407661

SEQ ID NO: 417510 - DNA, 744 bp, Staphylococcus aureus
ttgtctagagcaaaattatatacaattgcgacatctggtatgagtgctgttagtatggcaatgttgggttcatatatgcagatgattgagcctaagttcgtagttacagcagtaatgttaaatatttttagtgcgcttatcatcgccagtgtaatcaatccctataaatctgatgatactgatgttgaaattaataacttaacgaaatccacagaaactaaaacattgaatggaaaaacaggaaaacctaagaaagttgcctttttccaaatgattggtgatagtgcgatggatgggtttaaaatcgctgttgtagtagccgtaatgttgttagcatttatttcattaatggaagcaattaatatcatgtttggtagtgttggtttgaactttaaacagcttattggctatgtgtttgcaccaatcgcattcttaatggggattccatggagcgaagctgttccagctggctctttaatggcgactaaattaattacaaatgagtttgtagcaatgcttgattttaaaaatgtcctgggtgatgtatctgctcgaacacaaggtatcatttcagtttacttagtaagcttcgctaattttggtacggttggtatcatcgtaggttcaattaaaggcattagtgatgaacaaggagagaaagttgcatcctttgcaatgagactgttacttggttcaactctagcttcaatcatttcaggatcaatcattggcctagtattgtaa

SEQ ID NO: 417511 - DNA, 438 bp, Staphylococcus aureus
atgaatattttattcgctatcacagggatagcatttgcactatttgttgcgtttttattcagttttgatcgtaaaaacatagacttcaaaaagacgttaataatgatatttattcaagtgttgattgtgttatttatgatgaacacaacgattggtttaacaatcttaactgcattaggttcattttttgaagggttaataaatgttagtaaagcaggtataaactttgtttttggagatatacaaaataaaaatggctttacattttttttaaatgtgttgctgccattagtgttcatttctgtattaataggcatttttaattatattaaggtattaccatttattatcaaatatgtaggtatcgctattaataaaataactagaatggggcgcttagaaagttactttgctatttcaacagcaatattcggttag

SEQ ID NO: 417512 - DNA, 924 bp, Staphylococcus aureus
atggcaaatttacaaaagtatattgagtattctcgagaagttcagcaagcacgggagaacaatcaaccgattgtagcattagaatcaacaattatatcgcatggtatgccgtacccacaaaatgttgaaatggcaacaacagtagagcaaattatcaggaataatggtgccattccagcaaccatagccattatagatggcaaaattaaaattggtttagaaagtgaagatttagaaatacttgcaactaataaagacgttgctaaagtgtctagaagggatttagcagaaattgttgcgatgaagcgtattggtgctactactgtagcgacgacgatgatatgtgctgcaatggctggtattcaattttttgttactggaggtattggtggtgtccataaaggtgcagaacatacgatggacatttcagcagacttagaagaattgtctaaaacaaatgtcactgttatctgtgcaggtgccaaatcaattttagacttacctaagacaatggagtatttagaaacaaaaggcgttccagttattggatatcaaacgaatgaattgccagcattcttcactcgcgaaagcggtgttaagttaacaagttcggttgaaacgccagaacgacttgctgacattcatttaacaaaacagcagttaaatcttgaaggtggtattgttgttgctaatccaattccatatgagcatgccttatcaaaagcatatattgaggcaatcataaatgaagctgttgttgaagccgaaaatcaaggtattaaaggtaaggacgccacaccgttcttgttagggaaaattgtagaaaaaacgaatggtaaaagtttagcagcaaatataaaacttgttgaaaacaatgcggcgttgggtgctaaaattgctgtcgctgttaataaattgttgtag

SEQ ID NO: 417513 - DNA, 1119 bp, Staphylococcus aureus
atgagcgattctgagaaagaaattttaaaaagaattaaagataatccgtttatttcacaacgtgaacttgctgaggcaattggattatctagacccagcgtagcaaacattatttcaggattaatacaaaaggaatatgttatgggaaaggcatatgttttaaatgaagattatcctattgtttgtattggcgcagcgaatgtagatcgtaagttttatgtgcataaagatttagttgcagaaacatcaaatcctgtaacgtcaacacgttctattggtggcgtagcaagaaatattgctgagaacttaggtaggcttggcgaaacggtcgcttttttatctgctagtggacaagatagtgaatgggaaatgattaaacgattgtccacaccatttatgaatttggatcatgttcaacaatttgaaaatgcgagtacaggttcatatacagctttaattagtaaagaaggcgacatgacatatggcttagcagatatggaagtgtttgactacattacgcctgaatttttaattaagcgttcacacttattgaaaaaggctaagtgcattattgtcgatttgaatttaggcaaagaggcattaaacttcttatgtgcctataccacgaaacatcaaatcaaattagttatcaccacggtttcttccccaaaaatgaaaaatatgcctgattcattacatgctattgattggattatcacgaataaagatgaaacagaaacatacttaaatttaaaaatagaatctactgatgatttaaaaatagctgctaaacgctggaatgatttaggtgttaaaaatgttattgtgacaaatggcgtgaaagaactcatttatcgaagtggtgaggaagaaatcatcaagtcagttatgccatcaaatagtgtgaaagatgttacaggtgcaggtgattcattctgtgctgcagtagtgtatagctggttaaatgggatgtctactgaagatatattaattgctggtatggttaacgcaaagaaaacgatagaaacgaaatatacagttaggcaaaacctagatcaacagcaactttatcacgatatggaggattataaaaatggcaaatttacaaaagtatattga

SEQ ID NO: 417514 - DNA, 1032 bp, Staphylococcus aureus
atggatttattaataggtactttatttttatttttagtcttagtcatttttacattatttacatataaagcgcctaatggtatgcgtgctatgggcgcattggcaaatgcagcgattgcaacatttttagtggaagcatttaataaatatgttggtggcgaagtatttggtattaaatttttaggagagctaggggatgctgcgggaagtctaggtggtgtcgctgccgctggattaacagcattagctatcggtgtgtcaccagtatatgcattagttatagcagccgcgtgcggtggtatggatttattaccaggtttctttgcgggttatatgattggatatgtgatgaaatatacagagaaatatgtgccggatggtgtcgacttaattggatcgattgtcatcttagcgccattagctcgtcttattgcagtattattaacgccagtagtgaatagtacattgattagaattggtgatattatccaaagtagtacgaatacgaatccaattatcatgggtatcattttaggtggtattatcacggttgtcggcacagcgccattgagttcaatggcattgacagcattattaggtttaacgggtgtacctatggctattggtgccatggcagcatttagttcggcatttatgaatgggacgctattccatcgcttaaaattaggtgatcgtaagtctacgattgcagtaagtattgaacctttatcacaagcagatattgtatcagccaatccaattccaatctatattacaaatttctttggtggtgcgattgctggtttaattattgctatgtcaggtttaattaacgatgcgacaggtacagctacaccgattgcaggatttttagttatgtttggatttaatcatccgacgacaattgtgatttatggtgtagtaatggcgattgtaggtacgcttgcaggttatcttggttcaattgtatttaaaaaatatccaattgttactaagcaagacatgattaatcgaggtgcagtagacgcatag

SEQ ID NO: 417515 - DNA, 678 bp, Staphylococcus aureus
atgttgaaatttgaaaatgtaatgaagtcatttaaagatggtaatcgtacaattgaagcggttaaaaatacaaactttgaaataaataaaggtgatattgtagcattagttggaccttctgggtctggtaaaagtacatttttaactatggcaggtgctttacaaacgccgacatctggtaatattttaattaataatcaagatattacggaaatgaagcaaaaagcattagcgaaggtaagaatgtctgagatagggtttatattacaggcgaccaatcttgtgccatttttaacggtaaagcagcaatttaccttactgaaaaagaaaaataagaatgtcatgtcgaacgaggactatgagcaacttatgaagcaattagggttaaattctttactcaataaattaccgtcagaaatttcaggtggtcagaaacagcgtgttgcaattgcgaaagcattgtatacaaatccttctattatacttgcggatgaacccactgcatcgttagatactgaaaatgcaattgaggttattaaaattctgcgtgaccaagccaaacaaagagaaaaagcgtgtattatcgttacacatgatgaaaggcttaaggcatattgtgaccgttcgtatcatatgaaagatggcgttcttaatcttgaaaatgaaacagtagaataa

SEQ ID NO: 417516 - DNA, 351 bp, Staphylococcus aureus
atgatttcgttcttatttgtcatttcagcaacagtgattggtattttcctatatgtcatgacattacaaaagacgagtttatttggcatattaaaagctcaaggatttacgaatggctatttggcgaatgtggtaatttcgcagacggtcatattagcactattcggtacggcattgggattactattcacaggcattacaggtgcatttttacctgatgcagtaccggtcaaatttgatgtactaacattactcgtatttgcagttgtgttaatgattgtctccgtattaggaagtttattctccattttaacgattagaaaaatagatccgttaaaggcgattggatag

SEQ ID NO: 417517 - DNA, 687 bp, Staphylococcus aureus
atgtttttagcttggaatgaaatacggcgcaacaaattgaagtttggactgattattggtgtgttggcaatgataagttacttactttttctattgtcgggattagctaatggtttaattaatatgaataaagaaggtattgataagtggcatgcgaatgccattgtgttaaataaggatgctaatcaaactgtgcaacaatctatttttaataagaaagatattgaaaataaatacaagaaacaagctacattgaagcaaacaggggaaattgtttctaatggtcatcaaaaagacaatgtcttagtgttcggcgttgaaaagtcgtcgtttatagttccgagtctaatcgatgggcataaagcaactaaagataatgaagtgttagcagatgaaacacttaaaaataaagggtttaagattggtgacacattaacactatctcaatctgatgaaaaattgcatattgtaggttttacagaaagtgcaaagtataatgcatcaccagtcatttttacgaatgatgctaccatagctaaaattaatcctcgattaagtggcgataaaatcaatgcagttgttgtacgtgatgcaaattggaaagacaaaaaattaaatcaaaaacttgaagcagtaagtattaatgactttattgaaaatttacaggttacaaaccgcaaaacttaa

SEQ ID NO: 417518 - DNA, 891 bp, Staphylococcus aureus
atgaataaaatttcaaagtatattgcaatagcatcattatcggtagcggttacagtttcagcaccacaaacgacaaattctacagcgattgccaaaagttctgctgaagttcaacaaacgcaacaagcttcaatgccggcttcacaaaaagtgaatcttggaaatcagaatattatggcagtttcttggtaccaaaattcagctgaagcaaaagctttatatttgcaaggttataacagtgcgaaagttcaactagataaagaaattaaaaagaataaaggtaagcataaattagcaattgcattagatttagatgaaacagttttagataattctccgtatcaaggctatgcatcaatacataataaacctttcccagaaggttggcatgaatgggtacaagctgctaaagctaagcctgtttatggcgcaaaagaattcttgaaatatgctgatgaaaaaggtgtcgatatctactatatttctgatagagataaagagaaagatttaaaggcaacacaaaagaacttaaaacaacaaggtatccctcaagctaagaagagtcatattttactaaaaggtaaagatgataagagtaaagaatcacgcagacaaaaggttcaaaaagatcataaacttgtcatgctatttggagacaatttattagactttacagatccaaaagaagcaacagctgaatctcgtgaagctttaatcgaaaaacataaagatgattttggtaagaaatatattattttccctaacccaatgtatggtagttgggaagctacaatttataacaataactataaagctagtgataaaacaaaagataaattacgtaaaaattctattaaacaattcgatcctaaaacaggcgaagttaattaa

SEQ ID NO: 417519 - DNA, 1308 bp, Staphylococcus aureus
ttgaaaaaacaagttattatttcgggcctcatgttattttcactcttttttggagccggaaatttaatattcccgcccatgcttggccatacagcgggtcaaaatatgtggattggtatgctaggctttgcccttacaggcatattactcccatttattactgttattgttgttgcattttatgatgaaggtgttgaaagtgtaggtaatcgtatacacccatggttcggatttatttttgctgtcgtgatttacatgtctatcggagcattttacggtattccacgtgctgcaaatgtcgcgtacgaaattggtacaagacacattttacctgtgcataaccaatggactttaattatattcgcagcaatcttttttgccatcgtttactggattagtttaaatccatcgaaaatcgttgataatttaggtaaattattaacaccgttattactattaatggtcgctctattaagtattgctgtcattttcaaccctgaatctgcactaagtgcacctaaggataaatatataacacatcctttcatttcaggaagtttggaaggctattttacaatggaccttgttgctgcgttagctttttccgtagtcattgtcaatggctataagtttaaagggctcacagatcgcatgaaaattttaaaatatgtctgcttttcaggtcttattgcagccatattacttggaatgatttactttgcacttgcatacgttggggcatcaacagctccaggaaactttaaagatggtacagatatattgacgtacaactcattacgagtgtttggttcatttggcaacatagtatttggtatgacagtgatacttgcatgtttaacaacatgtataggactcgtcaatgcttgcgccacatttactaagaaacacgtacctaagttttcttataaaatattcgcacttattttctctatcatagggttcttatttacaacacttggtttagaaatgattttaaaaattgctgtcccattgctgacattaatatatcctgtatcaatcgcacttgtgctcatatcatttgctaacatgtttagcacattcagattcagttgggcatatcgactcgcaactattattacattgattatttcaattttacaaatactaaatagtttcaacttattacacggtgttattttgaaatggtttatgatgttacctttagcagatatcgatttagcttggcttgtaccattcatgctctttgctattatcggtttcataatcgatgtattgatacgccgcccgaaacaaacgacaacttaa

SEQ ID NO: 417520 - DNA, 825 bp, Staphylococcus aureus
gtgaaggagaaacatattaaatgggataagattttttatggggacgactgggtaaataacgtagtcgaaacaataagaacaaaagatatattacaaagcgtttatttaaaacgttatttattacgcgcgatgatggcaggatttattatcgggattattacggtcttcgtattatcagttaaagcaacacacgaaccagatttaccgccaggcattgtgaatatggccagtgccattacattcagctttgcgttagtactcattttatttacaaactccgaactactaaccagtaacttcatgtactttactgtaggcctgtattataaagtaattaaaccgactagagtattgaaaatatttttattgtgctttgcaggaaatattttaggtgctgctattttatttagtttcatgcgtttttcaaatgtaatgacgccagatatgttaaatcagttatcagcagttattgagcataaaacgttgtctactggttttgtaagtatattaatgaaagcgatattcgccaatttctttatcaatatttcattagttattgccatgcaaattgacgatgtactcgcaaaaatgtttgtcatgatgttcggagttaccatattcgcctttatgggttatgaacacgtagtttacaacagttgcttatttatgggaggcttaatttatcaagttgatacattgcacttcataccagctatttcgaatatcgctgcggcttttatcggcaactatattggaggcggactcattataggtttattctatgcttacttgaatgatcatcatcaattttataaaaataattaa

SEQ ID NO: 417521 - DNA, 399 bp, Staphylococcus aureus
atggaaaaatcgatcaaaataatgacaataataggtatttcagttcaaggtttagcaactatatttagtttactatttatggttttagcagcatcaggggcaatgactacagatgtgtcaacaacagttaatggtgaggttgacccagttgatgcagaaacagcagcagcaattttcactgtattattcttattcctattcatatttggaatcatttcaattattttaggtgcaatcggtatgtttaaagcatctaaaaacaaaaaaatgagtggtatattgttgattattggagctgtaataagtggtaacataattacatttgctttatggttagtcagtggtattaaactccttactaataacaagcctaaagatgaaataagcgacttatcataa

SEQ ID NO: 417522 - DNA, 375 bp, Staphylococcus aureus
atgaaaagaatattggtagtatttttaatgttagctattgtattagcaggttgttctaataaaggtgaaaagtatcaaaaagatattgataaagtgtacaaagaacagaatcaaatgaataaaattgcctcgaaagtacaaaacactattaaaacagacattaaacaagaagacagtaatacacatgtttataaagatggtaaagtcattgttattggtattcaattgtataaagatcgtgaaaaaatgtattatttcgcatatgaaataaaagatggtaaggcagagatcaatagagaaatagacccaattaagtatatgaaagaccataaagcagattatgaagatgaaaatgtagaagtggaaaaaaattaa

SEQ ID NO: 417523 - DNA, 576 bp, Staphylococcus aureus; identical to SEQ ID NO: 416974

SEQ ID NO: 417524 - DNA, 810 bp, Staphylococcus aureus
atgggtcgtgaccaaatgcctacagaagaagagcaatttgaagcttataaagaagtattagaagcaatgaacggtaaacgtgttgttgtacgtactttagatataggtggagataaagaattatcatacttaaacttgcctgaagaaatgaatccattcttaggttaccgtgcgattcgtttatgccttgcgcaacaagatattttcagaccacagctacgtgcattattacgtgcatcagtttatggtaagttaaatatcatgttcccaatggttgcaacaattaacgaatttagagaagctaaagctatattattagaagaaaaagaaaaccttaaaaatgaaggtcatgacatttcagatgatatagaattaggaatcatggtagagatacctgcaacagcagcattagctgatgtctttgctaaagaagtagatttcttcagtatcggtacaaatgatttaattcaatacacattagctgctgaccgtatgtcagagcgtgtatcatatctataccaaccatataacccttcaatcttacgcttagttaaacaagttattgaagcatcacataaagaaggtaaatggacaggtatgtgtggtgaaatggctggagatgaaacagctattccattattacttggtttaggtttagatgagttctctatgagtgcaacgtctattctgaaagcaagaagacaaattaatggtttaagtaaaaatgaaatgactgaacttgctaaccgtgcagtcgactgtgcaacgcaagaagaagttattgaattagttaacaactacgtaaaataa

SEQ ID NO: 417525 - DNA, 627 bp, Staphylococcus aureus; identical to SEQ ID NO: 409389

SEQ ID NO: 417526 - DNA, 306 bp, Staphylococcus aureus; identical to SEQ ID NO: 413146

SEQ ID NO: 417527 - DNA, 597 bp, Staphylococcus aureus
atgcaaaactaccaaaaatcattagatacgcttaaaaagcttctgagtgtcatgtatgaaattaaaactaaaaatgtaggtggatggtttcataaagagaagcaagaaacaggcaatattgtaattactaaaactgattttgaaaaatacactaaacaaattaaagcagcacagatgatattagatgattatgaatgtattaaaagtgggaagtcattaaaaaaagcagagaaacaaaatgaaagtttagttaatgaattgactagtgtccatatggaaaatgaaaagctggttgaagaatttaatgatttagcacaacgttataattatttgttgtcagagaatgaaaagaaagataaagaactaaattatacgcttaagttattcaatcaagtttttaaaatcattaaaagtatgatgaaagaagagcgttatcatacactaataaatcatattgataatcatttagacaattctaaaatacgtgaagtaatgacgatagataacaatgatgaacagttctttaagaagaaatatcaagcacaagaacgagaaatcatttttaaagaagatagagaagatggttatacattataa

SEQ ID NO: 417528 - DNA, 861 bp, Staphylococcus aureus; identical to SEQ ID NO: 408477

SEQ ID NO: 417529 - DNA, 342 bp, Staphylococcus aureus; identical to SEQ ID NO: 409374

SEQ ID NO: 417530 - DNA, 186 bp, Staphylococcus aureus; identical to SEQ ID NO: 409375

SEQ ID NO: 417531 - DNA, 744 bp, Staphylococcus aureus; identical to SEQ ID NO: 409376

SEQ ID NO: 417532 - DNA, 618 bp, Staphylococcus aureus; identical to SEQ ID NO: 409378

SEQ ID NO: 417533 - DNA, 735 bp, Staphylococcus aureus; identical to SEQ ID NO: 407375

SEQ ID NO: 417534 - DNA, 2115 bp, Staphylococcus aureus
  misc_feature (2101)..(2104): n is a, c, g, or t
ttgaaacgatcaacgaatcaagaaaaatttcttgatacactaattagacttaatactaagattgaagaactaggaaagataaatattttaaataatcatatatattccgaatatttttttagagacctgttaaatattgtatatgggtattcacttgagaatcataataaaaaacaaaaaaatgcaccagcatttgatcttatagataatacgaataaaattattattcaagttaccgcaacgtgtaaaaagcaaaaaatagaggacactctaaaaaaagagtatttaacaaataaaatggaagaaggttatcgattaaagtttatatttattggaaatcaaaataataatattaaaaataagaatttttcaaatccgcataatatattattcgatagtaaaaaagatattattttaactcaagacttatgcgaagagtttttgaatttaaacataaataagcaagatcacgctattgaattattaaaaaaagaattatctccgcttttatttgaagattctttgtcatatttaaaagaagaatttattaatgaaaaattagaatttaatatatcgaatttagcttcacgatatactgcgaataatgatgtcgatactattaataataaaattatagaaggtatttctattaccaataattttaaatatactaatatttcatatctaaaagaattaaaaggttatatcgaaaatgatattttagataagatgaaatcaaaatacgcaaagaatatttatttgaatttcaaaaaaatattctctaatttagaacaatcagtcaataattatttggaactggaagaagagtttgaagaaaagaaaaaatacttaagtgaaatttatgaattgatagacgaaattaatattgacccttatatttttctgacagaacataatgaatgtaatatatacaaaataagtgagaatgaaaaattagaacttcaaacttatatgagtaaaatcgaaaaagtattattaaaatatcaaacgtatttaaaagaaacatgtaaagaatgcttgttttatccttatttgctagttcaaggtgaagctggcataggaaaatcacaccttttagcgcatctatctaaaaaacttagagatgaaaatcatattatttatctgtttttgggacaattttttactaaaaatgaagatccatggcatcaaatacttaatgatttagaagttacaaattctgttgataattttttaaggtcaataagtaataaggccaaagaaacaaaaaaaagagcttttattattattgatgcgcttaatgaaggtgaaggtaaaaggttatggggaaattattttcaaagctttatcaaccatataaagaagtattctaatatagctttaatattttctattagaaccccttttgaagatgttatattacccaaaaacgcaatacaagataacaatattgtagtatttcagcatgaaggttttagtaaggaagaaaactataatccaattgtatctttttgtgatttttatggattagagctacctaagttacctatattaaatccagaattcaacaatccattatttttaaaactaatgtgtgagtactgtgtaaataaatttaaggaatttgaccaaactataagtgttgcagagctatttacaaatgttcttaagacagtaaatattaatttatctaaggaagataaatttgattttgataaaaatattaatgttgtacaaaaagtaataaaaggattagttgaattaatgaacgactcagaatttaatcaactaaattatgaggaatcctatactgttgttaataatatagctaaagagtatgttcaaaagtcaaatagatttttagaagcgctaatagatgaaaatatattaattaaaaatactggctataaaggtgaaatgattatttatttttcgtatgagcgtatgggagattactttttatcagaataccttttagagaaatatagaaatgttgataaaagagatttagtaactaaattacagtcagatgaaaaagtgacaaggtattttcctgtctcttatacacatctgacgctgccgacgaagaggatagtgaagnnnnatttaatatag

SEQ ID NO: 417535 - DNA, 405 bp, Staphylococcus aureus; identical to SEQ ID NO: 408138

SEQ ID NO: 417536 - DNA, 138 bp, Staphylococcus aureus; identical to SEQ ID NO: 412851

SEQ ID NO: 417537 - DNA, 258 bp, Staphylococcus aureus; identical to SEQ ID NO: 405387

SEQ ID NO: 417538 - DNA, 129 bp, Staphylococcus aureus
atgttccagcctgctttcctaatttttaatgtcatcttaaatatgataaatgaaaaattaagttcatatttaatgtcaaaacatagtagtttatcaagtattgagttagtaacattagatttaatgtaa

SEQ ID NO: 417539 - DNA, 1008 bp, Staphylococcus aureus
atgacaagtagtgaatcagtattaactcaatttatacttatgcttataacttttatagtattgttttatatttgccacgttatgataaagggaaaatttccatttactaaaatatctaaaacctatactaatcttaagtctgtaatccgatatggtttaagatctgttcttctcatattatttgcaattatagttacagcaattagctaccatttatttaaactatcgcttccaaatttatctgattttaaaaatgatgaggtaggaaccctttttataatgatatttgcaataatgattacaagtttgaattggaatgcattgctatcatttggcaagtttttagaagaattaacgttatattttagtttaaagaaaaataacattaaaaataatttacatcatgccctagctaacagagatgaacaagcgattattgaaaatcacaaattaataagtcaggcagacactaaaattaatctttcaaatgatgaaatacttgttttaacagctactttgtcaaaaaaaggttatcatgaagatgtaaaaaaaatattagaccaatatctatacaaaaaacaatcattcctaagtaagattttaatgagtaatccgaatgctactgaacatagtgttgaaggcctagatagatcttttaggccgagtgaatcgtttaaacataaattaagaagctatgagaaaatagctataaatatatctaaacttcttatagttgtatttgtaattcaagttgtttttctaatgttttgtagtatgtttaatatatcaagcgctattagttcaatagttccaatattcataaatttacttgtaattgtctttattatcatgaagcatgtgaaactaaaaaaaatatatataaaggaaatagtatttaacaatttatctaccagcaaagtgaaaattagaagaccttttatagataatatattattaggaatatcattatgtatgttatttattaatatctttgagttacttatatga

SEQ ID NO: 417540 - DNA, 714 bp, Staphylococcus aureus
atgaagaatgttataagatcagtaaacacattattacaaagcaatatacaagtatcaacgatttctaaggaaacaggtattagtaaagctcacataactaatttgaaaaatggaactaaaagtatttccaatgcttcatttgatacggtagaaaaattgtacctttattatttagataaaaaagactatttagaagctagtaaaaatatagatcaatcaataattgatactaaaattcctagagatatacaacattttatttcaaatttaaaacaaagcatagacaatataaataatcctgatagtagtgaaggaattgaaaaaataatgattgaacgattgtttaccatgtctaaagaaaaaagttcgaataacattatttcatatctattagttaaagaacttattccattaaaaataaagaatgaagttatttcgtatgaactagccttttcttcgccaattaagccaaaggaatatttagctgaaaaaatagaaggttttacgataacttttgcacaaaatgatttggaattaatgttaaaaagactaattcacaaaggtgctaaagttaaattgataaaatctaattttaattatagcgacagttataatacaggaatatatatagacacacaccaagatgaaatttttaaatatgaatcaagttttttagatataaccataaatcaaaatttaacagagggggaataa

SEQ ID NO: 417541 - DNA, 411 bp, Staphylococcus aureus
gtgttattgaatgtagataaaaattcaaaaaacgtatcgttaaaaaagattaggaataacgaattattgtatttaatgagttgttcgagtagtttacctggtgctgatagaactatttgtaatgtactaattgacgaaaatgaaaatattatacatgtttatgatgatttaaggcactgttcaacgtcaatattcaaagaattaaatcaaacacttattgtagaactcatgtcgcttctaggggtcgaatatggccaatataggatcatactttattatgcgccaataaagaaaaatccgtttatcagagaatatgatttattgaatgaaaagcttataactgttgatgtacaagatataagtgatttgttttacaatatggcattgaataatgaaaaattgaaaaattaa

SEQ ID NO: 417542 - DNA, 222 bp, Staphylococcus aureus
atgatagtaattgcaattgtaggaatatatataaaagcacaactgaaatatagaacaaatataattaatcaaatcaatgctgcaatgaaaaaactaaatttttcaaaacaagaaattgaagatagacaaacatatttaaatcatcaaaatgaagcaaaattagaagaaataaaaaagacattagaattagagttaaaagctatagatgataataatttttaa

SEQ ID NO: 417543 - DNA, 459 bp, Staphylococcus aureus
atgagtcaaatcgaatttaaaaacgtcagtaaagtctatcctaacggtcatgtaggcttgaaaaatattaacttaaatattgaaaaaggtgaatttgcagttattgtcggactatctggtgctgggaaatccacgttattaagatctgtaaatcgtttgcatgatatcacgtcaggtgaaattttcatccaaggtaaatcaatcactaaagcccatggtaaagcattattagaaatgcgccgaaatataggtatgattttccaacattttaatttagttaaacggtcaagtgtattacgaaatgtactaagtggacgtgtaggttatcaccctacttggaaaatggtattaggtttattcccaaaagaagacaaaattaaggcaatggatgcactagaacgcgtcaatatcttagataaatataatcaacgctctgatgaattatcaggtggccaataa

SEQ ID NO: 417544 - DNA, 501 bp, Staphylococcus aureus; identical to SEQ ID NO: 405188

SEQ ID NO: 417545 - DNA, 147 bp, Staphylococcus aureus; identical to SEQ ID NO: 407426

SEQ ID NO: 417546 - DNA, 357 bp, Staphylococcus aureus
  misc_feature (342)..(351): n is a, c, g, or t
atgccaagtagcttagaacaacttgatttattattgttggaaatacctaaatctagaaaagttcattcagatggcattcattttcaaggttttcgatacagtaatactaatctagaagcttatgtaggtgaatatgtactgattcgttataacccaaatgatatggctgaaatacgtgtgttttatagagatgaatttctttgtactgctatatgtccagaaatagctgattactccatagatataaaagacatacagcacgctcgtagtcagagaagaaaacacttaaaacaaaatattgctagtccaagtaccacggaattaattaaggaagaaaaaaannnnnnnnnntcgtaa

SEQ ID NO: 417547 - DNA, 300 bp, Staphylococcus aureus; identical to SEQ ID NO: 413147

SEQ ID NO: 417548 - DNA, 231 bp, Staphylococcus aureus; identical to SEQ ID NO: 410180

SEQ ID NO: 417549 - DNA, 210 bp, Staphylococcus aureus
atgcatttatctaagcaattagcaagacaaggccaacgtattaaagctggtcaactgatagggaaatcaggtgctacaggtaatttcgttagaggagcacacttacatttccaagtggttcaggtgttaataaggctgcatctgcttgggcaggcgatatacgtcgtgcagcaaaacgaatgggtgttaatgttacttcgggtgatgtag

SEQ ID NO: 417550 - DNA, 231 bp, Staphylococcus aureus; identical to SEQ ID NO: 410180

SEQ ID NO: 417551 - DNA, 192 bp, Staphylococcus aureus; identical to SEQ ID NO: 410719

SEQ ID NO: 417552 - DNA, 393 bp, Staphylococcus aureus; identical to SEQ ID NO: 410718

SEQ ID NO: 417553 - DNA, 294 bp, Staphylococcus aureus
gtgtatcgttatttcggtcaagaacgtaacaataccacttacaacttagcgcgtatgaatatgttattacatgatgtgcgctatgaaaattttgatatccgtaatgatgatacgttggaaattccagccttcttaggtactacatttgatgcggttattgcgaacccaccatacagtgcgaaatggacagcagattcaaaatttgaaaatgacgacgatttagtggttacggcaaacttgcgccaaaatccaaagcagactttgcctttattcaacacatggtacattacttag

SEQ ID NO: 417554 - DNA, 213 bp, Staphylococcus aureus
atgtctgaagaagttggcgcaaagcgttggtatgcagtgcatacatattctggatatgaaaataaagttaaaaagaatttagaaaaaagagtagaatctatgaatatgactgaacaaatctttagagtagtcataccggaagaagaagaaactcaagtaaaagatggcaaagctaaaacgactgttaaaaaacattccctggatatgttttag

SEQ ID NO: 417555 - DNA, 888 bp, Staphylococcus aureus
atgaaatttggtcaaagtattcgagaagaaggtccacaaagccatatgaagaagactggtacaccaacgatgggtggactaacatttctattaagtattgtgataacgtctttggtggctattatatttgtggatcaagctaatccaatcatactgttattatttgtgacgattggttttgggttaattggttttatagatgattatattattgttgttaaaaagaataaccaaggtttaacaagtaaacagaagtttttggcgcaaattggtattgcgattattttctttgttttaagtaatgtgtttcatttggtgaatttttctacgagcatacatattccatttacgaatgtagcaatcccactatcatttgcatatgttattttcattgttttttggcaagtaggtttttctaatgcggtaaatttaacagatggtttagatggattagcaactggactgtcaattatcggatttacaatgtatgccatcatgagctttgtgttaggagaaacggcaattggtattttctgtatcattatgttgtttgcacttttaggatttttaccatataacattaaccctgctaaagtgtttatgggagatacaggtagcttagctttaggtggtatatttgctacgatttcaatcatgcttaatcaggaattatcattaatttttataggtttagtattcgtaattgaaacattatctgttatgttacaagtcgctagctttaaattgactggaaagcgtatatttaaaatgagtccgattcatcatcattttgaattgataggatggagcgaatggaaagtagttacagtattttgggctgttggtctgatttcaggtttaatcggtttatggattggagtgcattaa

SEQ ID NO: 417556 - DNA, 564 bp, Staphylococcus aureus
atgatttcacacttgataatggctactacgaagaagaaacatcagatagtgactcagattcagacagcgactcagactcagatagcgactcagattcggacagcgactcagactcagatagcgactcagattcggacagcgattcagactcagacagcgactcagactcagacagtgattcagattcagacagcgattcagactcagatagcgactcagattcggacagcgattcagactcagatagcgactcagattcagacagcgactcagactcagacagtgattcagattcagacagcgactcagattcagatagcgactcagactcagacagtgattcagattcagacagcgattcagatacagatagcgattcagactcggatagcgactcagactcggatagcgattcagactcagatagcgattcagattcagacagcgactcagattcggacagcgattcagactcagatagcgactcagactcagaaagtgatgccgattcagatacagatagcgattcagatgcaggtaaacatactccggctaaaccaatga

SEQ ID NO: 417557 - DNA, 807 bp, Staphylococcus aureus
atgagagaaaattttaagttacgtaaaatgaaagtcggtttagtatctgttgcaattactatgttgtatataatgacaaacggacaagcagaagcatctgaaggtagccaaactgttaagaatccaaaggtaaatgcaactgaagaaatcaaagctgaatcgcaaccggttcaaaacaatcaagaagtaagttcggaccaaacaaaaaagaattttgttaatttagatcctattaaacctggagctcaaaaagtaacaggtactacattaccgaatcaattaatcttgttaagtattgataaaaaagacgtgagttcagttgatagtgaaggaagcgaatttataacatctaaagatgatggaacgtttgaatatcctctgaaaaacagaaaaattgtacataatcaagaaattgaagtgacttcatcatcaatggaaggattagaggaagaagacgaagagacagaagtagaagaacaagaaagcaatgatgctactcaaaaagttacaactcctcgatatgagaaagcgtataaaataccggaagatcgattaaataaagcaaatggacaccatcaagttttcattgaacctattacagaaggatcaggcattattaaaggtcatacgtctgtaaaaggtaaagttgctctatctattaataataaatttattaattttgaagaaagagctaaagatggaattagtaaagaagatactaaagctagttccgatggtatttggatgcctattaatgaaaaaggatattttgattttgatttcaaaaaaatccttttgataacttag

SEQ ID NO: 417558 - DNA, 612 bp, Staphylococcus aureus; identical to SEQ ID NO: 412261

SEQ ID NO: 417559 - DNA, 258 bp, Staphylococcus aureus
atgcctgacatgtcaggatggacgaaagaagatgtcattgcttttgaaaacctaacaaatattaaagtaaatttaaaaggtagcggttttgtgtcccaccaatcaattagtaagggacaaaaacttactgaaaaagataaaatagacgtagaattttcatcagagaatgtagacagcaattcgacgaataattctgattcaaattcagatgataagaagaaatctgacagtaaaactgacaaggataagtcggactaa

SEQ ID NO: 417560 - DNA, 165 bp, Staphylococcus aureus
gtgaaacctatgagtgctactaaagaccatcaaaataaagcaaaagcattaccagaaacaggtagtgaaaataacggctcaaataacgcaacgctatttggcggattattcgcagtattaggttcattattgttatttggtcgtcgtaaaaaacagaataaataa

SEQ ID NO: 417561 - DNA, 3420 bp, Staphylococcus aureus
atgattaacagggataacaaaaaggcaataacaaaaaagggtatgatttcgaatcgcttaaacaaattctcgattagaaagtatactgtaggaactgcatcgattttagtaggtacgacattgatttttggtctagggaaccaagaagctaaagctgctgaaaacactagtacagaaaatgctaagcaagatgaggcatcgactagtgataataaagaagtagtgtcagaaactgaaaataattcgacaacagaaaatacttcaacaaatccaattaagaaagaaacaaatactgattcacaaccagaaactaaagaagaatcaactacatcaagtactcaaaaacagcaaaataacgttacagctacaactgaaactaagcctcaaaacattgaaaaagaaaatgttaaaccttcaactgataaaactgcgacagaagatacatctgttattttagaagagaagaaagcaccaaataatacaaataacgatgtaactacaaaaccatctacaagtgaaattcaaacaaaaccaactacacctcaagaatctacaaatattgaaaattcacaaccgcaaccaacgccttcaaaagtagacaatcaagttacagatgcaactaatccaaaagaaccagtaaatgtgtcaaaagaagaacttaaaaataatcctgagaaattaaaagaattagttagaaatgatagcaatacagatcgttcaactaaaccagttgctacagctccaacaagtgttgcaccaaaacgtttaaacgctaaaatgcgctttgcagttgcacaaccagcagcagttgcttcaaacaatgttaatgatttaatcaaagtgacgaagcaaacaatcaaagttggcgatggtaaggatgatgtagttgctgcacatgatggcgaagaaattgaatatgactcagaatttacaattgataataaggtcaaagccggcgatacaatgacaattaattatgataagaatgtaattccttcggatttaacagataaaaatgatcctatcgatattactgatccatcaggagaggtcattgctaaaggaacatttgataaagcaactaagcaaatcacatatacatttacagactatgtagataaatatgaagatataaaatcacgcttaactctatattcgtatattgataaaaaaacagttccaaatgagacaagtttgaatttaacatttgctacagcaggtaaagaaacaagccaaaatgtcactgttgattatcaagatccaatggttcatggtgattcaaacattcaatctatctttacaaaattagatgaagataagcaaaatattgaacaacaaatttatgttaatcctttgaaaaaaacagcaactaacactaaagttgatatagctggtagtcaagtagatgattatggaaatattaaactaggaaatggtagcaccattattgaccaaaatacagaaataaaggtttataaagttaactctaatcaacaattgcctcaaagtaatagaatctatgattttagtcaatacgaagatgtaacaagtcaatttgataataaaaaatcatttagtaataatgtagcaacattggattttggtaatattgattcagcctatattattaaagtagttagtaaatatacacctacttctgatgatgagctagatattgctcaaggtgctagtatgagaacaactgataaaaataattattataattatgcaggatattcaaacttcatcgtaacttctactgacactggtggtggtgacggtactgttaaacctgaagaaaagttatataaaattggtgactatgtatgggaagacgttgataaagacggtgttcaaggtacagattcgaaagaaaagccaatggcaaacgttttagttacattaacttacccagacggtacaacaaaatcagtaagaacagatgctaacggtcattacgaattcggtggtttgaaagacggagaaacttatacagttaaattcgaaacgccagctggatatcttccaacaaaagaaaatggaacaactgatggtgaaaaagactcaaatggtagttctgtaactgttaaaattaatggtaaagatgatatgtctttagacactggtttttataaagaacctaaatataatcttggtgactatgtatgggaagatacaaataaagatggtattcaagatgctaatgagccaggtatcaaagatgttaaagttacgttaaaagatagtactggaaaaataattggtacaacaactacagatgcatcaggtaaatataaatttactgatttagataatggtaattatactgttgaattcgaaactccagctggttatacaccaacacttaaaaatactactgctgaagataaagattctaatggtttaacaacaacaggtgttattaaagatgcagataatatgacattagacagtggtttctataaaacaccaaaatacagtttaggtgattatgtttggtacgacagtaataaagacggcaaacaagattcaactgaaaaaggtatcaaagatgtgacagttacattgcaaaacgaaaaaggcgaagtaattggaacaactaaaacagatgaaaatggtaaatatcgtttcgataatttagatagcggtaaatataaagttatttttgaaaagcctgctggcttaacacaaacaggtacaaatacaactgaagatgataaagatgcagatggtggagaagtagatgtaacaattacagatcatgatgattttacaatagacaacggttacttcgaagaagatacatcagatagcgattcagattcagacagcgattcggactcagacagtgactcagatagcgactcagactcagatagcgactcagattcagacagtgattcagactcagatagcgactcagactcagatagcgactcagactcagacagtgactcagattcagatagcgactcagactcagacagtgactcagattcagatagcgattcagactcagatagcgactcagactcagacagtgactcagattcagatagcgattcagattcagacagcgattcggactcagatagcgattcagactcagatagcgattcagattcagacagcgattcggactcagatagcgactcagattcagatagcgactcagattcagatagtgattcagattcagacagcgactcagactcagatagcgactcagattcagatacaggaaaacatatacctgttaaaccaatgagtgctactaaagaccatgacaataaagcaaaagcattaccagaaacaggtagtgaaaataacggctcaaataacgcaacgttatttggtggattattcgcagcattaggttcattattgttattcggtcgtcgcaaaaaacaaaacaaataa

SEQ ID NO: 417562 - DNA, 222 bp, Staphylococcus aureus; identical to SEQ ID NO: 417259

SEQ ID NO: 417563 - DNA, 555 bp, Staphylococcus aureus
atggttcatgtcaaaccaagtatcaatgtcaatggttcagaaggtaatgcagatgttaagtacatttataaacaatatgatgttaatggctcagaagcatataaaactagattacaaaaagatattcacaaatatacgaatacgcctgatttaagtgatgagaatttcagtggagttcaatctggtgaatcaatgaaatataaattgtttggtttagagcaagtgagagctattaaagaacgtctgtttaaaaaaggtttaatgaaacgttataaactattattccatattcttaatttaactggtgtacataagtatgattattcaaccattgatattacttttactcctaatttacctaagtctttaaatgaatcaattgaagcttttaattcattaaatggtggagtatctgaacaaaccagattgaaattgctaccaattattgataatccatttgaagaaatcaagaaaatggaagatgaacagaataaggtaaaaaaattagtgataattcatcatttaaggcaccatttagccacgaaaatgaaatga

SEQ ID NO: 417564 - DNA, 177 bp, Staphylococcus aureus; identical to SEQ ID NO: 405358

SEQ ID NO: 417565 - DNA, 363 bp, Staphylococcus aureus
atgacttcatctactaatgttaaagctttaatcgaaaaaaataataataaaaaagggaagcataatgacaaaattataccagttattttagccgcaatttcagcgatttccattttaacaacactaggtatattaatcacattgcttttagaaaccatcacttttttcaccagaattccaataactgaatttctattttctactacttggaatcctaccggttcagaccctaagtttggtatctgggcattgataataggaactttaaaaatcacagttattgcgactatatttgcagttccagtcgggcttggtgcagcaatttatttaagtgaatatgcaaggaccgtgcacgacgcataa

SEQ ID NO: 417566 - DNA, 576 bp, Staphylococcus aureus
atgaatggggtgtatcatataatgaacaacgaatatccatatagtgcagacgaagttcttcacaaagcaaaatcatatttgtcagcagatgaatatgagtatgttttaaaaagctatcatattgcttatgaagcacataaaggtcagttccgaaaaaacggattaccatacattatgcatcctatacaagttgcaggtattttaacagaaatgcgattagacggaccgacgattgtcgcaggttttttgcatgatgtaattgaagatacaccgtatacatttgaagatgtaaaagaaatgttcaatgaagaagttgctcgaattgttgatggtgtgacgaagcttaaaaaagtaaaataccgatcaaaagaagaacaacaagctgaaaatcatcgcaagttatttattgcgattgccaaagatgtacgcgtaattttggtgaaattagcagacagattacataatatgcgtaccttgaaagccatgccgcgcgaaaaacaaattagaatttctcgagaaacattagaaatttatgcacctttagcacatcgtcttggtattaatacaatcaaatga

SEQ ID NO: 417567 - DNA, 639 bp, Staphylococcus aureus
atgataaatgatggggatagtttaagagacatgcttgatagtttaccaccagattatattagaaggcaaaagaaactaaatcaaaaagatttagaaaatttaaaacaacttttctcgaaactaagtgaagatgataagagtggaaaaccactggaagtttttgttagtaatttaatgaatagtattcaattacatgaaataaataacaatattagaacgagtacaaatgaaattgatttattcttaagaactaatgatattacaagagcattttatgaaaaaactttaccaattttaaaagaaaattttataatagaatgtaaacagtatcatgaaaagataaatgttacatgggttaataagttttattctttgttaagacaaggtgattataaaattggtataatatttagtttagaacccctaactgggaaaaatgaatgggatagttccaagggagtatgcagtaaagtagcattaaaagatgatatattcattctgaacttctataaaaaagacatagaagatatattaaatggtaaaaattttattgatattgttgaagaaaaattgatacaacttaaagaaaatataaaaataaagatattgtcgcatcaaaatgaaaaatatgtaaattaa

SEQ ID NO: 417568 - DNA, 363 bp, Staphylococcus aureus
ttgcaaaatttattgagaacaagtgtccaagagaataaaatttttcaatcattatcttcacaaacaaaatcaatactcttaaaaaaaataatgcgatataaaaaaaatgattacctgcaattttcaacttttgaggatactcatatatcaaagcaagaattttatattttgatgtctgatcttgaagataaaaagctagtttcaaaagttcttgaagtatactctccatacactaaaaatagtacagggttaattttagatgaaattatacattttaatgatacgttaatatgtgatgaaacagatgaagactttgaaatcacacctgataacgtaaaagttaaatataaggtgataatatga

SEQ ID NO: 417569 - DNA, 1002 bp, Staphylococcus aureus
atgaagacagttaaacatgatgataaaaacctatatcaattaagtgaagacaaagttaattctaatgataagagagagctgatagctaaagggttagaagaatataaagaagaagttgaaaaaattatatatgaatatgaatattcaaaaccatataaatattgttctatttttagaattatagatggtaacattgatgacggaattgataatttaaaagggaaagttagtgaacaagaaaatattaatttattggatgatggtctttgtactccaaaattatatgatttagaagaattagtaatactaaaatttaattatctttgtaaaggagctactattgtagatggagaagtagaaaaaatggaaggtatacttccactattaatagtaattcacaaaaataaaaatataatagaatttagggtgtctaaaattaactattttctaaaagggaatgacagtagattttatgaaaaaagaatagacgaaatgatagattgggttaatgatgaaacaatttttaatattgaagaaatagatgtgaaaaaaatcaatgagatagctaaaaagaataaaaattccgaagaaatcttaaaagatcaagaaaataatgaaattaaggtttatggtcaaaaaatggagttaaaggcagggtcaaatgctgttctagatgcagggatatctgaagatattgtattgccaatacttggtgatttaaaaatcttaattaatgaaaatgaagataaattcccaccaacacatcctttttataatatattaatgacttttatcgaagatacagaagaagaatcaacctatccttgggttcaattaatatggttgaataaagtaaaagcgaaacaattaattgttaagtttagatttgacgttttgacagaaagaggctattctatcattgaatttcataaaaataacgctgaaaataaggagatgatgaaagttgcaaaatttattgagaacaagtgtccaagagaataa

SEQ ID NO: 417570 - DNA, 555 bp, Staphylococcus aureus
atgagtgagttaacgcctaaacaagaacgttttgcgaatgagtatataaagacactcaacgttactcaaagcgctataaaggcaggatatagcccgaatagtgcacatgtaacaggtagtaggttattacgcaaagagaaagtggacgaatacattaaaagtaagaaagacgagattatggatgatactattttatcagccaaagaggtactgtatttattaactcaagcagcagttggcgacgaaactgaaacaaaggaagctgtagtaaagaaaggcacatttgaacgtaatccagacagtggaagaatgaacctcgtatataatgaacacgtggaaacagtagaggtacctattaagcctagtgatcgcatgaaagctcgtgatttactcggtagataccacagcttatttacagaaaaagtagacttaaatgtaacaacaccaatatttattgatagtattgatgaagatgatgagaagaatgaaagagatattgaaaatttaagtaaacaatatccgaatgcagaatttcatactgatgatattaggtag

SEQ ID NO: 417571 - DNA, 396 bp, Staphylococcus aureus
atgacagatgcattacaacaaaagattcatatcgaactactagatttattagatgatgttaagtttgaattaacagaattaaatgcacaaaaagggttatacattaacggaccagcaaatcagttacttaagcgtggcgtgcatatggcttatgttcaaggacaaaagcaagctatcgataatattatgactattgtggaacaacagcttgaagatcaacatttcctagaacattatgataaatttcaaaatgaggttgctcatcgcaattatgataaaacagctaactttgcagaacttagtgatattccacgtcaattcgataattttttagatcaattttatcaaattaaagggcaatactttatcatcacatatcaatacacttattggtga

SEQ ID NO: 417572 - DNA, 600 bp, Staphylococcus aureus
atgaattcacctctaaaatataatcctaaagaagcaagagcgcactgggacaaagctaaaaaagagttaggtaaaaatgaattgtcattttcgatgaacacagaagatacaccagatgcaaaaatatctgctgaatacatcaaatcacaagttgagaaaaatttaccaggagttactttgaaaattaagcaattgccgtttaaacaaagagtatcactagaactgagtaacaattttgaagcatcacttagtggttggtctgcagattaccctgatcctatggcttatttagaaacaatgaccacaggtagcgcacaaaataatacagactggggtaataaagaatacgatcaattacttaaagtagcgagaaccaaattggcacttcaaccgaacgaacgatatgaaaacttgaaaaaagcagaagaaatgttcctaggagatgcaccggtagcaccaatttatcaaaaaggtgttgcacatttaacaaatcctcaagtaaaaggattgatttaccataaatttggtccaaataactcacttaaacatgtatatattgataaatcgatagataaagaaacaggtaagaagaaaaaataa

SEQ ID NO: 417573 - DNA, 3786 bp, Staphylococcus aureus
gtgatacatgttttagattttaacgacaagattatagatttcctttctactgatgacccttccttagttagagcgattcataaacgtaatgttaatgacaattcagaaatgcttgaactgctcatatcatcagaaagagctgaaaagttccgtgaacgacatcgtgttattataagggattcaaacaaacaatggcgtgaatttattattaactgggttcaagatacgatggacggctacacagagatagaatgtatagcgtcttatcttgctgatataacaacagctaaaccgtatgcaccaggcaaatttgagaaaaagacaacttcagaagcattgaaagatgtgttgagcgatacaggttgggaagtttctgaacaaaccgaatacgatggcttacgtactacgtcatggacttcttatcaaactagatatgaagttttaaagcaattatgtacaacctataaaatggtattggatttttatatagagcttagttctaataccgtcaaaggtagatatgtggtactcaaaaagaaaaacagcttattcaaaggtaaagaaattgagtatggtaaagatttggttgggttaactaggaagattgatatgtcagaaatcaaaacagcattaattgctgtgggacccgaaaatgacaaaggaaagcgtttagagttagttgtgactgatgacgaagcacaaagtcaattcaacttacctacccgttatatttggggaatatacgaacctcaatcagatgatcaaaatatgaatgaaacacggttgcgttctttagccaaaacagagttaaataaacgtaagtcggcagttatgtcatatgagattacttctactgatttggaagttacgtatccgcacgagattatatcaattggtgatacagtcagagtaaaacatagagattttaacccgccattgtatgtagaggcagaagttattgccgaagaatataacataatttcagaaaatagcacatatacattcggtcaacctaaagagtttaaagaatcagaattacgagaagagtttaacaagcgattaaacctaatacaccaaaaattaaacgataatattagcgatatcaacactatagtaaaagatgttgtagatggtgaattagaatactttgaacgcaaaatacacaaaagtgatacaccgccagaaaatccagtcaatgatatgctttggtatgatacaagtaaccctgatgttgctgtcttgcgtagatattggaatggtcgatggattgaagcaacaccaaatgatgttgaaaaattaggtggtataacaagagagaaagcgctattcagtgaattaaacaatatttttattaatttatctatacaacacgctagtcttttgtcagaagctacagaattactgaatagcgagtacttagtagataatgatttgaaagcggacttacaagcaagtttagacgctgtgattgatgtttataatcaaattaaaaataatttagaatctatgacacccgaaactgcaacgattggtcggttggtagatacacaagctttatttcttgagtatagaaagaaattacaagatgtttatacagatgtagaagatgtcaaaatcgccatttcagatagatttaaattattacagtcacaatacactgatgaaaaatataaagaagcgttggaaataatagcaacaaaatttggtttaacggtgaatgaagatttgcagttagtcggagaacctaatgttgttaaatcagctattgaagcagctagagaatccacaaaagaacaattacgtgactatgtaaaaacatcggactataaaacagacaaagacggtattgttgaacgtttagatactgctgaagctgagagaacgactttaaaaggtgaaatcaaagataaagttacgttaaacgaatatcgaaacggattggaagaacaaaaacaatatactgatgaccagttaagtgatttgtccaataatcctgagattaaagcaagtattgaacaagcaaatcaagaagcgcaagaagctttaaaatcatacattgatgctcaagatgatcttaaagagaaggaatcgcaagcgtatgctgatggtaaaatttcggaagaagagcaacgcgctatacaagatgctcaagctaaacttgaagaggcaaaacaaaacgcagaactaaaggctagaaacgctgaaaagaaagctaatgtttatacagacaacaaggtcaaagaaagcacagatgcacagaggaaaacattgactcgctatggttctcaaattatacaaaatggtaaggaaatcaaattaagaactactaaagaagagtttaatgcaaccaatcgtacactttcaaatatattaaacgagattgttcaaaacgttacagatggaacaacaatcagatatgatgataacggagtggctcaagctttgaatgtggggccacgtggtattagattaaatgctgataaaattgatattaacggtaatagagaaataaaccttcttatccaaaatatgcgagataaagtagataaaaccgatattgtcaacagccttaatttatcaagagagggtcttgatatcaatgttaatagaattggaattaaaggcggtgacaataacagatatgttcaaatacagaatgattctattgaactaggtggtattgtgcaacgtacttggagagggaaacgttcaacagacgatatttttacgcgactgaaagacggtcacctaagatttagaaataacaccgctggcggttcactttatatgtcacattttggtatttcgacttatattgatggtgaaggtgaagacggtggttcatctggtacgattcaatggtgggataaaacttacagtgatagtggcatgaatggtataacaatcaattcctatggtggtgtcgttgcactaacgtcagataataatcgggttgttctggagtcttacgcttcatcgaatatcaaaagcaaacaggcaccggtgtatttatatccaaacacagacaaagtgcctggattaaaccgatttgcattcacgctgtctaatgcagataatgcttattcgagtgacggttatattatgtttggttctgatgagaactatgattatggtgcgggtatcaggttttctaaagaaagaaataaaggtcttgttcaaattgttaatggacgatatgcaacaggtggagatacaacaatcgaagcagggtatggcaaatttaatatgctgaaacgacgtgatggtaataggtatattcatatacagagtacagacctactgtctgtaggttcagatgatgcaggagataggatagcttctaactcaatttatagacgtacttattcggccgcagctaatttgcatattacttctgctggcacaattgggcgttcgacatcagcgcgtaaatacaagttatctatcgaaaatcaatataacgatagagatgaacaactggaacattcaaaagctattcttaacttacctattagaacgtggtttgataaagctgagtctgaaattttagctagagagctgagagaagatagaaaattatcggaagacacctataaacttgatagatacgtaggtttgattgctgaagaggtggagaatttaggattaaaagagtttgtcacgtatgatgacaaaggagaaattgaaggtatagcgtatgatcgtctatggattcatcttatccctgttatcaaagaacaacaactaagaatcaagaaattggaggagtcaaagaatgcaggataa

SEQ ID NO: 417574 - DNA, 1005 bp, Staphylococcus aureus; identical to SEQ ID NO: 405045

SEQ ID NO: 417575 - DNA, 501 bp, Staphylococcus aureus; identical to SEQ ID NO: 405188

SEQ ID NO: 417576 - DNA, 243 bp, Staphylococcus aureus
atggaagatatctataaattaatagacgatatcaatctacaaaaactagaaaatttagactctcgtgttaatgaagcaataactattgacaacgatgacgcattatttattctaggagagacactttacaattttggattaatgccacaaggtttggaagtattccgcgtgttatatcaaaaatatccagacgaaagtgaattgctgatttattttattgaaggtttaatgtctgaaaattaa

SEQ ID NO: 417577 - DNA, 948 bp, Staphylococcus aureus
atgttagaagcagatttatatcaacaaattaatatgatggaagttgctattgataaattacaagaagcacttgaactagagccgaatgatccaataatccattttgcgttggctgaaatgttatattatgatggtcaatatttacgtgctacctctgaatacgaaactgttttagaaactggtgaatatcaagttaatggtgtaaatttattctctcgtatggcagattgtagtttacaaagtggtaactatagtgatgcgattcgcttatacgatgaaattaatgaagatgaaatgacttcagaagattatctcaaaaaagccatttcttacgataaaaatgacatcactcaagaagcaattaaaataatgactacattactttctaaagatcctgattatattcaaggctacttgtatttacaatcattatatgaaaatgaaaaaaattatccagatgccattgaaacgggtaaagaaggattacgactaagtcaattttataaagagttaatgtatacaactggatgtttggaaatagaacacggcgatgctaatgaaggtgtattattgttaaaacaagcattagaggttgataatgcttaccaagaacctttattgattttaagcgatttatatcgtaatgaagaagattatgaagcaatcattgaattattaacatatgtagatgaagaagatttggatcctacattcatgtggcatttagcgttcgcctatggtcaagaagagcgagataaagaagctcaacatttctttgaattagcatatccaacgatgaaaacaaatattgattttatgagtgattattatttctatttaattgaaattggtcaaaaggaacaagcaattactattttaaatcaattgttggaactagagccaagtaacgaaaattggcatgacgaattatcaagattgcaatcttaa

SEQ ID NO: 417578 - DNA, 426 bp, Staphylococcus aureus
atggctgttgtcaatattggtaacataagaattggatatttcaccatattaggtatcatcattttaacgcctccaaagaagacggataacggcacccctaaacgattcactttacttgtaccaattatcaatactgcttcagtcgcggagataccaattgacgctgatccagctgctaaacctgtaatacctatcgcaaaggcaatggccacagttgatagtggcgaaataataataagactaaataccattgaaatcaaaatactcatgacaatcggttgtaattctgtaaaaccattaaccatattaccgatggctgttgtaatcattttcgtatacggcaatattaaaacaccaattgcacctgaaataccgccaacaactgttgggaatacaatcaatgccatactacctacacgatgttga

SEQ ID NO: 417579 - DNA, 627 bp, Staphylococcus aureus
ttgctttgcgaatttaaaattatcaacaaaaatccaaaatatagaattattaagtataatgatgaatatttgatagttgatttagtaagtagttggatagtattttttcttccaatgatcaattggtttatccctaaaaattacgtcaaaattagcaaggaagaatttgatgtcttaaacatttttaaaccagttagaaataatgctttttggcctgttacaggcgctttagttttacttgtaaccttgtcgaaaaaatatatttatttgctcaatacccatttagacaaaaaaacagtaataatcatatgttttgtcatattactatgtgtaataacatgctttttatacttgaaccaaaaactaaaactacatatttgggacaaaaataaaggtgaaaacgaaaaaatcatattaatacctacgttaaaaaatatatttatatctttgtttgcttatatattttttggcagcttttcaattttatctctaaatatattattaacaatggattctcaaaatataataggatttcttggttggattgtaacgacgtcatgtttcttttttgttaacaggtcatcaataatcggtggaaatgttcgtgtcatacttaaaaagcattag

SEQ ID NO: 417580 - DNA, 552 bp, Staphylococcus aureus
atggttgacttagcaaataactggctaacattactccttccaatgatgaattggttaatcccaaaaaaatacgtaaagattagtaaggaagaatttgatgtcttaaacattgttaaacctactaaaaatagagctttttggccagctgcaggtggctcaattttatttggagttacgttcagaaagtatactcatttgctcgatatccaactagaaaaaagtttagttattaccatatgttttataacattcttaagtattttaatcttttttatgaaattaaatcaaaaattaaaattaaaagtttttaataaaaataaagaacataaagaaaaaattatgctactacctactttcaaacatttttgttttgtactattttcttatttattttcgggatttttttcaataatgagtctatgcatgttaataactttagattcccagaatataatagtatttattgcttggattataatgacaatgcttttctttctagtgaatatggcttcgataggtaacaaaaatgttcatgtcatatttaaaaaataa

SEQ ID NO: 417581 - DNA, 444 bp, Staphylococcus aureus
atgagtatcgaaggacataaagaaaatattattagtaaaaacactgccaaagatgaacgcacttctgaatttgaagtaagtaagttgaacggtaaaatagatggaaaaattgacgtttatatcgatgaaaaagtaaatggtaagccattcaaatatgaccatcattacaacattacatataaatttaatggaccaactgatgtagcaggtgctaatgcaccaggtaaagatgataaaaattctgcttcaggtagtgacaaaggatctgatggaacgactactggtcaaagtgaatctaacagttcgaataaagacaaagtagaaaatccacaaacaaatgctggtacacctgcatatatatatgcaataccagttgcatccttagcattattaatcgcaatcacattgtttgttagaaaaaaatctaaaggcaatgtggaataa

SEQ ID NO: 417582 - DNA, 1077 bp, Staphylococcus aureus
atgagaaatgttaaacaaattgctacaaaatctattatagctattattagcttaggtatacttacatatacaacaatgattggtagcgtgttggctgatgagataaaatatccatcagccaaatttaatcaacctgaagcaaaagataaaacagaattaactacatcaatttttgatgaaaagataaaagagaataaagcgttagagttactaatttttaatcaagaaaataaaaatgtaactgaggaacaacaactagttgacgaaaaggcgcaattgatttcagatatgactggtaaaatttacttgcaagtaaagctaaaaggtcaaattgataaagaacaacttgtttttcaaaatgacaaaaatgaagaatttccttttgttataaaagatgaaaaggatgacacaatagtaagaattttaattgaacagcatatggataaaatcaatatgcatgttaaaacgttggctgaaaagaaaaatctagataacaaagaaatggtgtattctattcattttaaagagaaaaaagtacaacatgatgatgcaaaagaagtgccttcaaaacatcaaaatcaagaaaataatcaagatcagcttaaaaaagatattgatgacaaaaaagatagtcaaaaatcagatactaaggaaagacgtactagcctttttactgaaaaaggattaaatgatattcctgtacaaaaagataaagtgcaacaagacagtaataaaaagattgaaaatgagcgacctaaagcatcaggtacattaaaagttgaaaatagccctccaacagtaaaaaaggttgaaaataatcacaaagagcaaccgaaacataaagatgaaaaatcaaaaaaggaaaagaaaaaagtagttgaaaaagaaaaagcgttaccagcttttaatagagatgatgatagcaagaatagtagtcaattatctagtgatattaaagaacttgatgaaccaaatcataaaaagcaatatattttatttgcagctggcattgtgttagcaactattttacttatttcggcacatttatacagcagaaagagaggtaaccaagtttga

SEQ ID NO: 417583 - DNA, 879 bp, Staphylococcus aureus
ttgagaatcataaagtatttaaccattttagtgataagcgtcgttatcttaaccagctgtcaatcttccagttctcaagaatcaactaaatccgacgaattcagaatcgtaccaacaactgttgcattgacaatgacattggacaaattggatttaccaattgtcggtaaacccacgtcatataagacattgcctaatcgttataaagatgtaccggaaattggtcaaccaatggagccgaatgttgaagctgttaaaaaattaaaaccaacacatgttttgagtgtgtcaacgattaaagatgaaatgcaaccattttacaaacaattaaatatgaaaggctacttttatgattttgatagtttaaaagggatgcaaaagtcgattacacaattaggtgatcaatttaatcgtaaagcacaagcaaaagaattaaatgaccatttaaattctgtaaagcaaaaaattgaaaataaagcagctaaacaaaagaaacatcccaaagtattaatattaatgggtgtaccgggtagctatttagtagcaactgataaatcatatattggtgatttagttaaaatagcaggtggagaaaatgttattaaagtgaaagatcgtcaatatatttcgtctaatactgaaaatttgttgaatatcaatccagatattattttaagattaccacacggaatgcctgaagaagttaagaaaatgtttcaaaaagaatttaaacagaatgatatttggaaacattttaaagctgtgaaaaataatcatgtttatgacttagaggaagtgccattcggtattacagcaaatgttgatgctgataaggcaatgactcaattatatgatttattttataaggataaaaaatag

SEQ ID NO: 417584 - DNA, 978 bp, Staphylococcus aureus
atgaaaatgaataaattagtcaaatcatccgttactacatctatggcattattattactttctggtactgctaatgctgaaggtaaaataacaccagtcagcgtaaaaaaagtcgatgacaaagttactttatacaaaacaacagccacagcagattctgataaatttaaaatttcacagattttaacatttaatttcatcaaagataaaagttatgataaagatactttagtacttaaagctactgggaatattaactcaggctttgtgaaacctaatcctaatgactatgacttttcaaaattatattggggagctaaatacaatgtatctataagctcacaatctaatgattcagtaaacgtcgttgattatgcaccaaaaaatcaaaatgaagagtttcaagttcaaaatactttaggctatacatttggtggtgacattagtatctctaatggtttatctggtggacttaatggaaatacagctttttctgaaacaattaattataaacaagaaagttacagaacaacattaagtcgcaacacaaattataaaaatgttggctggggagttgaagcacataaaattatgaataatggttggggaccttatggacgagatagcttccacccaacatatggtaatgaactcttcttagctggcagacaaagcagtgcatacgctggccaaaacttcatagcgcaacaccaaatgccattattatctagaagtaacttcaatccagaatttttaagcgtactatcacacagacaagatggcgctaaaaaatctaaaattacagtaacttatcaacgtgaaatggatttataccaaattcgttggaatggcttctactgggcaggcgcaaattataaaaactttaaaactagaacatttaaatcaacatatgaaattgattgggaaaatcacaaagtgaaattgttagatacaaaagaaactgaaaacaataaatag

SEQ ID NO: 417585 - DNA, 153 bp, Staphylococcus aureus
gtggcagattcagttaaaccacgtaaatttaatattaaaataaaaagtacaagtaaacatgcaatcagtactttatgcccatataaacttgggaatgcagcaacaaatgcatcagcaccagatgatatactaacagcgacagtcagtatgtaa

SEQ ID NO: 417586 - DNA, 261 bp, Staphylococcus aureus
ttggcattcttaaaatccttggaaattgttcatggtaataatttggtggtaacaatttatcatcaagataagaaagtctatcaaaatattattaaatttgcgcgatcgtttgcagatgttaatgtgggtgaacctcttgtgtatgttaactcgctagtaaatattggtgtagcggtcaatcaagactcattttcagatttatatcatattggtactggaaatgattggacgattcatttatctaaagcaccatcaatttaa

SEQ ID NO: 417587 - DNA, 534 bp, Staphylococcus aureus
gtgaataacaacatattgcctgctataagaaacattaaagatttagagaaactgattaaaacagactataaaatgtgtgtgcttctagatatgcatataggacatataaaaagtattatggaattgctgaagcaaaatcatatagagtgttttattcatatagatttgataaaaggtttaagccacgatgaatttgcaagtgaatttattattcagcaatacaagccaaaaggtatcgtatcgactaaatctaaagtaataaaaaaagctaaatcattaaatactttaacgatttttagagtatttattattgatagtcaagcattgaaacgcagtatagatttgataaaaaaagttgaacctgattttgttgaagtacttccaggtgttgcgagtaaagcgattcatcatattcagaaagaaacaaacacacaagtcattgcaggtggcctaattaatacaatagatgaagtcaatgaagctgttaaaaatggagcgaaatatgtaacaactagttatgataaactttggtaa

SEQ ID NO: 417588 - DNA, 819 bp, Staphylococcus aureus; identical to SEQ ID NO: 405659

SEQ ID NO: 417589 - DNA, 1497 bp, Staphylococcus aureus
atggaaaaatatattttatctatagaccaaggaacaacaagctcaagagcgattttattcaatcaaaaaggggaaattgcaggggtagcacaacgtgagtttaagcaatattttccacaatcaggctgggttgaacatgatgcaaatgaaatttggacatctgtgttagctgtaatgacggaagtaattaatgaaaatgatgttagagctgatcaaattgcaggtatcggtattacaaaccaacgtgaaacaacggttgtttgggacaaacatactggccgcccaatttatcacgcaattgtttggcaatcacgtcaaacacaatcaatttgttcagaattaaaacaacaaggatatgaacaaacatttagagataagacaggattacttttagatccgtattttgcaggtacaaaagttaaatggattctagacaatgttgaaggtgcacgagaaaaagcagaaaatggcgatctattatttggaacgattgatacttggttagtatggaaattatcaggaaaagctgcgcatattactgattattcaaatgcgagtcgtacattaatgtttaatatccatgatttagaatgggacgatgagttattagaactacttacagtacctaaaaatatgttgccagaagttaaaccttcaagtgaagtatatggtaagacaattgattaccacttctatggtcaagaagtaccaatcgctggtgtagctggtgatcaacaagcagcattatttggacaagcttgcttcgaacgtggtgacgtgaaaaacacatatggaactggtggcttcatgttaatgaatacaggtgacaaagcggttaaatctgaaagtggtttattaacaacaattgcttatggtattgatggaaaagtaaattatgcgcttgaaggttccatctttgtttcgggttcagcaatccaatggttacgtgatggattaagaatgattaattcagcaccacaatcagaaagttatgcgacacgagttgactctactgagggtgtttatgttgttccagcttttgtaggtttaggaacaccatattgggattctgaagcacgtggtgcgattttcggtttaacacgtggaactgaaaaagagcactttatccgtgcaactttagaatcattatgttaccaaactcgtgacgttatggaagcaatgtcaaaagactctggtattgatgtccaaagtttacgtgtcgatggtggtgcagttaaaaataactttattatgcagttccaagcagacattgttaatacttctgttgaaagacctgaaattcaagaaactacagctttaggtgctgcatttttagcaggtttagcagttggattctgggagagtaaagatgatatcgctaaaaactggaaattagaagaaaaattcgatccgaaaatggatgaaggcgaaagagaaaaattatatagaggttggaaaaaagctgttgaagcaacacaagtttttaaaacagaataa

SEQ ID NO: 417590 - DNA, 1674 bp, Staphylococcus aureus
atggcattgtctacttttaagagagaacatattaaaaagaatttaagaaatgatgaatatgatttagtaattattggtggcggtattacaggtgcaggtattgcactagacgcgagtgaaagaggaatgaaagttgcattagttgaaatgcaagactttgcacaaggaacaagctcaagatctacaaaattagtccatggtggtttacgttacttaaaacaattccaaattggagtagttgccgaaactggtaaagaacgtgcgattgtttatgaaaatggacctcatgttacgactccagagtggatgcttttaccaatgcataaaggtggaacatttggtaaattctcaacatcaattggtttaggaatgtatgatcgtttagcaggtgttaagaagtctgaacgtaaaaaaatgttatctaaaaaagaaactttagctaaagaaccattagttaaaaaagaaggtctaaaaggcggcggttactatgttgaatatcgtactgacgatgcgcgtttaactattgaagttatgaagcgtgctgctgaaaaaggcgcagaaattatcaactatactaaatctgaacacttcacttatgataaaaatcaacaagtaaatggtgttaaagttatagataaattaactaatgaaaattatacaattaaggctaaaaaagtggttaatgcagcaggtccatgggttgatgatgttagaagtggtgattatgcacgcaataataaaaaattacgtttaactaaaggtgtacatgttgttattgatcaatcaaaattcccattaggtcaagcagtatactttgatactgaaaaagatggaagaatgatttttgcaattccacgtgaaggaaaagcgtatgtaggtactacagatacattctatgacaatatcaaatcttcaccattaactacacaagaagacagagactatttaatcgatgcgattaattacatgttccctagtgttaatgttacagatgaagatattgaatcaacatgggcaggaattagaccattaatttacgaagaaggcaaagacccttctgaaatctctcgtaaggatgaaatttgggaaggtaaatcaggtttattaactattgcaggtggtaaattaacaggctatcgtcacatggctcaagacattgttgatttagtatctaaacgcttgaaaaaagactacggtttaacatttagtccatgtaatacaaaaggtctggcaatttcaggtggcgatgtaggtggtagcaagaactttgatgcgtttgtagagcaaaaagtagatgtagctaaaggattcggcattgatgaagatgttgcaagacgtttagcatctaaatatggttcaaatgttgatgaattgttcaacattgcgcaaacatctcaataccatgatagcaagttaccattagaaatttatgtagaacttgtttatagtattcaacaagaaatggtatacaaacctaacgatttcttagttcgtcgttctggtaaaatgtatttcaatattaaagatgtattagattataaagatgctgtcatcgatattatggcagatatgcttgattactctccagctcaaattgaagcatatactgaagaagttgagcaagcaattaaagaagcgcaacatggaaataatcaaccagcagttaaagaataa

SEQ ID NO: 417591 - DNA, 234 bp, Staphylococcus aureus; identical to SEQ ID NO: 405654

SEQ ID NO: 417592 - DNA, 624 bp, Staphylococcus aureus; identical to SEQ ID NO: 405943

SEQ ID NO: 417593 - DNA, 330 bp, Staphylococcus aureus; identical to SEQ ID NO: 405942

SEQ ID NO: 417594 - DNA, 987 bp, Staphylococcus aureus
atgacaaaaattattttagcagctgatgtaggcgggacgacttgtaaattaggtattttcacacctgaattagaacaattacataaatggtctattcacactgatacatctgatagtacaggatatacacttttgaaaggaatttatgattcgtttgttgaaaaagtaaatgaaaataattataatttttcaaatgtacttggcgtaggtattggtgtaccaggtcctgttgactttgaaaaaggtacagtaaatggagcagtaaacttatattggccagaaaaagttaatgtacgtgagatttttgaacaattcgttgattgtccagtgtatgtagataatgatgctaacatagctgctttaggggagaaacacaaaggtgctggtgaaggtgccgatgatgttgttgccatcacacttggtacaggtctaggtggaggaattatttcaaatggtgaaatcgtacatggtcataatggctctggcgcagaaataggtcatttcagagcagacttcgatcaacgatttaaatgtaattgtggtcgttctggatgtattgaaacagttgcttcagcgacaggcgttgttaacttagttaacttctactatccgaagttgacgtttagatcttctatattagaattgattaaagaaaataaggttacagcaaaagctgtttttgatgcggcaaaagctggtgaccaattctgtattttcattactgaaaaggttgcaaactatattggatatttatgtagtattattagtgttacaagtaatccgaaatatatcgttctaggtggaggaatgtctactgcaggacctattttaattgaaaatattaaaacagaatatcataatttaacatttgcacctgctcaatttgaaactgaaattgtacaagcgaaattaggtaatgatgcaggtattacaggagcagcaggattaatcaagacctatgtattagataaagagggggtaaaataa

SEQ ID NO: 417595 - DNA, 1464 bp, Staphylococcus aureus
atgaacatagacaaacaattttggaaaacaatatattattggattaggtacttgaattttgatattgtcagtagggaaaaagatgaccaagaaatttggttagcccataaaagaaaaaaacaagtagtcatttttaaacaacatatcaagtctacccaagaaatacgttttgacaaagcgaaagtgcttgaacacaaagatgaaatagcaaattttatttctttcgaaccacaaagttttgaattttattattttacagaatcggaattttcagaagaacaattaaatgaagtttcgccaattagaattaaattcaatgttataagacacacaaaagatttgataaagcatatgccgaatatatttttggctagacttatttcagaagataatgataaaaagacatatatgttctataaacgcaaagtattaaccgataactttttagataaatatatgcagaaattttcaccggcaacatacacaataatatttgtaaatgtcttaatatggttatgtatgattttatatttaaataatttttcggatgtaaaattattagatgttggcgggttagtgcattttaatgtcgtacatggtgaatggtatcgaattgttacatcgatgtttttacattttagttttgaacatatacttatgaatatgctttcattatttatttttggtaaaatagtcgaagcaattattggttcatggcggatgttaactgtatactttattgcagggttgtttggaaactttgtatcactatcatttaatacgactacaatttcagttggggctagtggtgctatatttggtctgattggatcaatttttgcgatgatgtatgtttcaaaaacatttaacaaaaaaatgttaggacagttattaattgcattagtgatattagttggtgtttctctgtttatgtcaaatataaatattgtggcgcatattggaggattcattggtggtttattaataactttaattggctattactataaagtgaatcgtaatattttttggattttactaattggtatgcttgttatatttattgcacttcaaattagaatttttacaattaaagaagataatatttataataaattgatcaaagatgatatgactagtggtaattatgataatgctcaaaatattgtgaagcagacaataaataaaaattatgccgatgatcaaacatattatttaagtggtatgattatggctactatcaattctaagtctgaaggtatgacagaatgggagcgaggacttagaatgtttcctaaatcaggtttattaaattttgagttagcgatagcaaatcgttcattaaatgatgatgaaaaagcattaaaatatgtgcgtaaagcattaaatgcagaccctaaaaatgcagattatattaacttagaaaaagagttgactaaatcaaatgagtcgaaaaataaataa

SEQ ID NO: 417596 - DNA, 594 bp, Staphylococcus aureus; identical to SEQ ID NO: 413478

SEQ ID NO: 417597 - DNA, 150 bp, Staphylococcus aureus; identical to SEQ ID NO: 405938

SEQ ID NO: 417598 - DNA, 2076 bp, Staphylococcus aureus
ttgttaaaaagactaaaagaaaaatcaaatgatgaaatcgttcaaaatacaattaacaagagaattaactttatatttggtgtgattgtatttatttttgcagtactagtactacgtttaggttatttacaaatcgcacaaggctcacattataaacaaattataaaaaatgatgaaaacattacagtgaatgagtctgtgccaagaggtcgtattttagacagaaatgggaaagttttagttgataatgcttctaaaatggctattacatatactaggggtcgaaaaacaacacaatcggaaatgttggatacggctgaaaagttatcaaagctaatcaagatggatactaagaaaattacagaacgtgataagaaagatttctggattcagttgcatcctaaaaaagcaaaagcaatgatgacaaaagaacaagctatgttagcagatggaagtattaaacaagatcaatatgataaacaactgttatcgaaaatcagaaaatcacaattagatgaattgtcttctaaagatttacaagttttagctatttttcgagagatgaatgcaggaacagttttagatccacaaatgataaaaaatgaagatgtcagtgaaaaagagtatgcagcagtttctcagcaactttccaaattaccaggtgttaacacgtctatggattgggatagaaaatatccatatggcgatactttaagaggtatattcggagatgtatcgacacctgctgaaggtattccaaaagaattgacagaacattacttatccaaaggatattcacgcaatgatcgtgttggaaaatcttacctagaatatcaatatgaagatgtattgcgtggtaagaagaaagaaatgaaatacacaacggacaaatctggtaaagttacatcttcagaagtgttaaatcctggcgctcgcggtcaagatttgaaattaacgatcgatatagatcttcaaaaagaagtagaagcattattagataaacaaattaagaagcttcgcagtcaaggtgccaaagatatggataatgcaatgatggttgtacaaaatcctaaaaatggagacattcttgcgcttgccggaaagcagattaataagagtggtaaaatgactgattatgacattggtacgtttacttctcaatttgcggttggatcttctgtaaaaggtggaacattattagctggttatcagaataaagctatcaaagttggagaaacaatggtcgatgaaccattacatttccaaggtggtttgacaaaacgatcatacttcaataaaaacgggcatgtatctattaatgataagcaagctttgatgcattcatcaaacgtatatatgtttaaaacagcattaaaattagcgggagacccttattattctggtatggctttaccttcagacataagttcacctgcccaaaagctaagaagaggattaaatcaagtaggcttaggtgtgaaaacagggatagatttaccaaatgaaacaagaggtcaaatcgaaccattaacaaataatccaggtaattatctagatttatcaattggtcaatatgatacctatacaccattacaattatcacaatatgtttcaactatagcgaatgatggttatagaatacagccacacattggattaacgattcatgaatcaactaataaagatgaggttggtccactcaagaagaaaattaatggcactgtcttgaacaaggttaataatactgaaaaggaaatcaaacaaattcaagaaggattcaaaatggcatttaatgataaagatggtactggatatgttagttttaaagatacagtagtacctactgctggtaaaacgggtaccgctgaagtgttccaaaacggagagccaagagttaactctacttatataggatacgcgccaattgatgatccaaaattagcgttttcaattgtatatacaaatcagcctgtaccaccaccatggttaacaggtggagacttaggtagagatgtaattaactactactttaagcagttaggtaaagatgataaaaataaagacaaagacaaataa

SEQ ID NO: 417599 - DNA, 600 bp, Staphylococcus aureus
atggcttttgaattaccaaaattaccatacgcatttgatgcattagaaccacattttgacaaagaaactatggaaattcatcatgacagacatcataacacttatgttacgaaattaaatgctgcagtagaaggtacagatttagaatctaaatctattgaagaaattgttgctaatttagacagtgtaccagctaacatccaaactgctgtacgtaataatggcggtggacatttaaaccattcattattctgggagttactttcaccaaactcagaagaaaaaggtactgtagtagaaaaaattaaagaacaatggggttctttagaagaatttaaaaaagaatttgctgacaaagcagctgcacgctttggttcaggttgggcttggttagtcgtaaacaatggccagttagaaattgtgactacaccaaaccaagataatccattaactgagggtaaaacacctattttaggtttagacgtatgggaacacgcttattacctaaaatatcaaaacaaacgccctgactacattggcgcattttggaatgtagttaactgggaaaaagttgacgaattatataatgcaacaaaataa

SEQ ID NO: 417600 - DNA, 411 bp, Staphylococcus aureus
atgaatacaaatgatgctattaaaattttaaaagagaacggtttaaaatatacagataaacgtaaagatatgttagatatttttgtcgaagaagataagtatataaacgcaaagtatatacaacaagttatggatgaaaattatcctggaatttcattcgacacaatatatagaaacctgcacttatttaaagatttagggattattgaaaatacagaacttgatggtgaaatgaagtttagaatcgcttgtacaaaccatcatcatcatcattttatctgtgaaaagtgtggagatacaaaggtaatagattattgtccaatagatcagataaagttatcactacctggtgttaatattcacaaacacaaacttgaagtttatggtgtatgtgagtcttgccaagattaa

SEQ ID NO: 417601 - DNA, 873 bp, Staphylococcus aureus; identical to SEQ ID NO: 405934

SEQ ID NO: 417602 - DNA, 786 bp, Staphylococcus aureus; identical to SEQ ID NO: 405933

SEQ ID NO: 417603 - DNA, 891 bp, Staphylococcus aureus
atgttattaggatcacatgtttcaatgagtggtaaaaagatgttagaaggttctgctatagaagcgcatgaatatggtgaaacaacatttatgatttatactggtgcacctcaaaacacgcgccgtaaaagtattgaagatttaaatataactaaaggtcatgaagtgatggaaaaatatggcttatctaatattgttgttcatgcaccatacatcattaatattgcaaatacaaccaaaccagaaacgtttaatcttggtgtagatttcttgcaacaagaaattgaaagaacgcaagctataggggctaaagatattgtattacatccaggtgcgcatgttggagctggtgttgatgccggaattaataagattattgaaggattaaatgaagttttaacgaatgacaataatgtacgtattgcgcttgaaacgatggcaggtaaaggtacagagattggtcgctcatttgaagagttagcacgtattattgatggagttcataataacgaacgtttatcagtatgttttgatacatgtcatacgcatgatgctggatataatgttaaagaggactttgatggcgtattaaatgaatttgataaaatcattggagtcgacagaatcaaagttgttcatgtcaatgattctaaaaatgaccgtggcgctcaaaaagaccgacatgaaaatattggcttcggttacattggttttgatgcattaaattacattgtgcatcatgatagttttaaagatattccgaaaatcttagaaacaccttatgttggtgaagataagaaaaataaaaaaccgccatataaacttgaaattgaaatgttaaaacaacagcaatttgacccagaattaaaaaataaggttatgcaacaataa

SEQ ID NO: 417604 - DNA, 1347 bp, Staphylococcus aureus
atggcaaaacatccattcgaacaatttaatctagaatctagtttaattgacgctgtgaaagaccttaattttgaaaaaccaactgaaattcagaatcgaattattccaagaatactaaagagaacaaatttaattggtcaatctcaaacgggtacagggaaatctcatgcatttttattaccattaatgcagttaattgatagtgaaataaaagaaccacaagcaatcgtagttgcaccaacaagagaacttgcacaacaactatacgatgcagcgaaccatttaagccaatttaaagctggtgtttcagttaaagtttttattggtggtacagatatagagaaagatagacaacgttgtaatgcacaaccacaattgattataggcacccctactagaattaatgacttagctaaaacgggacatttacatgtgcacttagcatcatatttagttattgatgaagcggatcttatgattgacttaggattaattgaagatgtagattacattgctgcaagattggaagataatgcaaatattgcggtgtttagtgctacaattccacaacagttacaaccatttttaaataaatatttaagtcatccagaatatgtagctgtcgacagtaaaaaacaaaataaaaagaacatcgaattctatttaatacctactaaaggtgcagctaaagttgaaaagactttaaatttaattgatatactaaatccatacttatgtattattttctgtaatagtagagataatgcaaatgatttagcacgttcactaaatgaagctggtattaaagttggtatgattcatggtggtttaacgccacgtgaacgtaaacaacaaatgaaacgtatacgtaatttagaattccaatacgttattgccagcgatttagcatctcgtggtattgatattgaaggtgttagtcatgtcatcaattttgatgtgccaaatgatattgacttctttacgcatagagtcggacgaactggtcgtgggaattataaaggtgtagcaattacgctttatagtcctgatgaagaacacaatatttcattaatagaagatcgcggttttgtattcaatactgttgatattaaagatggtgagttaaaagaagttaaagcgcacaatcagcgtcaagcaagaatgcgcaaagatgaccatttaactaatcaagtgaagaacaaagttcgaagtaaaattaaaaacaaagttaaaccaggttataagaagaaatttaaacaagaagttgaaaaaatgaaacgtcaagagcgtaaacaatttagtaagcagcaaaatagacaaaaacgtaagcaaaacaaaaaaggttag

SEQ ID NO: 417605 - DNA, 1101 bp, Staphylococcus aureus; identical to SEQ ID NO: 405930

SEQ ID NO: 417606 - DNA, 678 bp, Staphylococcus aureus
atgatttcgttaaataaccgattaacgacggtaagtcgatttttaaaacaaggtacaatcgcggatattggctcagatcatgcttatttgccaatctatgcaattcaaaaccatttatgcgattacggtattgcaggagaagttattcaaggcccttttcaagctgctgtgaaaaatgtagctgcaaaccaattagtagatagaattgatgtacgtttaggggatggcttaagtgttattcatcctgaggacgtaatcgataatatcacaatatgtggtatgggcggaccacttattgctaaaattttaaaagatgggcaagataagttaagtcaacatccaaggttgattttacaaagtaatatacaaactgaaaatttaagacaaacattacaacaattgaattatgaaataattgatgaaataataatggaagaaaaaggccatatttatgaaattgttgtagcagaatattctacacaattaatagagctatcatctgatgaattgaaattcggaccaaaattgctgaacaacaaaaatgaatattttataaaaaaatggcaaagagagttagaagcactttatcatattaaatcgaaactcaatactgaacaacatcatcaacgtttagctcaaattaatgacgaaattgctgtaattgaaagggtgttatag

SEQ ID NO: 417607 - DNA, 1107 bp, Staphylococcus aureus
atgtctgataacacagttaaaattaaaaaacaaacaattgatccgacattaacattagaagatgttaagaagcaattaattgaaaagggtaaaaaagagggtcatttaagtcatgaagaaattgctgaaaaacttcagaattttgatatcgactctgatcaaatggatgatttctttgatcaattaaatgataatgatatttcactagttaatgaaaaagatagttcagatactgacgagaaactgaatccaagtgatcttagtgcccctccaggtgttaaaataaatgacccagttcgtatgtaccttaaagaaattgggcgtgttaacttattaagtgcacaagaagaaatcgaattagccaaacgtattgaacaaggtgatgaagtagcaaaatcaagactagcagaagcgaacttacgtttagttgtaagtattgctaaaagatacgtaggtcgtggtatgttattccttgatttaatccaagaaggtaatatgggtcttattaaagctgttgaaaaatttgactttaacaaaggatttaagttttcaacatatgcaacatggtggattagacaagcaatcactcgtgcaattgctgaccaagcacgtacgattcgtatccctgtgcatatggtagaaacaattaataaattaattcgtgttcaacgtcaattattacaggacttaggtcgagatccagcaccagaagaaattggtgaagaaatggatttaccagcagaaaaagttcgtgaaattttaaaaattgcgcaagaacctgtttcattagaaacaccaattggtgaagaagatgatagtcatttaggagactttattgaggatcaggaagcacaaagtccttcagatcatgctgcttatgaattattaaaagagcaattagaagatgtgcttgatacattaactgatagagaagaaaatgtattacgattaagatttggtcttgatgacggcagaacaagaacacttgaagaagttggtaaagttttcggtgttacacgtgaacgtattcgacaaatcgaagcaaaagcacttagaaaattaagacatccaagtcgtagtaaacgtttgaaagactttatggattaa

SEQ ID NO: 417608 - DNA, 441 bp, Staphylococcus aureus
atggcacaatttgacaatttgagccgtcaagaaaaagcggagcgagcatttttaaaacatttaatgagagataaagatacatttttaaattattatgaaagtgttgataaggataacttcacaaatcagcattttaaatatgtattcgaagtcttacatgatttttatgcggaaaatgatcaatataatatcagtgatgctgtacagtatgttaattcaaatgagttgagagaaacattaattagcctagaacaatataatttgaatgacgaaccatatgaaaatgaaattgatgattatgtcaatgttattaatgaaaaaggacaagaaacaattgagtcattgaatcataaattaagggaagctacaaggattggcgatgtagatttacagaaatactatttacagcaaattgttgctaagaataaagaacgcatgtag

SEQ ID NO: 417609 - DNA, 438 bp, Staphylococcus aureus
atgactggcgcaacactttcaccaatagatagttatttgttgttacgtggacttaaaactttgcatttacgcattgagcgtgcgcaatcaaacgctagaaaacttgctaaaaaatgtcagtcacttcaagcaattgacgaagtactatatagcgggcaaactggcatgcttagtttaagacttaacaaggcctatagcgtcgctaaattattagaaaatttagacatttgcatttttgcagaaagtttaggaggtactgaaacattagtgaccttcccttacacccaaacacatgttgatatgccagatgctgaaaaagataaacgtggcattgatgagtatttaatccgcttatcactaggtgttgaaaattatgaagacatcgaacgcgatatcatccaagcattagataaagctcagattggagagattgtatga

SEQ ID NO: 417610 - DNA, 1320 bp, Staphylococcus aureus; identical to SEQ ID NO: 417167

SEQ ID NO: 417611 - DNA, 1350 bp, Staphylococcus aureus
atgcttaattatacagggttagaaaataaaaatgtattagtcgtcggtttggcaaaaagtggttatgaagcagctaaattattaagtaaattaggtgcgaatgtaactgtcaatgatggaaaagacttatcacaagatgctcatgcaaaagatttagaatctatgggtatttctgttgtaagtggaagtcatccattaacgttgcttgataataatccaataattgttaaaaatcctggaataccttatacagtatctattattgatgaagcagtgaaacgagatttgaaaattttaacagaagttgagttaagttatctaatctctgaagcaccaatcatagctgtaacgggtacaaatggtaaaacgacagttacttctctaattggagatatgtttaaaaaaagtcgcttaactggaagattatccggcaatattggttatgttgcatctaaagtagcacaagaagtaaagcctacagattatttagttacagagttgtcgtcattccagttacttggaatcgaaaagtataaaccacacattgctataattactaacatttattcggcgcatctagattaccatgaaaatttagaaaactatcaaaatgctaaaaagcaaatatataaaaatcaaacggaagaagattatttgatttgtaattatcatcaaagacaagtgatagagtcggaagaattaaaagctaagacattgtatttctcaactcaacaagaagttgatggtatttatattaaagatggttttatcatttataaaggtgttcgtattattaacactgaagatctagtattgcctggtgaacataatttagaaaatatattagcagctgtgcttgcttgtattttagctggtgtacctattaaagcaattattgatagtttaactacattttcaggaatagagcatagattgcaatatgttggtactaatagaactaataaatattataatgattccaaagcaacaaacacgctagcaacacagtttgccttaaattcatttaatcaaccaatcatttggttatgtggtggtttggatcgagggaatgaatttgacgaactcattccttatatggaaaatgttcgcgcgatggttgtattcggacaaacgaaagctaagtttgctaaactaggtaatagtcaagggaaatcggtcattgaagcgaacaatgtcgaagacgctgttgataaagtacaagatattatagaaccaaatgatgttgtattattgtcacctgcttgtgcgagttgggatcaatatagtacttttgaagagcgtggagagaaatttattgaaagattccgtgcccatttaccatcttattaa

SEQ ID NO: 417612 - DNA, 966 bp, Staphylococcus aureus; identical to SEQ ID NO: 417169

SEQ ID NO: 417613 - DNA, 2235 bp, Staphylococcus aureus
atggcgaagcaaaaaattaaaattaaaaaaaataaaataggggcagtcctacttgttggtttattcggactgctcttttttatattggttttaagaatttcatatatcatgattactggacattctaatggtcaagatttagtcatgaaggcaaatgaaaagtatttagttaagaatgcacaacaaccagaacgaggaaagatatatgatcgtaatggtaaagtgctagcagaagatgtagaaagatataaacttgttgcagtaatagataaaaaggcgagtgccaattctaaaaaacctaggcatgtagttgataaaaaagagactgcaaagaaattatctacagtcattgatatgaagccagaggaaattgaaaagagacttagtcaaaagaaagctttccaaattgaatttggacgcaaaggaacaaatttaacgtatcaggacaaattgaaaatagagaaaatgaatttgcctggtatttctttattgcctgaaacagaacgcttttatccaaatggcaattttgcatcacacttaattggtagagctcagaaaaatccggatactggtgaacttaaaggtgcacttggagttgaaaagatttttgatagttatttaagtggatctaaaggatcattgagatatattcatgatatttggggatatatcgcaccaaatactaaaaaagagaagcagcctaaacgtggtgatgatgtccatttaacaatcgattcaaatattcaagtatttgttgaagaagctttagatggcatggttgaaagataccagccgaaagatttatttgcggttgtcatggatgccaaaactggagaaattttagcatacagtcagcgaccaacatttaatcctgaaactggtaaagactttggtaaaaagtgggcaaatgacctttatcaaaacacatacgagcctggatcaacatttaaatcatatgggttagcagctgctattcaagaaggtgcttttgatcctgataagaaatataaatctggacatagagatattatgggttcacgtatttcagactggaatagagtcggttggggtgaaatcccaatgtcactcggatttacttattcatctaatacattgatgatgcatttacaagatttagttggtgcagacaaaatgaaatcttggtatgaacgatttggatttggaaaatcaactaaaggtatgtttgatggagaagcacctggtcaaattggatggagtaatgagttgcaacaaaaaacgtcatcatttggtcaatcgacaacagtaacacctgttcaaatgttacaggcgcaatcagcgttctttaatgatggtaatatgttaaaaccatggtttgtgaatagcgttgaaaatcctgttagtaaaagacaattttataaaggtcaaaaacaaatcgcaggcaaaccaataacaaaagatactgctgaaaaagttgaaaagcaattggatttagttgtgaatagtaagaagagtcacgctgcaaactatcgtattgatggttatgaggtcgaaggtaagactggtacagcacaagtcgctgcacctaatggtggtggatacgttaaaggtccaaacccatattttgtaagttttatgggtgacgcaccgaagaaaaatcctaaagttattgtatacgctggtatgagcttggcacaaaaaaatgaccaagaagcttatgaattaggtgttagtaaagcgtttaaaccaataatggaaaatactttgaaatatttaaatgtaggtaaatcaaaagatgacacatctaatgcagagtatagtaaagtgccagatgttgaaggtcaagacaaacaaaaagctattgataatgtgagtgcaaaatcattagaaccagttactattggttctggcacacaaataaaagcacaatctataaaagcagggaataaagtcttacctcatagtaaagtactgttattaacagacggagacttaactatgcctgacatgtcaggatggacgaaagaagatgttattgcttttgaaaacctaacaaatattaaagtaaatttaaaaggtagcggttttgtgtcccaccaatcaattagtaagggacaaaaacttactgaaaaagataaaatagacgtagaattttcatcagagaatgtagacagcaattcgacgaataattctgattcaaattcagatgataagaagaaatctgacagtaaaactgacaaggataagtcggactaa

SEQ ID NO: 417614 - DNA, 402 bp, Staphylococcus aureus; identical to SEQ ID NO: 405777

SEQ ID NO: 417615 - DNA, 936 bp, Staphylococcus aureus
gtgtttcatcatatcagcgttatgttaaacgaaaccattgattatttaaatgtaaaagaaaatggtgtgtacattgactgtacgctaggtggagcgggacatgccctttatttactaaatcaattaaatgacgacggaagattaatagcaatcgatcaagaccaaactgcaattgataatgctaaagaggtattaaaggatcatttgcataaggtgacttttgttcatagcaacttccgtgaattaactcaaatattaaaagacttaaacattgaaaaagtagatggaatttattacgacttgggtgtttcaagcccacaactcgacattccagaacgaggattcagttatcaccatgacgcaacattagacatgcgtatggaccaaacacaagaactaacagcatatgaaattgttaacaattggtcatatgaagcgttagtgaagattttttatcgttatggcgaggagaaattttcaaaacagatagctcgaagaatcgaagcacatcgtgaacaacaaccaataacaacaacattagaattagttgacattataaaagaaggtattcctgcaaaagcaagaagaaaaggcggacatcctgcaaaacgagtatttcaagcactacgaattgcagtaaacgatgaattgtcagcttttgaagattcaatagaacaagcgattgaattagtgaaagtagacggcaggatttcggtaatcactttccattctttagaagatcgtttatgtaaacaggtgttccaagaatatgaaaaaggtccagaggtaccaagaggattgccagttataccagaagcatatacacctaagttaaagcgtgttaatcgtaaaccgattaccgctacagaagaagatttagatgacaataacagagcacgaagcgcgaaattacgtgtagctgaaatacttaaataa

SEQ ID NO: 417616 - DNA, 432 bp, Staphylococcus aureus; identical to SEQ ID NO: 405779

SEQ ID NO: 417617 - DNA, 1614 bp, Staphylococcus aureus
atggactgtaaagtagttagtttaaatgaaaaagatcagtttataccaaaaataaagagcagtgaccctgtaataacagggttatttcaatatgatgcagctcaacaaactagttttgaaaaaaggatgtctaaagaaaataatggaagagaagcggcattagcgaatgttattcgtgaatatatgagtgatttaaagctttctagtgaacaagaattaaacatacaacatttagctaatggttcaaaagttgtgattggtggacaacaagcagggcttttcgggggaccattgtatacattccataaaatattttcaatcattactttatctaaggaattaacggatacacataagcaacaagtagtaccagttttttggattgcaggagaagatcatgatttcgatgaagtgaatcatacatttgtttataacgaaaatcatgggtcgctgcataaggttaaatatcatacaatggagatgccagagacgactgtctctagatattatcctgataaggctgagttgaaacaaactttaaaaacgatgttcattcatatgaaagaaactgttcatacacaaggtctactggagatttgtgacagaattattgaccaatatgactcgtggactgatatgtttaaagcactactgcatgaaacatttaaagcatatggcgttctatttatagatgcgcagtttgagccgttaagaaaaatggaagcgcctatgtttaaaaagattttgaaaaaacatcagttgcttgatgatgcttttagagcaacacaacaacgtactcaaaatcaaggcttgaatgcgatgatacaaacagatacaaatgttcatttattcttacatgatgaaaatatgcgtcaattagtttcgtatgatggtaaacattttaaattaaataaaacagataagacatatataaaggaagaaattataaatattgcggaaaatcaacctgaattattttctaataatgtagtgacaagaccattaatggaagaatggttatttaacacggtggcatttgttggaggaccgagtgaaattaagtactgggctgaactaaaagatgtatttgaactatttgatgttgaaatgcctatcgtgatgccaaggcttagaattacttatttaaatgaccgtattgaaaaattactttcgaaatacaatattccattagaaaaagtgttagtcgatggtgttgaaggagaaagaagtaagtttattagagaacaagcatcacatcaatttattgaaaaggtagaaggtatgattgaacaacaacgtcgtctaaaccaagacttattagatgaagtggcggggaatcaaaataatattaaccttgtgaataaaaataatgaaattcatatacaacagtatgattatttgttaaaacgttatcttttaaacattgaaagagaaaacgacatcagtatgaagcaatttagagaaattcaagaaacactccatccaatgggaggattacaagaaagaatatggaatccacttcaaattttgaatgattttgggacagatgtgttcaagccctccacctatccaccactttcttacacttttgatcatattattataaaaccttaa

SEQ ID NO: 417618 - DNA, 441 bp, Staphylococcus aureus; identical to SEQ ID NO: 405781

SEQ ID NO: 417619 - DNA, 687 bp, Staphylococcus aureus
ttgggatataaaaatattttgatagactttgatgatacaattgttgatttttatgatgcagaagaatgggcgtttcactatatggcgaatgtttttaatcataaagcaacaaaggatgattttttaacatttaaaaaaatcaatcaccaacattgggaagcttttcaacaaaataaattaacgaagtctgaagtattatcagaacgatttgtgaattacttcaaacatcatcaaatggaagttgatgggcatcgtgcagatgtgttatttagaaatggattagcagaagctaaagttaaatactttgatcaaacattagaaacaattgtcgaattatcgaaaagacatgatttatatattgttactaatggtgtaaccgaaacgcaaaagagaaggttaaatcagacgccgttgcataaatatattaaaaagatatttatatctgaggaaacaggatatcaaaaacctaatccggaattttttaattatgtttttaatgatattggtgaggatgaaagacagcactcgattatagttggagattctttaacatctgacattctaggtggaatcaatgcgggtatagctacttgctggtttaattttagaggatttgatcataatccaggaattatacctgattatgaaattaattcatggaaacaactaaatgatattgtacgttaa

SEQ ID NO: 417620 - DNA, 135 bp, Staphylococcus aureus; identical to SEQ ID NO: 405783

SEQ ID NO: 417621 - DNA, 135 bp, Staphylococcus aureus; identical to SEQ ID NO: 405784

SEQ ID NO: 417622 - DNA, 447 bp, Staphylococcus aureus
ttgcatcaacatgactttaaagtccaaacttcttggcaaggtggtcgtaacaatgtcggaaacgttcaaggcgacatactttcagagaatatttctatacctgcttctttaggtggtgttggtataggaacaaatcccgatgaaatgttagtatcagccgcttcatcatgttatatcatctcattagcagctactcttgaacgtgcaaagttcacagatatttcaattgaacaacaatcgattggaacagcttgtttaaataacggaaaattcagtatgtcaaaaattgtgcaccatcctcaaattcaaattccaagtgatcaaatcgcacaattagaaaagcgattaccaaaattgataacaattgcagataataattgcatgatttcaaatgctgtaagaaataatgtggacataaaaatctatcccatcattcaggccaaataa

SEQ ID NO: 417623 - DNA, 1161 bp, Staphylococcus aureus
atgtattatcatcaaccgttgttattaacacctggcccaacccctgtacctgatgccattatgagagaaattcaagcacctatggttggtcatcgttctaaagattttgaagacatcgcacaacaagcatttcaaggtctaaagccaatatttgggagtcaaaatgatgtacttattttaacatctagcggtacaagcgtcttagaagctagtatgttgaacattgtaaaccctgaagatcacttcgttgtcattgtttcaggtgcctttggtaaccgatttaaacaaattgcacaaacttattacaaaaatgtgcacatttatgacgtaacatggggagaagctgtagatgtcaaagatttcatcaattacctttcaactttagatgttgaagttaaagcagtatttagtcaatattgcgaaacatctacgacagtgctacaccctattcacgagttaggaaatgccatcaatcaatttaatagtaatatttattttgtagttgacggcgtaagttgcattggtgctgttgatgttgacattaacaaagataaaattgatgtacttgtttctggtagtcaaaaagcaattatgttacctccaggattagcttttgtagcttatagccaccgtgcaaaagaacgtttcaaagaagtaactacgccaaaattttatctagacttaaataaatacatttcgtcacaagctgacaattctacaccgttcacaccaaatgtgtctttatttagaggtgtgaatgcatacgttgaaaccgtaaaagcagaaggtttcaatcacgtaatagcacgacactatgcaattagaaatgcattaagaagcgccttaaaagcattagatttaactttattagtcaatgataaagatgcatctccaacggttacagcattcaaacctaatacaaatgatgaagtgaaaataatcaaagatgaacttaaaaatcgctttaaaataacaattgctggtggtcaaggccatcttaaaggtcaaattttaagaattggtcatatggggaaaattagtcctttcgatattttatcggtagtatctgctttagaaattattttaactgaacaccgtaaagttaactatatcggtaaaggtatatcaaaatatatggaggttattcatgaagcaatttaa

SEQ ID NO: 417624 - DNA, 1605 bp, Staphylococcus aureus
atgaagcaatttaatgtactcgttgcagatcccatatcaaaagatggtatcaaagcattattagatcacgaacaattcaatgtagatattcaaactggcttgtccgaagaagcattaatcaaaattataccttcataccatgctttaatcgttcgtagtcaaactacggttactgaaaatatcataaatgctgctgattctttaaaagtaatcgcacgcgccggtgttggtgtagataatattaatattaatgctgcaacattaaaaggtattttagttattaatgccccagatggtaatacgatttcagctactgaacattcactggcaatgttattatcaatggctcgaaatattccgcaagcacaccaatcacttacaaataaagaatggaatcgaaatgcatttaaaggtactgagctttatcataaaacattaggtgtcattggtgctggtagaattggtttaggtgttgctaaacgtgcgcaaagtttcggaatgaaaatactagcttttgacccttacttaacggatgaaaaagcaaaatctttaagtattacgaaggcaacagttgatgagattgcccaacattctgatttcgttacattacatacaccactaacacctaaaacaaaaggcttaattaatgctgacttttttgccaaagcaaaacctagtttgcaaataatcaatgtggcacgtggtggtattattgatgaaaaggcgctaataaaagcattagacgaaggacaaattagtcgggcagctatcgatgtgtttgaacatgaacctgcaactgattcgcctcttgttgcacatgataaaattattgttacacctcatttgggtgcatcaacagtcgaagctcaagaaaaagtggcaatttctgtttcaaatgaaatcatcgaaattttaattgatggtactgtaacgcatgcagtgaatgcacctaaaatggacttaagcaatatagatgatactgtaaaatcattcatcaatttaagccaaacagttggtgaattagctattcaattaatgtacaatgcaccaagctctattaaaattacgtacggtggcgacttagcctctattgatagtagtttattaacacgtacaattattactcatattttaaaagatgatcttggtcctgaagtcaatattatcaatgctctaatgttgttaaatcaacaacaagtgacattaaatattgaaaataataaagcagagacaggttttagtaactacttagaggtagaactatcaaacgatagcgattccgttaaagttggcgcttctgtctttacaggtttcggtccaagaattgttagaattaataatttttctgtagacttaaagcctaatcaatatcaaatagtgtcatatcataatgatactccaggtatggtaggtaaaactggcgcattgttaggtaaatacaatatcaacattgcatctatgactttaggtagaactgaagcgggcggagatgcgctaatgattttatccgttgatcaacctgtttcaaacaatataattgatgaacttaaacaagttggtgaatacaatcaaattttcacaactgaattgacggtacagtcataa

SEQ ID NO: 417625 - DNA, 1131 bp, Staphylococcus aureus; identical to SEQ ID NO: 406609

SEQ ID NO: 417626 - DNA, 1467 bp, Staphylococcus aureus
atgtataaatttttccaaaatttagggcgttcgttaatgttaccagttgccattttaccggctgcagcaattattgccggaattggtaatacgctaaatgcacttcatgcggcgccgaaaatcgcaatgttctttactacggtaggtactacgattttagagcaattaggtattttatttgcaattggtgtagctataggaatggcaaagaaaaatgatggtgcagtcgcgcttgcagctacgttaggatattttttagttacagttgtattatcaccaatgaaattagcgcctttattaggaatgaaagcttcggaaataaattcagcttttgaaaaaatgaataatggcaatgtctttgttggtattgtaataggtttaatagcagcctatgcatacaataagtttagtgaaacagaattaccattagcattatcattttttagtggtaaacgtctagttccaattatgactgcattttactgtacatttttagttgtcatattgttattcttatggccactactatattcatggattgtaaaatttggtgaatctatagttggtttaggatcatttggtgctttcatatatggtgttgccaacagattattaattcctacaggattacatcatgcactgaatagtgtgttctggtttgatacgattggtattaatgatattggtaaattccaaagtggcaaagatgctataaaaggtattacaggacgctatcaagcgggattcttcccaatcatgatgttcggtattccagcggctgcgttagcaatgtatcatacagctaaaacgactcagaaaaaacaagtttacggttggttcctagcgagttcagttgcagcatttttcgttggtgttacagagccgattgagtttgcatttatgtttgttgcgccaatcttatatgttgttcatgcgttattaacaggattatctttatttatcgcagctacattccattggacagctggattttcatttagtgcaggtttgatagattatgtgttatcactaattaatccagtatcaaatcatccattgatgttgcttgttcaaggtgttgtatttttcatcttatactatgtgattttccgtgtagtaatccaagtatttaacttgaatacgattggtagaggtgaaaatgaattagttgatccaacagttgtaaaagataatattgctcctggtgaaaatgatattaaacaaagtaaatatcatcaacatgctatacaaatattagaaggtttaggtggtcaagagaatattgttaatttaactaattgtgcaacaaggttgcgtctagagttaaaagacacatctattattgatcaacagaagattaaaaacgccggtgcagttggtgttactgttaatggtaaacattcaactcaagttattgtcggtacacacgtacagcaggttgctgatgaaattgaaaaacatttataa

SEQ ID NO: 417627 - DNA, 618 bp, Staphylococcus aureus
atgtattcagtgattagtaagattttgaatttcattttagttaaaatgtcaaaatcattatacgtaatcggtaaagataatattcctaaggatagtaaatatgtcgtaacttgtacgcatgaaagttataacgaagtcattatgctaggtatggcattatatcctaatcaaattcattatatggctaaaaaagaattattcaaaaataaatggattggtaaatttttaacgtctttaaatgcatttcctgtagatcgtgaaaatccaggacctagtactttaaaacgcccaatcaatttgttgaaagataataagacagttggtatcttcccaacaggttctcgcacatcgcaagaaggtgcacctttgaaacgtggtgcttcaacaattgcaatgttaagtaagtcaccaatattacctgttgcttatgttggtcctactaagattcacggtcttttaacaggacaagcatacataaatattggtaaaccaatcgatattaacgatttacctaaagatttaaaacgaaacgagcgtatcgattatattacaaaagagattgaaacacgaacagcaaagttacaacaagaattgcatgaaattgtaaaaagtttataa

SEQ ID NO: 417628 - DNA, 1275 bp, Staphylococcus aureus; identical to SEQ ID NO: 406606

SEQ ID NO: 417629 - DNA, 1263 bp, Staphylococcus aureus
atgacgaatgtattaattgaagatttaaaatggagaggtcttatttatcaacaaactgatgaacaaggtattgaagatttattaaataaagaacaagtgacgttatactgcggtgccgatccaacggcagatagtttacatattggtcacttactaccattcttaacattaagacgttttcaagaacatggacatcgtcctatcgttttaattggcggtggtacaggtatgattggtgatccatcaggtaaatcagaagaacgtgtgctacaaacagaagaacaagtagataaaaatatcgaaggtattagtaagcaaatgcacaatatttttgaatttggaacagaccatggtgcagtgcttgttaataatagagattggttaggacaaatttcattaattagctttttacgtgactatggtaaacacgtcggcgttaattacatgttaggtaaagattcaatccaaagtcgtttagaacatggtatttcatatacagaattcacatacacgattttacaagctattgatttcggtcatttgaatagagaattgaattgtaagattcaagtaggtggatcagatcaatggggtaatatcacaagtggtattgaattaatgcgtcgtatgtatggtcaaacagacgcatacggtttaactattccgcttgtaactaaatcagatggtaagaaatttggtaagtctgagtcaggtgctgtttggttagatgctgaaaaaacaagtccttatgaattttatcaattctggattaatcaatcagacgaagatgtaattaaattcttaaaatactttactttcttaggaaaagaagaaattgatcgcttagaacaatctaaaaatgaagcaccgcatttacgtgaagctcaaaaaacattagctgaagaagtaactaaatttattcatggtgaagatgcattaaatgatgcaatccgtatttcacaagcattatttagtggtgatttaaaatcattatcagcgaaagaattaaaagatggatttaaagatgtgcctcaagtgacattatcaaatgacacaacaaatatcgttgaagtccttattgaaacaggcatttctccttctaaaagacaagcacgtgaagatgttaacaatggtgcgatttatattaatggtgagagacaacaagatgttaattatgctttagcacaagaagataaaattgatggcgaatttacgattattcgtcgcggtaagaaaaaatacttcatggttaactatcaataa

SEQ ID NO: 417630 - DNA, 906 bp, Staphylococcus aureus
atgacgaatcaagacaacaatcatcaattgaatcatcgtatatatcattttgaaaagatatataaagctatcaaacatgtcattgtttttatatttatgattttcattgccatcgttgctatcgctgtgattgcgatgtctttatattttcatcatttaactaaaacgtccgactcattatcagatgatgctttaataaaaaaagttcgacaaatacctggcgatgaattattagatcataataacaaaaatttattatatgagtataaccattctcaaaactcactcattataggccctaaaacatcaagtccaaatgtcattaaagcattaacgtcatctgaagacactttattttataaacatgatggcatcttaccaaaggcgattttaagagcaatgatacaagatatttttaatactgatcaaagttcaggtggtagcacaattacacaacaacttgttaaaaatcaagttcttaccaacgaaaaaacatatagtagaaaagcaaatgaacttcgcctagcaattagattagaacacctactctcaaaagatgaaattatatatacatatttaaatatagttcccttcggtagagattataatggcgctaatatttccggaattgcatccgcttcatatagtttgtttggtattccaccaaaagatttatcaattgcacaatctgcataccttatcggtttgttgcaaagcccttatggctatacaccctacgaaaaagatggaacgttaaaatcggataaagatttgaaatatagtattcaaagacaacattatgtattaaaacgtatgttaatcgaagatcaaatcactgaaaaagaatacaacgacgcattaaaatatgatattaaatcacatttgttaaatcgaaaaaagcgttaa

SEQ ID NO: 417631 - DNA, 2304 bp, Staphylococcus aureus
atgacaattccagagaaaccacaaggcgtgatttggactgacgcgcaatggcaaagtatttacgcaactggacaagatgtacttgttgcagccgcggcaggttcaggtaaaacagctgtactagttgagcgtattatccaaaagattttacgtgatggcattgatgtcgatcgacttttagtcgtaacgtttacaaacttaagcgcacgtgaaatgaagcatcgtgtagaccaacgtattcaagaggcatcgattgctgatcctgcaaatgcacacttgaaaaaccaacgcatcaaaattcatcaagcacaaatatctacactccatagtttttgcttgaaattaattcaacagcattatgatgtattaaatattgacccgaactttagaacaagcagtgaagctgaaaatattttattattagaacaaacgatagatgaggtcatagaacaacattacgatatccttgatcctgcttttattgaattaacagagcaattgtcttcagatagaagtgatgatcagtttcgaatgattattaaacaattgtatttctttagcgttgcaaatccaaatcctacaaattggttggatcaattggtgacaccatacgaagaagaagcacaacaagcgcaacttattcaactactaacagacttatctaaagtatttatcacagctgcctatgatgctttaaataaggcgtatgatttgtttagtatgatggatagcgtcgataaacatttagctgttatagaagatgaacgacgtttaatggggcgtgttttagaaggtggctttattgatataccttatttaactggtcacgaatttggcgcgcgtttgcctaatgtaacagcgaaaattaaagaagcaaatgaaatgatggtcgatgccttagaagatgctaaacttcagtataaaaaatataaatcattaattgataaagtgaagagtgattacttttcaagagaagctgatgatttgaaagctgatatgcaacaattggcgccacgagtaaagtaccttgcgcgtattgtgaaagatgttatgtcagaattcaatcgaaaaaagcgtagcaaaaatattttggatttttctgattatgaacattttgcattacaaattttaactaatgaggatggttcgccttcagaaattgccgaatcataccgtcaacacttccaagaaatattggtcgatgagtatcaagatacgaaccgagttcaagagaaaatactatcttgcatcaaaacgggtgatgaacataatggtaatttatttatggttggagatgttaagcaatccatttataaatttagacaagctgatccaagtttatttattgaaaagtatcaacgctttactatagatggagatggcactggacgtcgaattgatttgtcgcaaaacttccgttctcgaaaagaagtactgtcaacgactaactatatattcaaacatatgatggatgaacaagtcggtgaagtaaaatatgatgaagcggcacagttgtattatggtgcaccatatgatgaatcggaccatccagtaaacttaaaagtgcttgttgaagcggatcaagaacatagtgatttaactggtagtgaacaagaagcgcattttatagtagaacaagttaaagatatcttagaacatcaaaaagtttatgatatgaaaacaggaagctatagaagtgcgacatacaaggatatcgttattctagaacgcagctttggacaagctcgcaatttacaacaagcctttaaaaatgaagatattccattccatgtgaatagtcgtgaaggttactttgaacaaacagaagtccgcttagtattatcatttttaagagcgatagataatccattacaagatatttatttagttgggttaatgcgctccgttatatatcagttcaaagaagacgaattagctcaaattagaatattgagtccaaatgatgactacttctatcaatcgattgtaaattacattaatgacgaagcagcagatgctattttagttgataaattaaaaatgtttttatcagatattcaaagttaccaacaatatagtaaagatcatccggtgtatcagttaattgataaattttataatgatcattatgttattcaatactttagtggacttattggtggacgtggacgacgtgcaaacctttatggtttatttaataaagctatcgagtttgagaattcaagttttagaggtttatatcaatttattcgttttatcgatgaattgattgaaagaggcaaagatttggtgaggaaaatgtag

SEQ ID NO: 417632 - DNA, 141 bp, Staphylococcus aureus
atgaaagcatatcctttaccttataaaatatttgaagatagctctgattttgtaaaacaattatttactttgcttgaatatacaaaaactaatcataatgataatattaaaattgaaactaatctattcatgagttggtga

SEQ ID NO: 417633 - DNA, 795 bp, Staphylococcus aureus
ttgatcaatactagtttcacctgtcgttttcgcttggtctacatcattttgactattagcagcttcaatgttgctatttgcttgtgtcacagcattatctacgtccgcattagccgctgcaatttcttcagcagtaatgtcttgcgtttgagcgattgctgttttacgttcattcgctttcgtagcaattgcttgtttcgcattatctttagttgttgttgctggctgaatcgcttcaattttagcaatttctgcatttttagccgcttcaacttccgcatttgtatgtgctgcatctattgctgcatcagcagccgttttttcagtttgaacttgttgtttagcagcttctttttcttctgttgttgcaccattattagcatcaattgctgtctcttgtgcttgtactttgtcagcaattgcttgtttcgcttgaggtttaacatttgcatcaggtgtaatggctgcgattgtagcttcatttgtagtttttgcattatctacatctgcatttgctgcagcattatctatatcagcgtttgcagtaactactacttgatcaactttgtctttcgctgcttgttgttcttcagtagtcgaatcattcattgcttcaattgcagttttgcgttcacttgctttttgagcgatttccgctttagcatccgatttcttagttgttgccgcttgcacttgattaattgcagcaataccattgtctttagctgttgttacatcactgtttgtatttgcagcatcaagatttgttcttgcttcttgttttttagcatctaa

SEQ ID NO: 417634 - DNA, 192 bp, Staphylococcus aureus; identical to SEQ ID NO: 404921

SEQ ID NO: 417635 - DNA, 1539 bp, Staphylococcus aureus
atgacatcaaaacatcaacaaaaggggtctatcgtcaatcgtttcttgaatagtgttgaaaaaaccggaaataaattgccagatcctagcgtcttattctttttaatgtgtgtgggcttagccattatgacatgggttatctcattatttaatgtatctgttaagcatccaggtacgcatcaaaccatttatattaaaaatataattagccatgatggatttacgatgataatgaatgatacgattaaaaatttctcagagttcccagcattaggcttagtactagcagtgatgattggtattggtgttgcagagaaaacaggatacttcgataagttaatgatttctgttgtgaatcgcgcaccacgtttcttaattttaccgactattatattaattggtattttaggtagtacagccggcgatgctgcgacaattatcttgccgccgcttgcagcaatgctttttattaaaattggctatcaccctatcgctggactaacgatggcatatgcttccgctgttggaggatttgcagcaaatatagttgttggtatgcaagatgctttggtctattcatttacagaaccggcaacacgtatcgtttcagattctattaaaacaaacgttgctatgaactggtactttatcgcagcgagtgtcgttgtattacttcctacgatattgctagttacaactaagctcattattcctagattaggaaaatatgatgacagtttaatgcatgatgaccatgaagaaacatcttcacatattactgacaaagaagcacatgctttaaaatgggcaaatatcagtttcatagtcacaattattttattaattattacagccattcctgaacatagctttttaagaaatgctaaaacaggcagcttactagacgatgcgccattaattaacggtgtcggattaattattcttgtcgtatttttagtacctggattagtttatgggattttaagcaaagaaattaaaaatacaaaagacttaggtaaaatgttcggcgatgctgtaggatcaatgggaacatttatcgttattgtgttttttgcagcacagctacttgcgtatttaaagtggagtaatttaggaattatcgctgctgttaaaggtgccaaattattagaacatcaaaacggcattgtattgatactaggtattattgtactaagtgcaatggtcaacatgttaatcggaagcgcatcggctaaatggggtattttaggaccgatattcgtaccaatgttaatccttatcggctttcatcccgcattcacacaagtcatttaccgtgtaggcgattcaattaccaatccaattacaccgatgatgccgtacttacctttattattaacttatgcacaaaaatacgataaacgcatgaaactcggagccttactttctagtttaatgccgtattcaatcgcgctaagtattgtgtggacagtatttgtcatcatttggttcctattaggtatccctgttggaccaggtggaccgatattcgttaaataa

SEQ ID NO: 417636 - DNA, 549 bp, Staphylococcus aureus
atggctgaatttagtgactatcaattaattctagatgaattaaagatgactttgtcacatgttgaagcggatgagttttcaacttttgcatccaaaatactacatgctgaacatatatttgtagctggtaaaggacgttcaggattcgtggcgaatagttttgcaatgcgcttaaatcagctcggcaaacaggcacatgttgttggagaatcaacgacacctgcgattaagtcgaatgatgtatttgtaattatctctggttcaggttccacggaacatttaagattattagcagacaaagcaaaatcagtaggtgctgacatcgtattaattactacaaataaagattctgcaataggcaatctagctgggacgaacatcgttttgcctgcaggtacaaaatatgatgaacaaggctcggcacaaccattaggaagtttgtttgaacaagcatctcaattatttttagatagtgttgtaatgggattgatgactgaaatgaatgttacggaacaaacgatgcaacaaaatcatgctaatttagaataa

SEQ ID NO: 417637 - DNA, 633 bp, Staphylococcus aureus
gtggaattacaattagcaattgatttattaaacaaagaagacgcggctgagttagcaaataaagtaaaagattatgtagatatcgtagaaatcggtacgccaatcatttacaacgaaggtttaccagcagttaaacatatggcagacaacattagtaatgtaaaagtattagcagacatgaaaattatggatgcagctgattatgaagttagccaagcaattaaatttggcgcggatgtaattacaatactaggtgttgcagaagatgcatcaattaaagcagctattgaagaagctcataaaaataataaacaattactagttgatatgattgctgttcaagatttagaaaaacgtgcaaaagaactagatgaaatgggtgcggattatattgcagtacacactggttatgatttacaagcagaagggcaatcaccattagaaagtttaagaaccgttaaatctgttattaaaaattctaaagttgcagtagcaggtggaattaaaccagatacaattaaagaaattgtcgctgaaagtcctgatcttgttattgttggtggcggaatcgcaaatgcagatgatccagtagaagctgcaaaacaatgtcgcgctgcaatcgaaggtaagtaa

SEQ ID NO: 417638 - DNA, 759 bp, Staphylococcus aureus
atgaaagtattaaacttaggatcgaaaaaacaagcatcattctatgttgcatgtgagttatataaagagatggcatttaatcagcactgtaaactaggtttagcaactggtggtacaatgacagatttgtatgaacaacttgttaagttattaaataaaaatcagttaaacgtagacaatgtatccacgtttaatttagacgaatatgtaggtttaaccgcatcacatccgcaaagttatcactattatatggatgacatgcttttcaaacaatatccttattttaatagaaagaacattcatattccaaatggagatgccgatgatatgaatgcggaagcgtcaaaatataatgacgttttagaacaacaaggtcaacgtgatattcaaattttaggtattggtgaaaatggtcatattggatttaatgaacctggtacgccgtttgatagcgttactcatatcgttgatttgactgaaagtactattaaggctaatagtcgatattttaaaaacgaagatgatgttccaaagcaagccatttcgatgggacttgctaatattcttcaagccaaacgtatcattttactcgcatttggtgaaaagaaacgtgctgctattacacatttattaaatcaggaaatttctgttgatgttccagccacattacttcacaaacacccgaatgttgagatatatttagacgacgaagcttgcccgaaaaatgttgcgaaaattcatgtcgatgaaatggattga

SEQ ID NO: 417639 - DNA, 363 bp, Staphylococcus aureus; identical to SEQ ID NO: 406182

SEQ ID NO: 417640 - DNA, 666 bp, Staphylococcus aureus; identical to SEQ ID NO: 406183

SEQ ID NO: 417641 - DNA, 879 bp, Staphylococcus aureus
atgactgaatttgatttatcgacacgagaaggtcgttggaaacactttggttccgtagatcctattgaaggcacgaaacctactactaagaacgaaatgacagatttacaaagtacacataaagattttttatttgaaatagaagaagttggtattaaaaacttagtgtaccctgtacttgttgaccagtatcaaacagctggcacatttagtttttcaacaagtttaacaaaagacgaaaaaggtattaatatgagccgtataattgaaagtgttgaaaagcactatgataatggtattgaacttgaatttaatacactttatcaggtgttacgcactttacaaacgaatatgaaacaaaatgcggcaggcgttgatgtttctgggaaatggttctttgatcgctatagtccaaccacaaatattaaagcagttggcaatgccgatgtcacttatggattagcaattgacggtgataaagttacacgtaaagaacttactattgaagcaactgtcacaacgctatgcccttgttcaaaagaaataagtgagtattcagcgcacaaccaacgtggtgttgtcactgttaaaacatatattaataaagatcaagacatagttgatgactataaaaataaaattttagatgcaatggaagctaatgcaagttcaattctataccctattttaaaacgtcctgatgaaaaacgtgtgacagagcgtgcatatgaaaatccacgttttgtcgaagacttaattcgtttaattgccgcggacttagttgaatttgattggttagacggtttcgatatcgaatgtcgtaatgaagagtctatccatcaacatgatgctttcgctaaattaaagtatcgcaaataa

SEQ ID NO: 417642 - DNA, 567 bp, Staphylococcus aureus
gtggcaaatttaaagtatcaatttgacatcaatcaaaaggagaaaaatcatatcatatcaattgctcgcctcgttgaaaataaacaaattaaacatcaagttgaagtgatcaagcaattagtaacaaaacatcccaatattcaattgaatatttatggacatggaaatggtttgtcagaatatcgacaacttgtagaagattatcatttatcggaacatgtaaaatttcatggttttaagacgcatattaatgaagagattgctaaagcagaactgatgttatcgacaagtaaaatggaaggttttggcttagcaattttagagtcgctttcagtaggtacaccagtgatcagttatgatgtagattatgggccatcagaactgattcaagatggatttaatggctatttagtacctcaaggtgacatcaatcaaatggttgaaaaggtcgaccaattactaaataatactcaaaaattgcaacagttttcgattaatagcatagaatctgcacaacagtacaatgcaactactatcagtacaaagtggcaaaatattttaaactaa

SEQ ID NO: 417643 - DNA, 288 bp, Staphylococcus aureus; identical to SEQ ID NO: 405352

SEQ ID NO: 417644 - DNA, 1482 bp, Staphylococcus aureus
atgaaaaaaatatttatgatggtacatgagttagatgtgaataaaggtggtatgacctcttcgatgttcaatagaagtaaagagttttatgatgcggacatacctgctgatattgttactttcgattacaaaggaaactatgatgaaattattaaagctttgaaaaaacaaggtaaaatggatcgaagaacgaaaatgtataatgtatttgagtattttaaacaaatttcaaataataaacattttaagtctaataaattgttatataaacatatttcagaaagactaaaaaatacgattgaaattgaagagagtaaaggtatttcaagatattttgatataacgactggtacatatattgcctacattagaaaaagtaaatctgaaaaagtgattgatttctttaaagataataaacgaattgaacggtttagttttatagataataaagtgcatatgaaggaaacatttaatgtagataataaagtttgttatcaagtattttatgatgaaaagggatacccatatatttcaaggaatattaatgctaataatggtgctgtaggtaaaacttatgtgttagttaataaaaaagaatttaaaaacaatttagcactgtgtgtttactatttagaaaaactaataaaagattctaaagatagtattatgatttgtgatggaccagggagttttccaaaaatgtttaatacaaatcataaaaatgctcagaaatatggcgttattcatgttaatcatcatgaaaatttcgatgatacgggtgcatttaaaaaaagtgagaaatatattattgagaatgcgaataaaattaacggtgtaattgtattaacagaggcacaaagattagatattcttaatcaatttgatgtagaaaatattttcactattagcaattttgttaagatacataatgctccaaaacattttcaaactgaaaaaatcgtaggtcatatttctagaatggtaccaacgaagcgaattgatttgcttattgaagtggctgagttagtcgtaaaaaaagataatgctgttaaatttcatatatatggagaaggatctgtcaaagataaaatagctaaaatgattgaagataaaaatttagaaagaaatgtttttcttaaaggatatacaacaactccacaaaaatgcttggaagattttaaattagtcgtttctacatctcaatatgaaggtcaagggttaagtatgatagaagcaatgatttctaaaaggcctgttgttgcctttgacatcaaatacggaccaagtgattttatagaagataataaaaatggttatttaatagaaaaccataatattaacgacatagctgataaaatacttcagcttgttaataatgatgttttagcagaggagtttggttcgaaagcgagagaaaacattatagaaaaatattcaacggaatcaatattagaaaaatggttaaatcttttcaatagctaa

SEQ ID NO: 417645 - DNA, 357 bp, Staphylococcus aureus
atgaaattaggtatgcttttaattagatggatgctagcaacatcattcttagtgcatggtactttgaaatttgttgatttagatggaacaattcacttcttaggctctttaggtttaccacctaccatcgcagtattgatgtcaattggtgaagttgttggaggtttagcacttattatcggctttttaacgccttatgttaatgttttttatatttgtgttatgttaggctcaatcttcacacttaaacttacaagaggatatgtaagtggttatgaatttgaaatcatacatatcgtaatgaacttagcttgtattagtagttacagctggaagaaatggctacaattttattaa

SEQ ID NO: 417646 - DNA, 216 bp, Staphylococcus aureus
atgacgattgcaatgatagcaatcggaatcgcacctgctaaaataaacgttgtgccatccgtcgcatttgtaccacgaatcacaatgtcaccaagcgtaggtgctcctataaatgatccaacggcaacaacacctatcgcaacaaccaaggcaatacgaatgccaccgataataaccgaaacagataacggtaattcaatcattcgtagcacttga

SEQ ID NO: 417647 - DNA, 471 bp, Staphylococcus aureus; identical to SEQ ID NO: 409320

SEQ ID NO: 417648 - DNA, 1545 bp, Staphylococcus aureus
atgaaaaaaatatataagtcattaactgtctctgcaattgttgcaacggtatcattaagtgctttaccgcaatctttagctataacgcatgaatcgcaacctacaaagcaacagcgaacggtattattcgatcgttctcatggtcaaacagctggtgctgcagattgggttagtgatggtgcattttcagattatgcggattcaatacaaaaacaaggttatgacgttaaagctattgatggtcattcgaacataacagaagcaagtttgaaaagttccaaaatatttgtaattcctgaggctaacattcctttcaaagaatcagaacaggcagcaattgttaactatgtgaaacaaggtggcaatgttgtctttatttcagatcattacaatgctgaccgaaatttaaatcgtattgattcatcggaggcaatgaatggttatcgacgtggagcatatgaagatatgtcgaaaggtatgaatgcagaagaaaaaagttctactgcaatgcaaggtgtgaaaagttcagattggttatctacaaactttggcgtacgttttcgatataatgcactaggtgatttaaatacgagcaatattgtttcttcaaaagaaagtttcggtattactgaaggtgtgaaatctgtctctatgcatgccggatcgacattagcaattactaatccagagaaagcaaaaggtattgtgtatacaccagaacaattgccagcgaaaagtaaatggtcacatgctgtagatcaaggtatttataatgggggcggtaaagcagaaggcccctatgtagcaatttctaaagttggaaaaggtaaagcagcatttatcggtgattcatcacttgtggaagatagttcgcccaaatatgtaagagaagataatggagaaaagaagaaaacatatgatggttttaaagaacaagacaacggtaagctattaaataatataacggcttggatgtctaaagatagtgatgggaaatcacttaaggcgagtggactaacattagatacaaagactgagttgcttgattttgaacgaccagagcgttcaactgagcctgaaaaagagccatggtcacaaccgccgagtggttataaatggtatgatccaacaacatttaaagcaggtagttatggcagcgaaaaaggcgcagatcctcagccaaacacaccagatgatcatacgccaccaaatcagaacgaaaaagtatcatttgatatcccgcaaaatgtttctgtaaatgagccatttgaagtgacaatacatttaaaaggatttgaagcaaatcaaacacttgaaaatcttagagttggtatttacaaagaaggcggacgtcaaatcggacaattttcaagtaaagataacgattataacccgccaggttacagtactttgccaacagttaaagcagatgaaaacggaaatgtcacaattaaggtcaatgctaaagtacttgaaagtatggaaggttcaaagattcgtttaaaactcggtgacaaaaccttgattacaacagacttcaaataa

SEQ ID NO: 417649 - DNA, 153 bp, Staphylococcus aureus
atgacgtttattattgcgaaagtaattaaattaattacaccattatctgttacggaacaagaaacgaatataggattagacaagattgttcacggtgaacatgcttactttgaaggtgagctaaatagattcaataaacatattcgatattag

SEQ ID NO: 417650 - DNA, 1485 bp, Staphylococcus aureus
atgaccgaatggactagagaagaacgttatcaacgaatcgaggacgttgatactgagtattttaaaacattaaaacaacaagttgatcaatcaaaatttcgtcaacaatttcatatacaaccagaaacaggcttattaaatgaccccaacggacttattttttataaagggaagtattatgtttcacatcaatggttcccattaggcgcagtacatggcttaaagtattggtataactacacgagtgatgacttaataaactttaaagctgaagggccaattttaaatccagatactaaatatgacagccatggtgtatatagcggtagcgcttttgaatataacgggcatttatattatatgtacacaggaaatcatcgagataatcattggcaacgacatgcaagtcagatgatcgcacgactgaaagaagacggttcagttgaaaagtttccaaagccagtaattagccagcaaccagaaggatatacaagtcattttagagatcctaaagtttttaaatatgatgagaaatattatgcgatcattggcgcacaaaataataatcagcaaggtcgattattactttataatactgaagatataattaattggcattatttaggtgaaataaatacagagttggatgattttggatatatgtgggaatgcccagattactttaatgtagataatcaagatgtcatacttatttgtccacaaggtattgaaccaaaaggcgatcagttcaaaaatatttatcaaagtggttatatacttggaaagtttgatattgaaaagttaacatatgaacatgaaaattttgtcgagcttgataatggctttgatttctatgcacctcaaacatttttagatgaaaaaggccgacgagtactaattggatggatggggttaccggaaatcgaatatcctactgataatgaaggatgggcccattgcttaacaattcctcgtgtattaaatgtagaaaatggtcaacttaagcaacgtccatatccagcgttggaaaaattacgtcacaataaagagacagcattaggctacgcaaataaatttactcgaaaattacatccgtatgaaggtaaacagtatgaattaatcatagatattttggataatgatgctaccgaagtgtactttgaattacgtacatctaagacttcttcaacattaattgcttataacaagcgtgaaaataaaataacattagatcgcagcgacagtggtttattgccgacaaatgttgaaggtacgacgcgtagtacgatattagacacgccattaaagcaattacaaatttttgttgatacatctagtatagaaattttctgtaatgatggagaacgtgttttgacatctcgaattttcccgacagaagacgcactaggtattaaaacatcaacagaatcagggcaagtatatttacaatttactaaatatgatttaaaggatgaacataaatga

SEQ ID NO: 417651 - DNA, 960 bp, Staphylococcus aureus
atgagacgtctattttcaataggagaagcgttaattgattttattccaaacattacaaatgcgaatttaaaagatgttcaaacatttacgaagcaaattggtggcgcgccatgcaatgtagcttgtacagttcaaaagttaggacaacaagcgtatatgattacacaattaggtaatgatgcatttggagatagcattattgaaacgatatcaagtattggtgtagatgtatcaaaagtgtatcgcacgaatgaagccaacactgcgttagcttttgtaagtttgactgaagcgggcgagcgagatttttctttttatcgtaagccctctgctgatatgttatttgaaccaagttttgtgaatgatattgatgtgaatgaaaatgatgtggtacatttttgttctgttgatttgatcgatagtccgatgagagaagcacattatcaattgattaccaaaacattaaattcaaatggtactgtcgtatttgatcctaatgtaagattgccattatgggataacgctgaagatttaagacaaactattcatacctttttgccattggcgcatattgtaaaagtttcagatgaagaattagaatttattacaggtattcatgatgaaaatgaagccattcaatcattatttacaggtaatgttactgtagtcatttatacgaagggagcagatggtgctgccgtatatttgaaaaatggtaataatcattatcatagtggctataaggtaaaacctgttgatacaactggggcaggggatgcttttattggtgcagttattagcaggattttagcaaccgatgtgttaaatttaactcagttatttgaaaatgaaggtgaggaaattttagcgtttagcaatcgcgttgctgcaatagtgacaacgaagtatggtgccattaatagtttgccaacattacaagaggttgaacaagcattttaa

SEQ ID NO: 417652 - DNA, 717 bp, Staphylococcus aureus; identical to SEQ ID NO: 410361

SEQ ID NO: 417653 - DNA, 594 bp, Staphylococcus aureus
atgcgcaagttccgtcatgattatgtcaatatcttaacgacactttcagaatacattcgcgaagatgacatgattggtctacgcgcttatttcaataaaaatattgtacctatgaaagataatttgcagatgaatgctattaaattaaatggtatcgagaatcttaaagtacgtgagataaaaggcttaattactgcgaaaattttacgtgcacaagaaatgaatattccgattagtatcgaaatacccgatgaagtaagtagcattaacttgaatatgatcgatttaagtcgcagtattggtattattcttgataatgcaattgaggcatcaactgaaattgatgaccctatcattcgcgttgcatttattgaaagtgaaaattcagtaacgtttattgttatgaataaatgcgctgatgatataccacgcattcatgaattgttccaagaaagtttttctactaaaggtgaaggtcgtggtttaggtctatcaactttaaaagaaattgctgataatgcagacaatgtcttattagatacaattatcgaaaatggtttctttattcaaaaagttgaaattattaacaactag

SEQ ID NO: 417654 - DNA, 930 bp, Staphylococcus aureus; identical to SEQ ID NO: 405426

SEQ ID NO: 417655 - DNA, 1380 bp, Staphylococcus aureus
atgagcaataaagcttggggcggtagatttgaagtacaacctgaagagtgggttgacgactttaacgcatccattacttttgatcaaacgctcatagatcaagatatcgaaggcagcattgcacatgcaactatgcttgcgaatcaaggcattattagtcaacaagacagcgaacaaattatacaaggactaaaatctattcaacatgattatcatcaagatcaaattcaatttagtgcatcattagaagatattcatttaaatattgaacatgaattaatcaaacgtattggtgatgctggtggtaagttgcatactggacgcagtagaaacgatcaagttgcaacagacatgcacttgtacactaagaaacaagtgcaagatatcatcgcattaattaagtcgttacaaagtgtaattgtagacatcgcttccaataatgttgatacaattatgcctggttatactcatttacagcgtgcacagccaatttcatttgcacatcatattatgacttatttttggatgttacaacgagaccaacaacgatttgaagatagtttaaaacgaatcgatattaatcctttaggtgcagcagccttaagtggtaccacataccctatcgatagacacgagacaacagcattgttgaactttggcagtctctatgagaatagcctagatgctgttagtgacagagactatattattgaaacattgcataatatttctttaacgatggttcacttatcacgctttgcagaggaaattattttctggtccacagacgaagctaaattcattacattatcagatgcattttcaactggctcatctattatgccacaaaagaaaaatcctgatatggcagaattaattagaggtaaagttggtcgaacgactggtcatttaatgagcatgcttatgactttaaaaggattacctctagcatataacaaagatatgcaggaagataaagaaggtttattcgatgctgtccatacaattaaaggttctttacgtattttcgaaggtatgattcaaacgatgacaattaataaagaacgactcaatcaaactgttaaagaagatttttcaaatgcaacggaactagcagattatttagtaactaaaaatattccatttagaactgcacatgaaattgtaggaaaaatcgtcttagaatgtatacaacaaggtcattatttattagatgttcctttagcaacatatcaacaacatcattctagtattgatgccgatatttacgattatttgcagcctgaaaattgtttaaaacgacgtcaaagttacggttcaacaggtcaatcatcggtcaaacaacaacttgatgttgctaaacaattactatcacaataa

SEQ ID NO: 417656 - DNA, 1206 bp, Staphylococcus aureus
atgaaagagaaaattgttttagcatattcaggaggactagatacaagtgtggccgttcaatggcttatcgacaaaggatacgacgttgtagcttgttgcctagatgttggtgaaggtaaagatttagacatcgtttataaaaaagctttagatatgggagcagttgaatgtcatattattgatgcaacaaaagaatttagtgatgagtatgtaagttatgcaatcaaaggaaatttaatgtatgaaaatgcatatccattagtttcagctttatcaagaccattaatcgctaaaaaattagtagagattgctgagaaaacaaattcagtaggtattgcacatggttgtactggtaaagggaatgaccaagtacgtttcgaagttgccattaaagcattaaacccatcattgaaagcattcgcacctgtacgtgagtgggcatggagtcgtgaagaagaaatcgattatgcaattaaacataatatccctgtatcaatcaaccatgattcaccttattctatcgatcaaaatctatggggcagagcgaatgaatgtggtattttagaagatccttatgctgcgccaccagaggatgcgttcgatctaacaaatgctttagaagaaacaccagatactgctgatgaaatcattttaacgtttgataaaggcatcccagttcaaattgatggcaaaacatatgaattagacgatttaattttaacgttgaatgcattagctggtaagcatggtatcggaagaattgaccatgtagaaaatagacttgtaggtatcaaatcaagagaaatttatgaagcacctgctgcagaagttattttaaaagcgcataaagcattagaaacgattacgttaacgaaagatgtcgcacactttaaaccaatcatcgagaagcaatttgctgaacaactatacaatggactttggttctcacctttaactgatagcttgaaattatttattgatagtactcagcaatacgtaagtggtgatgtcagaattaaattattcaaaggtaatgccatcgtgaatggtagaaaatcaccttacacattatatgatgaaaaattagcaacttatacaaaagaagatgcatttaatcaagacgctgctgttggctttatcgatatctatggtttacctactcaagtaaatgcgatgttgcatggaggctatagcaatgagcaataa

SEQ ID NO: 417657 - DNA, 1332 bp, Staphylococcus aureus
atgactcatattcaattagattttagtaaaacgttagaatttttcggtgaacacgaattaaaacaacaacaagaaattgttaaatcaattcacaaaacaattcatgaaggtactggtgcaggtagtgacttcttaggctgggttgatttaccagttgattacgacaaagaagaattttcaagaattgttgaagcatcaaaacgcattaaagaaaattctgatgttttagtagtcatcggtattggtggttcttacttaggtgcacgtgcagcaatcgaaatgttaacgtcatcatttagaaacagcaatgaataccctgaaattgtatttgttggtaatcacttatcatcaacatatacgaaagagttagttgattatttagcagacaaagatttctctgtaaacgttatttctaaatctggtacaactacagaaccagcagttgcatttagattgttcaaacaattagttgaagaaagatacggtaaagaagaagcacaaaaacgtatatttgcaacaacggataaagaaaaaggtgctttaaaacagttggctacaaacgaaggttatgaaacgtttatcgtacctgatgatgtaggtggaagatattctgttttaacagcagtaggattattaccaattgcaacagctggaattaacatcgaagctatgatgattggtgctgcaaaagcacgtgaagaattatcttcagataaattagaagacaacattgcataccaatatgcgacaattcgaaacattttatatgcaaaaggttatacaacagaaatgttgattaactatgaaccatctatgcaatactttaatgaatggtggaaacaattatttggtgaatcagaaggtaaagacttcaaaggtatctatccttcaagtgccaactacacaactgatttacattctttaggtcaatatgtacaagaaggccgtcgtttcttattcgaaacagtggtaaaagtaaatcatcctaaatatgatattactattgaaaaagatagtgatgatctagacggattaaattatttggctggtaaaacaatcgacgaagttaacacaaaagcattcgaaggtacattattagcgcatactgatggtggtgttcctaacatggtagtgaacattccacaattagatgaagaaactttcggttatgtcgtatacttcttcgaacttgcttgtgcaatgagtggataccaattaggtgtaaatccatttaaccaacctggtgtagaagcatataaacaaaacatgttcgcattattaggtaaacctggttttgaagacttgaaaaaagaattagaagagcgtttataa

SEQ ID NO: 417658 - DNA, 495 bp, Staphylococcus aureus; identical to SEQ ID NO: 406864

SEQ ID NO: 417659 - DNA, 762 bp, Staphylococcus aureus
atgccagattcaatcacaattatagatgaaaacaaagtgattgatgttgtattaattgcaggtagaattttacttgaatcaggtgctgaaacatatcgagttgaagatacaatgaaccgtatcgcacatagttatggtcttcataatacatatagttttgtcagttcaactgcaattattttttcattaaatgatcgaacaagtacaagattaattcgtgtacaagagcgtacaacagatttagagaaaattgctttaacgaatagtctttcacgtaaaatatcaaataaagaactcacaattgatgaagctaaatctgaatttattcatttacagcatgcatcattacaatattcttttttaacgaatttctttgcagctgccattgcatgtggcttcttcctatttatgtttggtggtgtcgcatcagattgttggattgcagtcattgctggcggatccgcatttttaacattcagctttgtgcaacgctatatacaaattaaatttttctcagagtttgttgcagccgctgtggtcatatccattgcagccacatttactaaattaggcattgcaaccaatcaagatatcattactatagccagtgtcatgccacttgtccctggtatattaattaccaatgccattcgagatttattagcgggtgaattacttgcaggtatgtctcgtggtgttgaagctgcattaacagcattcgcaatcggtgctggtgtcgcaatcgttttattaatcatttaa

SEQ ID NO: 417660 - DNA, 1071 bp, Staphylococcus aureus
atgttcgaagcatttatatacaatatatctgttatagtcgctggaatctatttattccatcgcttacagtattcagaaaacaaacgtatggttttttctaaggcttatgtcactgttttaatgacaatcgtatcattattattatctgtctaccctatcccttatcgtgaagattatttaattcacttaacattcgttcctttattgtttttaggtagatttacaaatatggtctatacattatctgccacggtaattgtagcaattgttgaaattgtagtatttaacaactcgattatgtacggtgttacgttgattgttattgctgcagtaacaagtgctattggaccatttttaaaacaaaatgatgtgctatcattattaatacttaatgttgttacaataatcattttatttggtgtcgcgttagtgagtcctatttacacactatcggaagttatcattttaataccaatttcattaattatcactttagcttcagcgataacatttgtcgatatttggcatttcttctcactcgtaaatcgttatgaaaacgaagataaatatgattacttaacaggcttaggtaatgtaaaagaatttgatagacatttaaatgaaatttcacgaaaagctgaaaaagaacatcaaagtatcgctttattattaatcgatatcgatggatttaaagatgtcaatgatacctactcacacaaatcaggtgatgctgtattaaaacaaatgtctcaattacttaaaaactatgtgccgaatcaatttaaaatttttagaaatggtggcgaagagttctcagttgtcattcacaattattcacttgatcaaagtgttaaattagctgaaaatattcgttcgggtgttgaaaaatcatcattccatttaccaaacaaagaagttattaaattgtcagtgtctatcggtgttggttatttaacagatgacgatccaaaatcacagcgtaaagtgtttaaagatgcagacgatatggtgcatgtagccaaaaatcaagggcgaaacaaagtaatgtttaaccctattatcaatttataa

SEQ ID NO: 417661 - DNA, 396 bp, Staphylococcus aureus; identical to SEQ ID NO: 415992

SEQ ID NO: 417662 - DNA, 864 bp, Staphylococcus aureus
atgaaatattttattgaagtcgttaagcaaggaggcatgactaatgcttccaaatcattatatattgcacaacctacaattagtaaagcaattaaagatattgaaaatgaaatgggcacgcccttatttgatagaagtaaaagacatttaattcttaccgatgcaggtcaaattttttatgagaaaagtaaagaaattgttgcactgtatgattatttaccatctgaaatggaacgcttgaatggactggaaacagggcatataaacatgggcatgtcggcagtcatgaatatgaagattcttatcaatattcttggtgcattccatcaacaatatccaaatgttacatataatttaatagaaaatggcggcaaaacgattgaacagcaaattatcaatgatgaagtagatataggcgtgaccactttgccagtcgatcatcatattttcgattatactaccctagataaggaagatttgcgacttatcgtgagcagagagcatcgactcgcaaaatatgaaactgttaaactcgaagatttagcaggtgaagacttcattttatttaataaagacttttacttgaatgataaaattattgaaaatgctaaaaacgttggctttgttccgaatactgtagcgcaaatttcacaatggcatgttatagaagatttagttacgaatgaattaggtattagtattttaccaacatcaatttcagagcaactaaatggagatgtgaagctgctacgcattgaagatgcgcatgtacattgggaattaggtgttgtttggaagaaggataaacaattaagtcatgccacaacgaaatggatagaatttttgaaagatcgtttaggctaa

SEQ ID NO: 417663 - DNA, 432 bp, Staphylococcus aureus; identical to SEQ ID NO: 404859

SEQ ID NO: 417664 - DNA, 324 bp, Staphylococcus aureus
atgacattggcaatcgttggcggtggtacaaaagtattaccaattgctaaagcttcattagagctactaaatgtagagtcagcacaagaattaggtcatgtagttgctgccgttggtttagcgcaaaactttgcagcatgtcgcgcgcttgtgtcagaaggtattcaacaaggtcatatgagtttacaatataaatcattagctatcgttgtaggggcaaaaggtgatgaaattgctaaagtagctgaagctttgaaaaaagaaccccgtgcaaatacacaagcagcggaacgtattttacaagatttaagaagccaacaatag

SEQ ID NO: 417665 - DNA, 189 bp, Staphylococcus aureus; identical to SEQ ID NO: 405785

SEQ ID NO: 417666 - DNA, 948 bp, Staphylococcus aureus
atgagacttcaaaaagcacctctagtaacgtcaggactagtcttaggattattaggcctgggtaatctattaaaagacttatctcttactttaaacgctgtttgcggaatctttgctttcttgatttggattcaccttttatgtactatgatcaaatattttaataatgtgaaagaacaattaaacagtcctctagtttcatcagtgttcacaacatttttcatgtctggctttttaggtactacttatttaaatacattttttagtaacataacttttatcaatagcttaataacgcctatttggattttatgccttgtgggaattatgacgcatatgattattttttcaataaaatatttaaaagatttttcacttgaaaatgtttatccttcgtggactgtactttttattggtattgctatcgcaggattgacggcacccgttagcggatattttttcataggtcaattaacagtaatatatggctttgtagctacttgtattgtcttacctatagttttcaagcgattaaaagcatttccattgcagacgtcaatcaaaccgaacacatcgacaatttgtgcaccattttctttagtcgctgcagcatatgttatagcctttcctaaggcgaatgcttttatcgtaattatatttttaatattagctcaaatattttatttttatatcattatacaattgcctaaattactaaaagaacctttttcgcccgtattttcagctttcacattccctttagtaatctcagcaactgctttaaagaacagtttgcctgtacttatgtttccagacatttggaaaggtcttttgtttatcgaagtgttattagccactgtaatagtacttagagtctttataggatatcttcacttctttttaaaaaaggaaaaacaagataaatttcttcgtaatgcgtctcagtaa

SEQ ID NO: 417667 - DNA, 228 bp, Staphylococcus aureus
atgacacatttgacaaaggttttagatacactaactggaatatgcgtagtattattatttagtaaatattttgtggcgtatgcaaatatggtgtttgattggaagttaagatggtatttgctagaaaacataccacatttgccaattatattatttattctgatgtttattttcggagtaccttctgaaatgataaaagataggcaaaggaaaaataacggcgtttaa

SEQ ID NO: 417668 - DNA, 1557 bp, Staphylococcus aureus
gtggaaaatacaattaatgaaagtgaaaagaaaaaacgatttaaattaaaaatgccaggtgcatttatgattttattcattttaacggttgttgcagttatagcaacatgggttattcctgctggtgcatattctaaactttcttacgaaccttcatcccaagaactaaagatagttaaccctcataaccaagtgaaaaaggttccgggtacgcaacaggaactagacaaaatgggagttaaaattaagattgaacaatttaaatcaggtgcaattaataagccggtatcaattccgaatacttatgaaagattaaagcaacatccagctggaccagaacaaataacaagtagcatggttgaaggtacgatagaagcggtcgatatcatggtattcattcttgtactagggggacttattggcgtagttcaagccagtggttcttttgaatcgggattgttagctttaacgaagaaaacaaaagggcatgaatttatgctaattgtgtttgtatcaatactaatgattatcggcgggacattatgtggtattgaagaagaagctgtagcattctatccgattttagtccctatatttatagcgttaggatacgattctatcgtttcagttggtgccatattccttgccagctctgtcggaagtacattttcaactattaacccgttctcggttgtaattgcctctaatgccgctggtacaacttttacggatggcttgtattggagaataggcgcttgtattgtcggtgcgatttttgttattagttatttatattggtactgtaaaaaaattaaaaaagatcctaaagcgtcatattcttatgaagacaaagatgcttttgaacagcaatggtctgtattaaaagatgacgatagtgctcattttactttgcgtaagaagataatccttacattatttgtactaccatttccaattatggtatggggagttatgacgcaaggttggtggttcccagttatggcttcagcatttttaatatttacaattataataatgtttattgctgggacaggtaaatctggattgggagaaaaaggaactgtagatgcatttgtcaatggcgcatcaagtttagtaggtgtatctttaattattggcttagctcgaggtattaatttagtgttgaatgaaggtatgatttcagatacaatcttacacttttcatcatctttagttcaacatatgagtggaccattatttatcatcgtattactatttattttcttctgtttaggttttatcgtgccatcatcttctggattagcggtattatcaatgcctatctttgcaccactagctgatacagtaggtataccaagattcgtcatcgttacgacatatcaatttggtcaatatgcgatgttattcttagcgccgactggacttgttatggccacactacaaatgttaaacatgcgatattcacattggttccgatttgtatggccggtagttgcttttgtattgattttcggtggcggagtactaattacgcaagtactaatttattcataa

SEQ ID NO: 417669 - DNA, 285 bp, Staphylococcus aureus; identical to SEQ ID NO: 405847

SEQ ID NO: 417670 - DNA, 321 bp, Staphylococcus aureus
atgattactgttgatattacagttaatgatgaaggcaaagtaacagacgttattatggatggccatgctgaccatggtgaatatggtcatgatatcgtttgtgctggagcttcagctgtattgtttggtagtgttaatgcgattataggattgacatctgagagaccagatatcaattatgacgacaatggtggtcattttcatataagaagcgttgatacaaataacgatgaagcgcaactaattcttcaaacaatgcttgtgtctttacaaactattgaagaagaatataatgagaatattagattaaattataagtga

SEQ ID NO: 417671 - DNA, 309 bp, Staphylococcus aureus
atgtttgctattattgaaacaggtggaaaacaaatcaaagtagaagaaggtcaagaaatcttcgttgaaaaattagacgtaaacgaaggagatacttttacatttgataaagtattatttgtaggtggagattcagttaaagttggagcgccaacagttgaaggtgcaacagttactgctactgttaataaacaaggtcgcggtaaaaaaattactgtattcacatacaaacgtcgtaaaaattcaaaacgtaaaaaaggccatcgtcaaccatacactaaattaacaatcgataaaatcaacgcgtaa

SEQ ID NO: 417672 - DNA, 531 bp, Staphylococcus aureus
atgcgtacactgtattattttttgataggtattttactattttatatagatactgcaattgggcttcttattccaatgcacataggcaagtttgaacttgtatttgtaccacaccttacatttatgtatattttaatgatggtagtgtatcgtggctttggcgtatcattattgctcagcatatttttaggcgtaatgactgatgtatactttggtagtatttatggagtgtacttatttggctatatattgtttttagcacttatagatcgattctttaaaattttttacaaagatcattcgatgttattcattattatattagccagcaccttattattagaagtctatgtggcattaatatacggtatgttaggattcattcaatttgatattattcattttgtagtctttagattattgccaacattaattatgaattttgtactgttgattatgctttatccgttgattataaagttccttaaaaaaacaaacaatgacattgacatgaaacgtcgtcaatggtaa

SEQ ID NO: 417673 - DNA, 843 bp, Staphylococcus aureus
gtgcttaagttttttaaaaataacaaattaattgttgttttatgtgcaattatcgtttttattgcattaattgggctgtccatacgttcacaatctcaatcacctcctgaacaatatataggtgattctgtgtcttttggacaacgagttgtgagttatccagttaattttgttgctggtacgattggggacttttttaaaaaaggagattctaaagaatctaaaaataagattagccagttagaatctaagaaccaacaattagaagcggaaaatgaaaaattaaaaaaagagcttgatttaaaagatatttcaaaatttgatcctatttctactacagttttagcaagaaatccggatcagtggatgaatacaattgtaattgataagggatctaaatcaggtataactttaaatatggctgtgatgacatcacaaggttttgttggaagagttactaaagttaataaattttcttcacaagttgatttaatctcaactaatacacgtgcgggtaaattatctgtaaatatacaacacggttctaaaaatatatttggtttaattgatcgttatgatgaaaagaactcagaacttgtaattagtgacattaataatagagataatatctcaaaaggtgataaagtcgttacaagtggattagctgatcaactaccaagtaatttatatataggagaagtgactaaggttcaaaatgatcaatacggcttagctaaagaagttagggttaagactggtgcagacttaacagatttgagtcatgtttatgttgcaaaaagagatcctaaaacaattcctgatgatgaaagcagggataaataa

SEQ ID NO: 417674 - DNA, 2607 bp, Staphylococcus aureus
gtgttaaaaaagtggctaaattcaaacgtcaaacaattctttgttataactttcattagtgtaatattaacgcttattttattttctactcatatctatgattatattgtgaatggtactgtttttagtggggctggagatggattccgtcaaatgatgccatttcaaatgtatttgtatgaacatctaagtagtttttctagtttatatgatgcatcgtttggattaggtggcgattatatgaaaggactatcatattattattcgctgtcacctttaatgtggctaaattttctattcattaaaataggagaaacggttggtatatttaatccgacaacaatacatttttggccgacaaaccaacttattatggccatgataagagctatcataacatttgtcgtgaccttctacttatttaaaatattacactttaaacgctcaacaaatatgatcgctacgattttatacggcatgtcaactgtcgttatatactttaattttacttggtcattttatggaaatttattatatttattaccattatcgattcttggtttggaaagatattttcaacaacgcaaaatcggtatattcattgttgcgatagccttaacactatttagcaatttttatttcagttattatcaagctattattataggttgctactatttatatcgactcattttcacttacaaatatgacattgtctctagaacacaaaaattaatttgcgtcatatctgctacagttttgagtgtgttatcaagtgtatttggtttattcactggcatttctgcgtttttggaaaatgacagaaagcaaaatcccaatgttgatataccgtttttgacaccacttgattaccattattttttctttagcgatggattttatattacgatttcaattcttactatcgttgcattattgtcattcaaactgtatcgtttttacttttatagacttttcgcaatagtaacatggatattatttataggttcattatcacagtatttcgacagtgcttttaatggtttttcatttccagaaaggcgttgggtgtatatcttagcactatcatcaagcgctctttgcggattgtttattcaacatttatcaacattaaatatgaaatattatttaatcagaacaatacccgtatgcatcatcgcattactttatgtattactatcaccgacacacccacttgcacttatagtaggtattatcctgctaatggtgcttgccgttattttaaaatttagtttatggcgttataaaaaattaaccgttgcaatattagtattaatcgttatgattcaacaaatcgtcattttagataacaacaaaaatatggcaatcaaaccttatcaacaatcaatatcaacgttgaaacaacatgattatcatagtaactatgtaaaccagcttataaaaaagataaatgaaaatgcaactggtccatttaatcgcattgattatatgtcagactatgcattaaattcaccatttatatatcattataatggcatttcattatattctagtatttttaatggagacatattaaaatattatgacaagacactccaaattaatatgccaatcgataaaaacagcacttatagattacttggcaatcgtcaaaatttactatcactttggaatgttaatgatcgaattagagtgaatcatgatgacaacttaccatatggatttaaaattaagtctgaacacaaagccaataaagttcgttggattcattctaaaaataccatccattatccaagtgcacatattacaaataaggtcttttccaataaagaattaaaatctccattagataaagaacaagcaatgttgcaagggattgtttctaacaatactaaagatgttaatacacattttaaagccaataaaaatttactatcagattcaacaattaaattaaatagtgcagcctggcaatctcctacaaaacatttattacaagttaaacaaaataatggtggtctaactgtacagttgccaaaatcagtttctaatcaatttaaagatttgtattttgaaatggatttagaattactttcgccggataaagctcatgatgttaaagtgaatgaatatacacaagaaagaaataaactcacttataaatatcgacgcgttgtaacacccgtaacgatacgcattaaagcttcagatagaattagattatcattgcctaaaggtaagtatcgagtaaatttaaaagggatatacggcgaagattataccacgcttaaagacgcttcaaattcattagaagctgtcaaagttagtaagacaaagcatggttatactattactaaaaataaaaattcatctgggtatattgttttgccaacagcatataatcaaggtatgaaagcgacatcaggtgatcaaagtcttaaagttgaacaagtaaatggtgttatgaccggcattaaagcacctaaaaatataacaaagattcaattgagctataccccaccatactattatttgcttataacaattactatatttggcattatatgtagtattattttcacgagatgggcaagacaaaaataa

SEQ ID NO: 417675 - DNA, 483 bp, Staphylococcus aureus
ttgaaaaagtttttaaaattcaaggggatgaaaatatgtttaatgctatatctactgatttttttaagtagttgtggcacaaataataaaatagtaggccaacgatttgaaatacaacaacataatgaaacaataggtagtatttacttttcagcagactatgcacatataagaggtatagaaaaaggcactgcaaaatatttcatagacaaagtaggcagcaaacgttacttatttattgaatatattccggataatgtattgaattgcaagccggacttttggaaaacgttaaaatataaaaaggacaaggtaacatattatgtatatctcattgaaaatttagatgatgaagtattccatttaagtgcattacaagacatgaatcgtataccaattgacattgcagatgatgtggcaacaatgggtaaatcaccacatcaaaatgacagaatgacactaaaattaaataaaaataactga

SEQ ID NO: 417676 - DNA, 615 bp, Staphylococcus aureus
ttgaatacagagaacaacaagaatcaaaaccaatctgttaaaaattctgaaagacgcggcatgttaaaaggatgcggcggttgccttatttcttttattttattaataatcttattatcagcctgttcaatgatgtttagtaataatgacaattccactagtaatcaatcatcaaaaacgcaattaactcaaaaagatgaaaataaaaatgaagataagcctgaggaaaaatcagaaacagcaacagatgaggatttacaatcaaccgaagaagtacccgcaaatgaaaatactgaaaataatcaacatgaaattgatgaaataacaacaaaagatcaatcagacgatgatattaacacaccaaacgttgcagaagataaatcacaagacgacttgaaagatgatttaaaagaaaagcaacaatcaagtaaccagcatcaatccacgcaacctaagacctcaccatcaactgaaacaaacacgcaacaatcatttgctaattgtaagcaacttagacaagtatatccgaatggtgtcactgccgatcatccagcatatcgaccacatttagatagagataaagataaacgtgcatgtgaacctgataaatattaa

SEQ ID NO: 417677 - DNA, 996 bp, Staphylococcus aureus
atgagcaatcaattcaaaagcgaagaagagcgaagacaatgggaacaattccaagctttccaaaatcaacaaaaccaacagaaccagcaatacggacaaaagaaatctaaaaaaggatggttctggggctgtggtggttgtctagtattatttattttaattatcatcggtatttcagcttgtacagctggtattacaggtaaccttggcggaaatagttctaaagaaacgaacaaaacccataaaatcggtgaaactgttaaaaatggcgaccttgaagtcactgtaaattcagtggaaactatgaaatctgtaggaccgtctcttgcaccaacaaacgctaaaggtacatttgtcgttgctgatgtgacaattaaaaacaaaggtaaagaagcgttaacaattgatagttcaatgtttaagttaaaatccagtgataaaacatttgaagcagataatacaggttcaatgtctgctaatcaaagtgacaatggtagtatagaaaattcatttttcttacagcgtataaatcctgatagcactgcacaaggtaaaattgttttcgatgtgtcagaaaacatagccaacgcaaaagataaaaaattagaagttatttctagtttatttagcgtcaagaagattacatttgatttatccgatgctaaaaaaacatcaaaagctaaaaaagacaagcaagatacagaagtagctgttgcgagttcaaatagcgataatgtaaattatgaagcttcggctactacacctgctacaacttctagtgcggatactgattctgaagatagcgaaaagtctagtaaagatgaggataaacagaatgcgtctaaaagtgataaatctagtgtagaaaaaagtgaatctaatgaggaaactgctactgtagagcccatgccccagagcaaacctaccactagtgaagcaccacctagtcaaaatattcacaatgaagatagcatgtacgacgcttcaacagaataa

SEQ ID NO: 417678 - DNA, 141 bp, Staphylococcus aureus; identical to SEQ ID NO: 414477

SEQ ID NO: 417679 - DNA, 360 bp, Staphylococcus aureus
ttgtatcctggtttaacaaaaagtgattttaaatcgaagaataatattgtaaatattattaaacaagatgaagattttcatgtaataaaagataatgatggcatatttgctggggttaattatagtgatagtactaaaacttttgacattaatggtactaaagtcgaagttaaagccaaaggtatgtttgtaattaaaaagaaagatgataaaacatatgaatgtagcttctataatcctgaaactacaaatacagcttcaaatatagaatcaaaaatttcaattgcaggttacactttaattaataaaagtgtcacaaactctaatgaggccggtgtaaactttgaattaactaaataa

SEQ ID NO: 417680 - DNA, 507 bp, Staphylococcus aureus
atggcccatattatacgtagagttagtatcaaagatgtagaaaatttcatttcaatgttagcgaaaatatacgacgaatctccgtatatgttctacacaccaggagaatatgatcctagcgtcacatcggctagtaaacaattagaagaatatatcacttctccacataaagtcatcttcgttgctgaaagtgatgaacaactcgttggctttgcctttgttaatacgacaccatttcaacgcattaaacatgttgctaaaattgatttaggtgtaaagaaattatatcaacatcgtggaattggccaagcacttcttgatgccattatggcttggtgtttaaacaatcaaatacaccgaattgaagcaaatgtaccactcaataaccaacctgccctcgagctttttaaaagtgccgattttcaaatcgaaggcgttttaaaagataagttatttatcgatggtaaatattacgatgactatatgatggctaaaattcttaattaa

SEQ ID NO: 417681 - DNA, 924 bp, Staphylococcus aureus
atgaaacctaaagttttattagcaggtggaacaggatatattggtaagtatttaagtgaagtgattgaaaatgatgctgaactttttgctatatcaaaatatccagacaataaaaaaacagatgatgttgaaatgacttggattcagtgtgatatatttcattacgaacaggttgttgcagcaatgaatcaaatagatattgctgtattctttatcgacccaacaaagaattctgccaaaataacacaatcatcagcaagagatttaacattaatcgcagcagataattttggtcgagcagcggctatcaatcaagtaaaaaaagtaatctacatacctgggagtcgttatgataatgaaacaattgaacgcctaggtgcatatggtacacctgtagaaacaacaaatttagtttttaaacgttctttagttaatgtagaattacaagtttcaaagtatgatgatgttagatcaacgatgaaggtagttttaccaaagggatggacattaaagaacgttgtaaaccattttattgcatggatgggttacactaaaggaacttttgtgaaaacagaaaaatcacatgatcaatttaagatatatattaagaataaggtgcgaccgctcgcagtatttaaaatagaggaaacagctgacggaataataactttaattttattgagtggaagtttagtgaaaaaatatacagttaatcaagggaagttagaatttagattaatcaaagagtcggcagtcgtttatatacatctatacgattatatccctcgattattttggccgatttattactttatacaagcaccaatgcaaaaaatgatgattcatggctttgaagttgactgccggattaaagattttcaaagtcgattaaaatcaggagaaaatatgaaatatactaaatga

SEQ ID NO: 417682 - DNA, 675 bp, Staphylococcus aureus; identical to SEQ ID NO: 406085

SEQ ID NO: 417683 - DNA, 1260 bp, Staphylococcus aureus
atgacgtatgatgcggtaaatcagattattactgaaaaggatcctaacattcgcgaacaatataaagaaattacgcctatgttagatttagcacaagatttatctaatcgtttgattcaaatgagaaaacgacgtggtgaaatcgattttgatattagtgaagcaaaagtattagttaacgaagtcggtataccaacagatgttcaattaagacaacgtggcgagggtgaacgtctaattgaatcatttatgttaattgcaaatgaaacagttgctgaacattttagtaagttaaatgtaccttttatttaccgagtgcatgagcaacctaaatcagatcgcttaagacaattctttgattttattacaaactttggcatcatgattaagggtactggggaagatattcatccaacaacacttcaaaaggttcaagaagaagtagaaggtcgacctgaacaaatggtcatttcaacaatgatgttacgttcaatgcaacaagcgcattatgatgatgtgaacttgggacattttggcttatcagctgaatattatacgcattttacatcaccaattagacgttatcctgatttaacagttcatcgtttaatccgtaagtatttaattgagaaatcaatggataacaaagaagtgaagcgttgggaagacaaattgcctgagttagctgaacatacttctaaacgtgaacgtcgtgctattgaggcagaacgtgatactgatgaattgaaaaaagcagaatatatgattcaacatattggtgatgaatttgaaggtattgtcagctcagtagctaacttcggtatgttcattgaattgccaaatacgatagaaggtatggttcatattgcgaatatgactgatgattattaccgttttgaagagcgtcaaatggcattaattggtgagcgtcaagctaaagtatttagaattggtgacacagttaaggttaaagtgacgcatgttgatgtagatgaacgattaattgattttcaaattgttggaatgcctttacctaaaaatgaccgctcacagcgaccagcaagaggtaaaacgattcaagctaaaacgcgtggcaaatctttagataaatcgaaatctgatgataagggtcgtaagaaaaaaggtaagcaacgtaaaggtaaaaaccaacgtaataatgataaatcaggtaatagtaagcataagccattttataaagataaaagtgtgaaaaagaaagcacgtcgtaagaaaaaataa

SEQ ID NO: 417684 - DNA, 705 bp, Staphylococcus aureus
atggctagtgttttatatcaacatggtacattaggcacattaatggcaggtttattaaaaggaactgcatcaataaatgaattattgcagcatggtgacctaggtatcgctacactaacaggttcaaatggtgaggtcatctttttagatggaaaagcctatcatgcaaatgaacataaagaatttgtggaattaaaaggtgatgagttaacaccatatgcaactgtaactaaattcgtagcagatacaagctatgaaacgaaagataaatcttctgaagcagtttttgcagaaattaaggaaaagatgttgagtgaaaatttattttctgcagtaaaaatttcaggattatttaaaaaaatgcatgtacgtatgatgccggcacaagagccaccttatacacgtttaattgattcagctagaagacaacctgaacaaactgaaacatacgtcaaaggttcagtcgttgggttctttacaccagaactattccatggtatcggatcagcaggattccatgtacactttgcaaatgatgatcgtaattttggtggacatgtcttagattttgaagtagaagatgttaaggtagaaatccaaaatatagaaacatttgaacagcattttccaattcaagatgaagatttcataaatgcaaatattgactataaagatattgcggacgaaattagagaagctgaataa

SEQ ID NO: 417685 - DNA, 480 bp, Staphylococcus aureus
atggcacgtaatttcagaagttacaatccaagacatttattatttagtaacggtatgcaaacgcttggtgtagcattaccgtgggcaatttcagctgcgcttgtacgtcctaatacgcaagttgtatccgttgctggcgatggaggctttttattttcatcacaagatttagaaacagccgtacgtaaaaatctaaacattattcaacttatttggaacgatggaaaatataacatggttgaattccaagaagaaatgaaatataaacgttcatcaggtgtcgacttcggtcctgtagatttcgtaaaatatgctgaatcatttggcgcaaaaggtttacgagttactaatcaagaagaattagaagcggcaattaaagagggctatgaaacagatggaccagtattaattgatatacctgtaaattataaagataatatcaaactttcaacaaatatgttacctgacgtatttaactaa

SEQ ID NO: 417686 - DNA, 1071 bp, Staphylococcus aureus
atggctgaaaataaaaacaatttgtcgattaacgacgatcattctaatgcagctatgacgcatacctctgacgctatcgcatcatctgattttattattagagaattagatttgaatcaggaacctgaaatgcaacgagaaagcaaaaacttttggcaagatgcttgggctcagttaaaacgaaataagttagctgttgtcggtatgataggtttaattatcattgtaatatttgcttttatcggtccagttataaataaacatgattatgctgaacaaaatgtacaacatagaaatcttccggcaaaaataccagtattagacaaagttccatttttaccttttgatggtaaagatgcagatggcaaggatgcttataaagcagcaaatgctaaagaaaattattggtttggtactgatcagttgggtcgagatttatggacaagaacatggaaaggtgctcaaatttcattgtttatcggtgttgttgcagcgatgttagatatttttattggcgttgtatatggtgcgatttctggattcttcggtggacgtgtcgatacgattatgcaacgtatacttgaagtcatagcatctattccgaatttaattgtcgtaattttatttgtattaatttttgaaccatccatttggacaattatattggctatgtctatcacaggctggttaggcatgagcagagttgtacgtggagaatttttaaaattaaaaaatcaagagtttgtcatggcttcgaaaacattgggggcttcaaaattcaaattgatatttaagcatattttacctaatacattaggtgctatcgtggttacatcaatgtttacagtacctagtgctattttcttcgaagcatttttaagtttcattggtataggtgtacccgcacctcaaacatcgttagggtcattagtaaatgatgggcgcgcaatgttattaatttatccacatgaattatttataccagcaatgattttaagtttattaattctattcttttacttatttagtgatggattacgtgatgcatttgatccgaaaatgcgtaaataa

SEQ ID NO: 417687 - DNA, 666 bp, Staphylococcus aureus
atgaatattttggttataggtgctaatggcggtgtaggttcgttactagtgcaacaattagcaaaagaaaatgtaccatttactgcaggtgttaggcaatcagatcaacttaatgcgttaaaatcacaaggtatgaaagcaattcttgttgatgttgaaaatgattcaatagagactttaactgagacgtttaaaccattcgataaagttatcttttcagtaggttctggagggaacacaggtgcagataaaacaattattgtcgatttagatggtgctgttaaatcaatgattgcgagtaaagaggctaatattaaacactatgtcatggtttcaacatatgattcgagacgtcaggcttttgatgatagcggtgatttaaagccatatacaatagctaaacattacgctgatgactatttaagacgttcaggtttgaattatacaattttacatccaggggcacttacaaatgcagcaggatctggaaagatagaagctgcacaatattttgatggtaaaggtgaaattcctagagaagatgttgcgacagtattaaaagaaattgtcacatccaatcattttaatcaccaagagtttcaaattattagtggtgagcaggacattaaagatgctttaactcaatttgaaattgaaaaggattaa

SEQ ID NO: 417688 - DNA, 321 bp, Staphylococcus aureus
atgtcagaacaatattcagaaataaatacagatacattagaacgcgtaactgaaattttcaaggcattaggcgattacaatcgaatacgtatcatggaattgttatcagtcagtgaagcaagtgttggtcacatttcacatcaattgaatttatctcaatcaaatgtctcgcaccaattaaaattacttaaaagtgtgcatcttgtgaaagcaaaacgacaaggccaatcaatgatttattcattagatgacatccacgtagcaactatgttaaagcaagccatacatcacgcgaatcatcctaaagaaagtgggttataa

SEQ ID NO: 417689 - DNA, 642 bp, Staphylococcus aureus
atgattacaactactgctcagccagtaaaagcaaacgaaattagtagcagattatcagttacttcaaaagatacacaaaatttaaagacgtattatactggagcaagttttgatcttagaggattaagcggatataaagaaggagataaagtaatatttcctcaaaatggtcaacaaattgatgttacattaacaggtaaagagggagacgtggttcaacctaatgacgacgttacaaatgttgatgtgtttgctgttcctgaaggtacaggtcgttctgccataatgactacaattggtggaattactacaccaaacactcaaagttataaagacactacaaataatgtgaacttaagagtatcaaagagtacaagtccaaataccacatctgtgtctgtaaaaaaatatgatatttttaaagaaaaaatttcattaaaagaacttgatttcaaattaagaaagcatttaattgataatcatgatctttataaaacagaacctaaagacagtaaaattataattaatatgaaagatggcggctactacacatttgaattaaataaaaaattacaagaacaccgcatgggtgatgtaatagatggtactaaaataaaagaaattaatgttgaattaaactaa

SEQ ID NO: 417690 - DNA, 198 bp, Staphylococcus aureus; identical to SEQ ID NO: 406995

SEQ ID NO: 417691 - DNA, 609 bp, Staphylococcus aureus
atgaataaattaacaataataagtttatcgatacttgataataaagaaaaaaaagcaaataagtttgaattttcagaaaaatctaatttgataattagcgaaaggaacggggaagggaaatctagccttataaaatcaatacagtattgtttaggatcaaatttaaaagcgtttccaaaaggatgggactacaaaaattatgtttttcaattagaaatagttattgataaaaataagatattgattcagagatataataatataataacagttttagatgatgggaaaattaaaaagtttggatacttaaaagactattctgattggtttcaagataagatggagatgaatttaaaattagttagtaagaataaaaatacttctagtttagcttcactggaagctattttgagcccattgtatattgatcaagataaatcatgggatggaattctatataagaactcatttgagggtttagcacaatataaaagtcaaagttttcctaaagaagtatttgaatactatttaggtatttctaataatataatgaatgataaaataaataaactcaataaatataaagagaaatcgaaagaaaaaaagtga

SEQ ID NO: 417692 - DNA, 1815 bp, Staphylococcus aureus
ttggaagactatataatttatgctataggattaactaataaatatgaatatggagataatatttataaagaagctaaagataggttgttggaaaaggtattaagggaagatcaatatcttttggagagaaagaaatctcaatatgaagattataaacaatggtatgcaaattataaaaaagaaaatcctcgtacagatttaaaaatggctaattttcataaatataatttagaagaactttcgatgaaagaatacaatgaactacaggatgcattaaagagagcactggatgattttcacagagaagttaaagatattaaggataagaattcagacttgaaaacttttaatgcagcagaagaagataaagcaactaaggaagtatacgatctcgtatctgaaattgatacattagttgtatcatattatggtgataaggattatggggagcacgcgaaagagttacgagcaaaactggacttaatccttggagatacagacaatccacataaaattacaaatgaacgtattaaaaaagaaatgattgatgacttaaattcaattattgatgatttctttatggaaactaaacaaaatagaccgaaatctataacgaaatataatcctaccacacataactataaaacaaatagtgataataaacctaattttgataaattagttgaagaaacgaaaaaagcagttaaagaagcagatgattcttggaaaaagaaaactgtcaaaaaatacggagaaactgaaacaaaatcgccagtagtaaaagaagagaagaaagttgaagaacctcaattacctaaagttggaaaccagcaagaggataaaactacagttgataaagctgaagaaacaacacaaccagtggcacagccattagttaaaattccacagggcacaattacaggtgaaattgtaaaaggtccagactatccaactatggaaaataaaacgttacaaggtgaaatcgttcaaggtccagatttcccaacaatggaacaaaacagaccatctttaagcgataattatactcaaccgacgacaccgaaccctattttagaaggtcttgaaagtagctcatctaaacttgaaataaaaccacaaggtactgaatcaacgttgaaaggtattcaaggagaatcaagtgatattgaggttaaacctcaagcatctgaaacaacagaagcatcacattatccagcgagaccgcaatttaacaaaacacctaaatatgttaaatatagagatgctggtacaggtatccgtgaatacaacgatggaacatttggatatgaagcgagaccaagattcaataagccatcagaaacaaacgcatacaacgtaacgacaaatcaagatggcacagtaacatatggcgctcgtccgacatacaagaagccaagcgaaacaaatgcatacaatgtaacaacacatgcaaacggtcaagtatcatacggcgctcgtccgacatacaacaagccaagcaaaacaaatgcatataacgtaacaacacatgcaaacggtcaagtatcatatggcgcccgcccgacatacaacaagccaagcaaaacaaatgcatacaacgtaacaacacatgcaaacggccaagtatcatatggcgctcgcccgacacaaaacaagccaagcgaaacaaacgcatataacgtaacaacacatgcaaatggtcaagtgtcatacggggctcgcccgacacaaaacaagccaagtaaaacaaacgcatataacgtaacaacacatgcagatggtactgcgacatatggtcctagagtaacaaaataa

SEQ ID NO: 417693 - DNA, 1299 bp, Staphylococcus aureus
atgacaaaacatgaacaaattttagattatattgaatcgttatctataggctctaaaatttcggtgcgtaaaatcgctaaatttttaaacgtatctgaagggacagcatatcgtgcaattaaagatgctgataaaatgggcatggtcgcaacgatagatcgtgttggtacggttcgaatcgaaaaacgtaatcgtaatgaaattgaacatttaacttttaatgaaattgtcaatattattgatggccaagtgttaggtggcaacaaaggtatcactaagatggtatctaaatttgcaattggagcaatggaactcaaagatattttaaagtatattggtccaaagacattattgattgtcggaaatcgtgaagatgtgcagattgaagctttaaaaagaggtacggctatattaattactggtggatttaagccatctaataaagttattaattttgcgaatgaacatgatttacctgttctatcatcaagttatgatacattcctagttgcaaatattatcaacaaagcactttttaatcagaaaatacgaaaagatatcttaatagttcaagatataatgacgccattagatgatttatctgtgctgtttgatacgatgaaaatagcagattataagcgtatggcgaatcgaactggccatacaagatttccggtagtcaatgagtcttataaattagtaggtattgtaacaagtcgagagatgattaatacaaaggacgacgacgaaatagataaagtgatgacgcgaaatcctatttatgtaaatgctatgagtacagtagcaagttgtgcgcatatgatgatttgggaaggtattgaattgattcctgtcgtttcgagtaataaaaagacagtgggtgtgattaatagacaagatgttttaaagtctatgcaacttttaggaagacagcctcagatgggtgaaacaattaacgatcaaatcgccaaatatataacaatgaatcaagatggaattacagtagaagtttcaccacttttaatcaatcattacggaacagtaagtaaagcggcatttgtaagtattatagaagaaacaatacaatatgaaatgcgtaaatttaaaaaaggtaatgtcatgatagagaacttaaatatcgtgtatattaaaacagtacctattgaatcacatataacagtgcgctttggcatactagacgtcggaagaaacttcgccaaaatagaagtgaacatgcatagtcaaaacgacaaagtagcgagcgctctcgtgatatgccaaatgtttgacgaagtatag

SEQ ID NO: 417694 - DNA, 414 bp, Staphylococcus aureus; identical to SEQ ID NO: 406627

SEQ ID NO: 417695 - DNA, 537 bp, Staphylococcus aureus
gtgctaaactcaatatgtatttcctaccaaagaaaacataaggagtttggacatcttgaaggagatactattgttggtcgtcgtcatggtagtgcaatcattactttggtagaaagagtatccaagatgattatcaccttacgacccttaggtcgtaaggcaactgatatagaaaacgctctacactcaatgttttcatctttaccttctcatatatttaaatcaattacttttgattgtggtaaggagttctcaaactggaaaacattatgtaactgtcacgatatatctatattttttgctaatccaggcacgccatcacagcgaggtttaaatgaacattctaacggaatacttagacgcagtggattagataaagaactagatttcaatttagtaacagactatcatatcatcagtgttgctcaaaaaatcaatcatcgtcctagaaaatctttaggttatagaacaccattggaagtatttatgagtttcatagaagatgataaacttgtccagcttaatttgacaatctaa

SEQ ID NO: 417696 - DNA, 282 bp, Staphylococcus aureus
gtgttctcaaactggaaaacattatgtaactgtcacgatatatctatattttttgctgatccaggcacgccatcacagcgaggtttaaatgaacattctaacggaatacttagacgcagtggattagataaagaactagatttcaatttagtaacggatgatcatatcatcagtgttgctcaaaaaatcaatcatcatcctagaaaatctttaggttatagaacaccattggaagtatttatgagtttcatcgaagatgataaactgtccagcttaatttga

SEQ ID NO: 417697 - DNA, 192 bp, Staphylococcus aureus; identical to SEQ ID NO: 417056

SEQ ID NO: 417698 - DNA, 144 bp, Staphylococcus aureus
gtgccatacataccagagcaggttgatggtaaatccgataaaccatcaatgacattagaaaacattgttacaggactgactgcagctattgaagctatttctgatgacgatgatttacgtatagctctaggcacaacggaatag

SEQ ID NO: 417699 - DNA, 198 bp, Staphylococcus aureus
atggcatttaatactaataactcttctaagttattacaaccgacaattgtttgtttcaattcaattgctaaatcatcatcagttagatttcgtgcacgttcaggtaatgtttggagaccttctaaaatcttttcaatactcggtacttcatccttccattcatctggagacgaaccatttccgaataaaggtctatag

SEQ ID NO: 417700 - DNA, 696 bp, Staphylococcus aureus
ttgttagaacctgactcggaatcgctatttgaatcactttctgagtcggagtcactatctgattctgaatcgctacctgaatctgagtcgctgtctgaatctaagtcactgtctgagtctgagtcactgtctgagtcggaatcactatctgaatctgagtcactgtctgaatctgattcgctatctgaatccgagtcactgtctgagtcggaatcactatctgaatctgagtcactacctgagtcagaatcactcgctgaatctgaatcgctgtctgagtctgagtcactatctgattctgaatcgctgtctgagtctgagtcattatctgattctgaatcgctgtctgagtcggaatcactgtcggaatctgaatcgctatcggaatctgagtcactgtctgagtcggaatcactgtcggaatctgaatcgctatcggaatctgagtcactgtctgagtcggaatcactgtcggaatctgaatcgctatcggaatctgagtcactgtctgagtctgagtcgctatctgaatctgagtcactgtctgagtctgagtcactgtcggaatctgaatcgctatccgagtctgagtcactgtcggaatctgaatcgctgtctgagtctgagtcactgtctgagtctgaatcgctgtctgagtctgaatcgctgtctgaatctgagtcgctatctgagtag

SEQ ID NO: 417701 - DNA, 744 bp, Staphylococcus aureus; identical to SEQ ID NO: 413989

SEQ ID NO: 417702 - DNA, 1590 bp, Staphylococcus aureus
atgacaaggatattaagtgaagatcagtatttacttgagaaaaaaattaaagaatatgacaagtataaagatttatataaagaatatatgagtaaaaatccaacgtcaaaggtaaaaagagcaaattttgatcaatataatatcgaagacctaagagaaaaagaatataatgatttactaagttctattaaagatgcggtagaaacatttaaatcagatgtacaaaaaatagaatatgaaaataaagagttaaaatcttattcttacgaagaagaaaagaaggctgcttctagagttgatgatttagcaaataaagcgtatagcgtttattttgcgtttgttagggatacacaacataaaactgaggcattagagttaaaagcgaaagtggatttagttttaggtgatgaggacaaaccacatcgcatctctaataaaagaattgaaaatgaaatgctaaaagatttagaatctattattgaagatttctttatagaaactggtttaaataaacctgataatattacgagttatgatagtagtaaacatgactataaacatcatagagaaggctttgaggctctagttaaagaaacaagagaagccgtcgataaggctgacgaatcttggaaaactaaaactgtcaaaacatatggtgaagctgaaacaaaagcacatgttgtaaaagaagagaagaaagttgaagaacctcaagcacctaaagttggaaaccagcaaggggataaaactacagttgataaagttgaagaagcaacacaaccagtggcacagccattagttggaattccacagggcacaattacaggtgaaattgtaaaaggtccagactatccaacgatggaaaataaaatgttacaaggtgaaatagttcaaggtccagattttctaacaatggaacaaaacagaccatctttaagtgacaattatacacaaccatctgtgactttaccgtcaattacaggtgaaagtacaccaacgaaccctattttagaaggtcttgaaggtagctcatctaaacttgaaataaaaccacaaggtactgaatcaacgttgaaaggtactcaaggagaatcaagtgatattgaagttaaacctcaagcaactgaaacaacagaagcttctcaatatggtccgagaccgcaatttaacaaaacaccaaagtatgtgaaatatagagatgctggtacaggtatccgtgaatacaacgatggaacatttggatatgaagcgagaccaagattcaacaagccaagtgaaacaaatacatacaacgtaacgacaaatcaagatggcacagtaacatatggcgctcgcccgacacaaaaaaagccaagcaaaacaaatgcatacaacgtaacaacacatgcaaatggtcaagtatcatatggcgctcgcccgacacaaaaaaagccaagcaaaacaaatgcatataacgtaacaacacatgcaaatggtcaagtatcatacggagctcgcccgacatacaagaagtcaagcgaaacaaacgcatataacgtaacaacacatgcagatggtactgcgacatatgggcctagagtaacaaaataa

SEQ ID NO: 417703 - DNA, 408 bp, Staphylococcus aureus
gtgataatggcacttgacgctgtttccaaaaatcatcgaacagagggtgttcttgttgtgcttgaatcaaatcttcgatatttggattatctgtccatctcgcaaaaataccttgagtccagaaacgataaaagccagtatccggtatacctccatgaaaggctacttctctatacatatcatttaagccttcccaaggaatcattgcttttaaatgtggtggatttaatgatgcgacccaccattgagtcaccgcaagataagaaacaccatttgtcccgatatttccattactccatgactgatttgctgcccattcaatcacttcgtaataatcttccgcttctctttttgaccatggagataagacgccttttgatttgtcactaccgcgtaatgcaactttaa

SEQ ID NO: 417704 - DNA, 588 bp, Staphylococcus aureus
atgactatagatcgacgtattagaaaatcacaagttgcaatgagaaatgcatttattgaacttttacatcaacaccaattagaagagattactgtgcaacaaattgcagatttagctgatgttaaccgtagtacattttatacgcattattatgataagtatgatttgcttgaaaaattagaggaccagcagttggaggaaataagagacttcattcatgatgagaagttaaatggagcagttaagttatccacggataacatacatcaaattatgaccgttttaatagaaatgatagaaaaagacatcgcattttatcaattgatgtttcgtatgggtaaagattcaaatatccacgaaaaactttatgatttaattatgtgtcatttacaacgttataaaaacgaaaatgatcaaattaatggtataccattttcttatttcatgagttatgtttcaggtgcgggattgtcttttataagacattgggtagaagatccaaaccgtatagacaaagttgacttaataaggcattttaatacgattgtcaatcaagggccagcaacgataattaaaaatatacaataa

SEQ ID NO: 417705 - DNA, 903 bp, Staphylococcus aureus
atgggtggtatttatggtaccgatattgataaattaagtttgatgagtacgtttcctaattttaaagaaaaagaagaggcattcggaagtctgataaaaggtatgaaggatgagaaaaataagcgtctgaaacaaagacaattatatcctggcgcaccaaaaggacaattcaaacaatttaagcatggtttaagctcatttattgaagcattagaacaagatgtgaaaaataaaggtgtgacaatacgctacaatacgtcagtggatgatattattacatctcaaaagcaatataaaattgtttacagtaatcaacaagaagatgtattcgatggggtattagtgacaacaccacatcaagtgtttttaaattggtttggtcaagatccagcttttgattattttaaaacgatggatagtacgactgttgcaactgttgtattggcatttgatgaaaaagacattgaaaatacccatgatggtactggcttcgtgattgcgagaacgagtgatacagacattaccgcatgtacttggacatcgaaaaaatggccatttactacaccggaaggtaaggttttgattcgtgcgtatgtaggtaaaccaggtgatactgtggttgatgatcatacagataatgaattagtatcgattgtacgtagagatttaagtcaaatgatgacatttaaaggcgatcctgaatttacaattgtcaatcgtttgccgaaaagtatgccacagtaccatgtcggtcatattcaacaaattaggcagattcaagcacatattaaacaaacatatccacgacttagagtaactggtgcatcttttgaagcggttggactacctgattgtattacacaaggtaaagttgctgctgaagaaatagttgcagagttgtaa

SEQ ID NO: 417706 - DNA, 555 bp, Staphylococcus aureus
atgacagatgtaattattgtacattctatgcatggaaatagtagaaatcattggtatcagtggttggagcataacttaactttagaaggatatgacgtaacattatttaattttgaatcccctgaagcgaagacagtggatcagtggattgaagctatgacgaaacaaattaatgtacgcaaaaaggatacatattttgtaacacatggtttaggttcaatcacagctttaaaatatattgaaatgattgatcagccgattgaaggctttttcagtatagcgggctttaaagaagatgcagaaaatatagatttagatattgatttaagtaatgtaaccattgattacgataatattaaaaagaaagttgacaatttttacggattgagttctaaaaatgacaaatacgtttcatataaagaaacccagcgtttaatgaatgcattagaggggaacttgcgaatcgtggaagatggagggcacttcttagaagaggatggcttcgaaacatttacagcgttgcaagatcggatgcaagattacatgacacgatag

SEQ ID NO: 417707 - DNA, 888 bp, Staphylococcus aureus
gtgaagaaatcgttaattgcttttattttgatttttatgcttgtcctgagtggctgtggtatgaaagataatgataaacaaggtagcaatgataatggctcgtctaaatcgccgtaccatagaattgtttcgttaatgcctagtaatactgaaattttatatgaattaggattaggtaaatacatagttggtgtttcaacggttgatgattatccaaaagatgtgaaaaagggtaagaagcaatttgatgctttgaatctaaataaagaggaacttttaaaggcaaagccagatctaattcttgcgcatgagtcgcaaaaggcaactgataataaagtattgtcatcattagagaaacaaggcatcaaagtagtatatgttaaagatgcacaatcaattgatgaaacttacaacacatttaagcaaattgggaaattaacgcatcatgataagcaggctgaacaacttgttgaggaaactaaagataatatcgataaagtcatagattcaattcctgctcatcataaaaaatcaaaagtatttattgaggtttcatcaaagcctgaaatatatacagcagggaagcatacattttttaatgatatgttagaaaaattagaagcccaaaatgtgtatagtgacattaatggttggaaccctgtaacgaaggaaagtattattaaaaagaacccagatatattaatttcgacggaagctaagacaagatcagattatatggatatcatcaaaaaaaggggtggattcaataaaattaatgctgtcaagaatacacgtattgaagttgtaaatggtgatgaagtatcaagaccaggtccacgtattgatgaaggattaaaagaattaagagatgcaatttatagaaaataa

SEQ ID NO: 417708 - DNA, 708 bp, Staphylococcus aureus
ttggtagtattgttatcttatagttgcagttgtatctttagttttctatatcaatttatatctatagaagaaacgtcatttgattatttacatagaagatcgaaatgtgattattgtaattcattactcaaatggtatgaattaatgccgattattagttttttattattaaaagggcgatgtcgaaactgtcgaaagcgtatttccctaacacatttcttaggggaaacctttgctttgatacctatcgtctttattaagtatgatttcacatacgtaaatgctacgctatttataactacatatgtttttctgcttatttttactatgaccgatatcacttctttaatgttagattgtcgcttaattataatttattgtatcgtttctctctcgttaagtatgatttatccagtagcttttatcattattagtatgaccacgcatatattctactttttatttcgggcatatattggttatggtgacgttttactaatatctgcactttctttgtttttccctctccaattcactatttatgtcattttatttacatttgtcattgctggtttagttgctttaattaccatgatatttaaggcgattaaactattaccccttgttccatttatatttatttccttttttatcaattcacttttttataatgatatccatcaatttttaggaggcgtatatttttga

SEQ ID NO: 417709 - DNA, 537 bp, Staphylococcus aureus
ttgacacatctaattgcaggtgtttatcagccaacaataggtactataagtacaaaccagcgtgatttaaatataggaatacttagtcaacagccatatattttcagtgcttctataaaagagaatattacgatgtttaaagatatagaaaataatactattgaagaagtgctagacgaagtaggtttattagacaaagtgcaatctttcacaaaaggcattaacacaataataggtgaaggaggcgaaatgttatctggtggacagatgagacgcatagaactttgccgtcttttagttatgaagccagatctcgttatatttgatgagcctgcaactggtttagatattcaaacagaacacatgattcagaacgttctgtttcaacattttaaagatacaacgatgattgtcattgcacatagagataatacaattcgccatttacaacgacgcttgtatatagaaaatggaagactgattgctgatgatcgcaatatttcagtaaatataacagaaaatggtgatgacttatga

SEQ ID NO: 417710 - DNA, 699 bp, Staphylococcus aureus
atgaaattaacagggatagctaaagcgatatttgtattaggaatattaacaacaagtgcaatgataacagaaaatcaatcggttaatgcaaaaggaaagtatgaaaaaatgaaccgtttatatgatacaaacaagttacatcaatactattcaggacctagttatgagttaacaaatgttagtggccaaagtcaaggttattatgactctaacgttttgctttttaaccaacaaaatcaaaagttcaaagtgtttttattgggaaaagatgaaaataaatacaaagaaaaaacacatggtttagatgtctttgcggtaccagaattagtagatttagatggaagaatatttagtgttagtggtgtaacaaagaaaaacgtaaaatcaatatttgagtctctaagaacgccgaacttactagttaaaaaaatagacgataaagacggtttttctattgatgaatttttctttattcaaaaggaagaagtgtcattgaaggaacttgattttaaaataagaaaactgttgattaaaaaatacaaactgtatgaaggatcagctgataaaggtagaattgttattaatatgaaagatgaaaataagtatgaaattgatttaagtgataaattagatttcgagcgtatggcagatgtcattagtagtgaacaaattaagaacatcgaagtgaatttgaaataa

SEQ ID NO: 417711 - DNA, 501 bp, Staphylococcus aureus
atgactttcgaagaaaaactaagtcaaatgtataacgagattgcgaatgagattagtgggatgataccagtagaatgggagcaagtatttacaatagcatatgtaactgatcaagctggagaagtcatttttaattatactaaaccaggtagtgatgaattaaattattattcagacatacctaaagattgtaatgtatcaaaagatatttttaagaattcatggtttaaagtttatcgaatgtttgatgagttaagagaaacttttaaaaaagaagggcttgaaccatggacatcatgcgaatttgactttacaagagatggcaaattgaatgtatcttttgattatattgattgggtgaatttagaatttggaccattagcaaaagaaaattattatatgtacaaaaagtttggggttataccagaaatggaatatgaaatggaagaaattaaagaaatcgagcaatatattaaagagcaagatgaagctgaactatag

SEQ ID NO: 417712 - DNA, 933 bp, Staphylococcus aureus
atgtttaaaagaattaaactaatcttaatagcaacgataatactatcaggatgttcaactaccaataacgaatctaataaagaaacaaaatcagtaccagaagaaatggaagcttcaaaatatgtaggtcaaggcttccaaccacctgcagaaaaagatgcgattgaatttgcgaagaagcataaagataaaattgctaaacgtggcgaacaattttttatggataacttcggtctaaaagttaaagctacgaatgttgtaggtagtggcgacggcgtagaagtatacgtgcattgtgatgaccacgatatcgtatttaatgcgagtattccatttgacaaatcaattattgacagtgatagctcattaagaagtgaggataaaggcgatgatatgagtactttagttggtacagtgttgagtggttttgaatatcgagcacataaggaagagttggataatttaacagaagttttaaaagaatataaaagtaaatataaatatactggttatactgaaaatgcaattatgaaaacgcagaatagtggttttagaaatgagtattattatttgactgcaattccatatactttagatgaatataaaaggtattttcaacccttaatcaaagaggatgataagtcttttagggacggtatgagaaactcaaaaaaacaacttaaagataaatcacgtccatatgttgttacaactttatttagtactaaagataattttactaaagataatacaatagacgagatgattgatttttctgaagtactaaaaaagaaaaagaatattcctcatgatttgaatgtttctcttcaaatttctaataaatatataaatacaacaagacctaattatagtaagaaggatgtaatagaagtaggtgtatttaatcatgaaaaagctaacacgaatgattaa

SEQ ID NO: 417713 - DNA, 1170 bp, Staphylococcus aureus
atgagtaatacacaaaagaaaaatgtgccagagttgagattcccagggtttgaaggcgaatgggaagagaaaaagttaggggaagtagccaaaatatatgatggtactcatcaaactcctaaatatacaaacgaaggtataaaatttttgtcagtagaaaatataaaaacgttgaattcaagcaaatatatttcagaagaagcatttgaaaaagagtttaaaatccgaccagaattcggagatatattaatgactcgaattggtgatataggtacaccaaacatagtgagttcaaatgaaaaatttgcttactatgttagcttagcattattaaaaactaagaatcttaattcctattttttgaaaaatttaattttatcatcatctatccagaatgaactatggagaaaaactttacatgtggcatttcccaaaaaaataaacaaaaatgaaattggaaaaattaaaattaattaccctaaaaagcaagaacaacaaaaaattggtcagttcttcagcaaactcgaccgacaaattgaattagaagaacaaaaactcgaattacttcaacaacagaaaaaaggctatatgcagaaaattttctcacaggaactgagatttaaagatgagaatggtaatgattatccggagtgggaagagagaagatttgctgatatatttaaatttcataataaactaagaaagccaattaaagaaaatttaagagtaaagggttcttatccatattatggtgctacaggtattattgattacgttgacgactttatatttgacgggaattatttacttattggagaagatggtgcaaatattatcactagaagtgcacccctagtgtacttagtaaatggaaagttttgggtaaataatcatgctcatatattatctcctttaaatggaaatatacagtacttgtatcaagttgcagaattagttaattatgaaaaatacaatactggaactgctcagcctaaattaaacattcaaaatttaaaaattattagtgttgtaatttcaacgaatttagaagaacaacaaaaaatcggaagctttttaagtaaacttgatcgtcaaatcgatttagaagaacaaaaactcgaattacttcaacaacgaaaaaaagccttacttaaattgatgtttgtttaa

SEQ ID NO: 417714 - DNA, 984 bp, Staphylococcus aureus
ttgcaatatacatttagattgattcagactggcgctgatggtgcattaattgagcaaatcatattaactgatgatatgttagacagtcctttagagatacctgcgaaaccatttgatgcttatataagtgtaactgttaaggcgcgtgggaacgggacggtacatttaggacctatacacaaacgatggtctagattagacatgggtcaatttttacttggtggtagtcgtttcgtagatagtcaacgacaggaatttatttattatttccaccctggtgatatgaaaccgccactaaacgtatattttagtggttatcgaacagcggaaggtttcgaaggatattatatgatgaaacgtatgaatgcaccgtttttacttatcggcgatcctcgtgttgaaggtggtagcttttatatcggttcatctgaatatgaacaaggtattatcaatgttattgacgagacattagaaaagctgaattttaaatcacatgaattaatattatctggtttatctatgggttcatttggtgccttgtattatggtgctcagttaaatcctcaggcaattattgttggtaaaccacttgttaatattggaacgattgcagaacatatgcgattacttagaccagaagagttcggtacagcattagacgtcctggtgtctaatgaaggtgatacatctcaagcgtcgataaaggcattaaatcaaaaattttggcaaacatttcaaaagaaatcattgtcacaaactgtttttgccatagcatatatgcaacatgatgattatgatccacatgcatttcaagagctattacctgtattgacagcacaccaagcaagagtgatgaatcgcagtattcctgggcgacataatgatgattcacctaccattgcaagttggtttgttaatttttacaacattattttggaagacaagtttgggagagttcaacatgctgaaaaacaaaacatttaa

SEQ ID NO: 417715 - DNA, 783 bp, Staphylococcus aureus; identical to SEQ ID NO: 411648

SEQ ID NO: 417716 - DNA, 762 bp, Staphylococcus aureus; identical to SEQ ID NO: 406083

SEQ ID NO: 417717 - DNA, 357 bp, Staphylococcus aureus
atgattattagacagattttgtcaaacgcattgaaatatagtgagaattttaatattgaaattgggacagaattaaatgatcaacatgtttcgttatatattaaagactatggcagaggtattagtaaaaaagatatgccgcgaatatttgaacgaggatttacgtcaacggctaacagaaatgaaacgacgtcttcaggtatgggtctatatttagtaaatagtgtaaaggatcaattaggtattcacctgcaagtcacgtcgactgttggtaaggggacaactgtcagattgattttcccattacaaaatgaaattgttgaacgcatgtcggaagtgacaaatttgtcattttaa

SEQ ID NO: 417718 - DNA, 204 bp, Staphylococcus aureus; identical to SEQ ID NO: 412067

SEQ ID NO: 417719 - DNA, 360 bp, Staphylococcus aureus
ttgccaaatagtagcatgggtgaaataacgaattactcaattacgaatggaacagcaattgttaaaattccagtatctgtagatgaaaatattgataatgttgagaagaaattaaacaaattatttacatctctgcgtagtaaatattatttatttgtaagtgatcctgttgtgattggtattgatgcctttgaagatactagagtaatattaagggtttcagcagaaacaataccaggtgaaggtttctctggtgcgcgtattattcgtaaagaagtacaaaaaatgtttttacaagaaggtatcaagacaccacaaccaataatgacaccttttaatcatagtgaaaacggtgtttag

SEQ ID NO: 417720 - DNA, 210 bp, Staphylococcus aureus
gtggaacaaggtaaggtagtaacacctgttattgaaatcaatgaaaaggttaaagcagtggcaccaactaaaaaagcacaatctaagaaatctgaattacctgaaacaggtggagaagaatcaacaaacaaaggtatgttgttcggcggattatttagcattttaggattagcgttattacgtagaaataaaaagaatcacaaagcataa

SEQ ID NO: 417721 - DNA, 201 bp, Staphylococcus aureus
atgacgtcatattttgcgttaacgactttagccacattcggtttattcatagctgaccagtttgcgtcatttgtacctgtagtatcacgattccatttatacgtaaatccatctgttggtaaaccagtagcattttgcatttgtgcatatcctgatgcttgcgtaccacttgctaaagtgccaccaactgttgttgtataa

SEQ ID NO: 417722 - DNA, 702 bp, Staphylococcus aureus
gtgccaacgactatactagcgcatgattctagtgttggcggtaaagtgggtattaactcaaagcaaggtaaaaaccttatcggtgcattttatcgtccaactgctgtgatttatgatttagactttttaaagacgttaccatttgagcaaatattaagtggctatgcagaagtttataagcatgcgttattgaatggtgaatcagcgacgcaagatatcgaacagcactttaaagatagagagatattacagtcattaaatggtatggataaatatattgctaaaggtattgaaacgaagctggatattgttgttgcagatgaaaaagaacaaggtgtacgtaaatttttaaatttaggtcatacatttgggcatgctgttgaatactatcataaaatacctcatggtcatgcagtgatggttggcattatctatcaatttatagttgcgaatgctttgtttgattctaagcatgaaattaatcattatattcaatatttaatacaactcggttatcctttagacatgataactgacttggattttgaaacgttatacgaatatatgctaagtgataaaaagaatgataagcaaggtgtacaaatggtcttgattagacaatttggagatatcgttgtacaacatgttgatcaactaacattacaacatgcatgtgaacaattaaaaacatattttaagtag

SEQ ID NO: 417723 - DNA, 510 bp, Staphylococcus aureus
atgattttcgcctttgaagagagttacggttttctatcagagccttttgtacgtgataaagatgccgtacaaattgtgccactcattataaaatacgcttctgagttaaaattatatggcaaaacattgaaagatgaattagaacagatttatcaaactgttggtagacatgaggatacattattctcgcatacgctagatggattagaaggtaagaaaaaaattgaatcaattatgacacatttacgttcaaatccaccgcaagagattcaaggactgaaagtgaaagcaattgaagattatttaactagcgaggtttatcatttggataaagatacaacgtcacagattaattctcctaaatcaaatgttattcgtgtcttatttgacgaaggatttatcgctttacgtccttctggtactgaacctaaaattaaattatatgtgtcgttaaaatgtcggaattttgatgatgtagctcaaaaaattaatgcgatgatttttagctaa

SEQ ID NO: 417724 - DNA, 243 bp, Staphylococcus aureus
atgctatttcttgttacttcatatttaaaagttgttgtcgttttgttaccgctcgcatctgtagaaacgattgttatagtacttgtaccaatgtttgttggtgtaccactaatggtattatttgtactatcgaatgttagtccagatggcaatccagtcactgtattcgtcaccgcatttccactgttgtcctgcgtagcaattttaattggggatattggtgaatacacttctgatgattga

SEQ ID NO: 417725 - DNA, 192 bp, Staphylococcus aureus
gtgattcaagcagaaaacgacaatatgattgatccacaatccgcaaattatatatatgaacatgtagactctgacgataaaaatatcaagtggtacagtgaatctggacatgttattacgattgataaagaaaaagaacaagtatttgaagatatttatcaatttttagagtcattagattggtcagaataa

SEQ ID NO: 417726 - DNA, 192 bp, Staphylococcus aureus
gtgattcaagcagaaaacgacaatatgattgatccacaatccgcaaattatatatatgaccatgtagattctgatgacaaagacatcaagtggtatagtcaatcaggacatgttattacgattgataaagaaaaagaacaagtatttgaagatatttatcaatttttagagtcattagactggtcagaataa

SEQ ID NO: 417727 - DNA, 537 bp, Staphylococcus aureus; identical to SEQ ID NO: 413654

SEQ ID NO: 417728 - DNA, 384 bp, Staphylococcus aureus
atgccatatattacctcttatttcatgacgcgtgctatcggcgacagacctttagtcgtcccgcatcaatcacaaaatttagcatttattggtaactttgcagaaacagagcgagatactgtatttacaacagaatattcggttcgtactgccatggaagctgtttatcaattactaaatatagatcgtggtattccggaggtcatcaatagtacatttgatcttcgcgtcttaatggatgccgtatacgaactgaatgaccatcaagatttgcgcgagattactaaagattcgaaaatgcagaaactcgcattagcaggattccttaaaaagataaaaggtacgtacattgagtcattattaaaagaacacaaattgttataa

SEQ ID NO: 417729 - DNA, 438 bp, Staphylococcus aureus
atgacagaaggtcaattgtggaaaaaagttaaagattctttaattgattcaaatataattttgggaaatgaatatgaaacaattgatgttacctacttacaaaattctggcaattcaacgaaagtctctgcacctggtaactctaatgaagatttcctctcctataaagcggatttttctcgattattgcatattgatatggaaaaaataaatgtgccacctgcaaatttcaatgatcgagttgatgctaattctatatggaattctctaactaaacaattaaaatctaaaggtttagttaaagacggagatactattacaattcacacttcagaaaataatatacctaaaataacaggcaaagttggagataactatcaagacaataaaggattgatgttggaaaaacgattaatcaacaaaatcacaattgaataa

SEQ ID NO: 417730 - DNA, 873 bp, Staphylococcus aureus
atgtatacacgtacagctacaacaagtgatagtcaaaaaaatattactcaaagcttacaatttaatttcttaactgaacctaattatgataaagaaacagtatttattaaagcaaaaggtacaattggtagtggtttgagaattttagacccaaatggttattggaatagtacattaagatggcctggatcttattcagtttcaattcaaaatgttgatgacaacaacaatacaaatgtgactgactttgcaccaaaaaatcaggatgaatcaagagaagttaaatatacgtatggttataaaacaggtggagatttttcgattaatcgtggaggcttaactggaaatattacaaaagagagtaattattcagagacgattagttatcaacaaccatcatatcgtacattacttgatcaatctacgtcacataaaggtgtaggttggaaagtagaagcacatttgataaataatatgggacatgaccatacgagacaattaactaatgatagtgataatagaactaaaagtgaaatcttttctttaacacgaaatggaaatttatgggcgaaagataattttacgcctaagaataagatgcctgtaactgtttctgaagggtttaatccagaatttttagctgttatgtcacatgataaaaaagatgaaggtaaatcaaaatttgttgttcattataaaagatcaatggatgagtttaaaatagattggaatcgccatggtttctggggctattggtctggtgaaaaccatgtagataaaaaagaagaaaaattatcagcattatatgaagttgattggaagacacataatgtgaagtttgtaaaagtacttaatgataatgaaaagaaataa

SEQ ID NO: 417731 - DNA, 501 bp, Staphylococcus aureus; identical to SEQ ID NO: 410354

SEQ ID NO: 417732 - DNA, 390 bp, Staphylococcus aureus
atggcatttacattatctgcaattcaacaagcacatcaacaatttactggtgttgactttccaaaactattcaaagcttttaaagatatggggatgacttacaatatcgtcaacattcaagatggcactgcaacatacgtacatcaatcagaagatgatatcgttacgtcatctgtgaaaagtacgattcctgttgctcaaaaatcaaacaaaacaatagttcaagacgtcttaacaagacatcaacaagggcaaacagattttgaaacattttgtgatgaaatggctgaagctggcatttataaatggcatatcgatattcaagcgggcacttgtacttatatcgacttgcaagaccaagctgttatttcagaattaatacctcagtaa

SEQ ID NO: 417733 - DNA, 390 bp, Staphylococcus aureus
atggcatttacattatctgcaattcaacaagcacatcaacaatttactggtgttgattttccaaaactattcaaagcatttaaggatatgggtatgacgtacaatattgttaatattcaagatggtacagcaacatacgtacatcaatcagaagatgatatcgttacgtcatctgtaaaaagtaatcatcctgttgctcaaaaatcaaacaaaacaatagttcaagacgtcttaacaagacatcaacaagggcaaacagattttgaaacattttgtgatgaaatggctgaagctggcatttataaatggcatatcgatattcaagcgggcacttgtacttatatcgacttgcaagaccaagctgttatttcagaattaatccctcaataa

SEQ ID NO: 417734 - DNA, 318 bp, Staphylococcus aureus
gtgacgactcaacttgtcgatttaaaaatgattaacacaatacggggtaaagatggtggttatttagcaaatgatcgtagcgctgatgtctctctagcaacattatataaacattttgtcttagagaaagaacatcacacacgactatttactggcgacgaaggcagtcactgtcaaattgctcgtaatattgcaactactatgtcacattatcagcaagacgaacagaatatcattattaatttttataaaggaaaaacaatcaaagatgtcattgaagacattcaaaaggaggatttatgtcatgaaaacatatga

SEQ ID NO: 417735 - DNA, 687 bp, Staphylococcus aureus
atgatttcagttcatcacggcatggtttatttgcatcatgaattaggaaaatttctcgatgatgctaaatattacttgagtgcttatccaaacgaaacaattgtgatgtctatgaaaaaggactacgatagcgattctaaagttacgaagacatttgaagaaatttttagagaatattattataataacccgcaatatcagaatcttttttacacaggaagtaatgcgaatcctactttaaaagaaacgaaaggtaaaattgtcctattcaatagaatggggggtacatacataaaaagtggttatggtgctgacacgtctggcattcaatgggcagataacgcgacatttgaaacgaaaattaataatggtagcttaaatttacaagtacaagatgagtataaagattactatgataaaaaagttgaagctgttaaaaatttattggctaaagctaaaacggatagtaacaaagacaatgtatatgtgaatttcttgagtgtagcgtctggaggcagcgcatttaatagtacttataactatgcgtcacatataaatcctgaaattgcaaaaacgattaaagaaaacgggaaagctagaactggttggctgattgttgactatgcaggatatccgtggcctggatatgatgatatcgtaagtgaaattatagatagtaataaataa

SEQ ID NO: 417736 - DNA, 771 bp, Staphylococcus aureus
atgaaaggaattaaagatgcgccatctcttgataagttggatccattaatgacagaaaagtcgtttacgaatagtaaagggattcaaggatggaaagattacaaagaattaatgggtaaagtggaacttgcagattatagatttactaaagattcaaaaggatcttcaataaaagatgttgatgcattctttaaaggtaagaaaggtataaaaaggaaagtgattgaaacacacgatgatgtaaaacaagttgattattggtatgtagatccagatggaaagaaaattggcaattcaaacacacctgttttttacgcagaaattatgacaaaatataaagatggaaagttagtttatgcatcagtcgaaccaggatcttacgtaatacataaagatgatgcaattaaatatgacgattattctaagttaaaaaaattaagtcagctaactaaacttgatcatccaaaaccagttccatatagcgtagctcaaatcaaatctttcggagtacctttaacaagcgtttcatttatgacacatggatcaaaggatactaaagatgaagtgttgccggcattggcctatttcactttttcaccaaaaaattatgaagacaagtctaatccagatccaaaagttttaaatttagtagatatggatttcttaaatgcatctagtgattttggtaacgcacattttgttgttttaagtaaatatattaaagagtatgaatcaaactatgaaacagcgtcagatgattctttaaaatag

SEQ ID NO: 417737 - DNA, 432 bp, Staphylococcus aureus
gtgccaatttatttaaaactaacgtctgatatggatttcgatggcttaaaagcactattaccagcgattactgagacatttgacggtatcatcttagcaaacacaacgcgacaacgagatggtttaacttctgctaataaagtcgaagaaggcggtttgagtggtcgtccattatttgaacgtaatttaaaattgattaagtatgcttatcagcaaacaaatggtgaatttttaattataggtacaggcggcgtattcagtactgaagatgcaatcaaaatgatgcgtcacggtgcgtcacttattcaaatttattcatcacttgttattgaaggcccaggtttaactaagaaaatgaacaaaggcatcgcacgttacttaaaggatcatcattttgacaatgtcagtgatattataggactagatgcctaa

SEQ ID NO: 417738 - DNA, 276 bp, Staphylococcus aureus; identical to SEQ ID NO: 404813

SEQ ID NO: 417739 - DNA, 279 bp, Staphylococcus aureus
atgaaccttctagatagtatggaagattttggtttgccatttgctattgattcatttgtaaaaaatgagacagactcaatagcattagaaaaaatgtttggtgcaattgataaatattttttgacattaaataaccaaacatttttttcaataataaaagaaaatttaaagtttatagaaaatcctgttaatgagataaaaatagagagacctttattaaaagagaaatttttttctgatatagagaaagaactaattcaaaatttaaatattttatag

SEQ ID NO: 417740 - DNA, 501 bp, Staphylococcus aureus
atgactttcgaagaaaaactaaatgaaatgtacaacgagattgcgaatgagattagtgggatgataccagtagagtgggaaaaagtatatacgatagcctatgtaaatgatagaggtggagaggtcgtttttaattatactaaaccaaacagcgatgacttgaattattacacatatatccctagagagtataatgtctctgaaaaagtattttatgatttgtggacggatttatatagattgtttaagaagttaagaaacgcatttaaagaagaagatttagaaccatggacatcatgcgaatttgattttacaagagatggtaaattgaatgtatcttttgattatattgattggatgaattcagaatttggaccaatgggaagagaagattattacatgtataaaaagtttggaatttggcctgaaaaagaatatgcaataaatagggttaaaaaaatagaagattatattaaagaacaagaagaaactgaactatag

SEQ ID NO: 417741 - DNA, 450 bp, Staphylococcus aureus; identical to SEQ ID NO: 412545

SEQ ID NO: 417742 - DNA, 183 bp, Staphylococcus aureus
atggaagccacgatagaagtagttactgatcaaaaagtaatcgattggttatgggagactcaagataaaagctttttcagttcaaaagaagatccagaactttgtgttttaaaggtgacaccacaatctgttaaattgatgaatgacaaatcattagatacacctatcaaaatcgatttataa

SEQ ID NO: 417743 - DNA, 594 bp, Staphylococcus aureus
ttgaatgctgaaaatcacacattgaatcatgcaaagattagtagcgcgcatgtcgcacaatatgactctgaagataaacgacaagatgtaagttttaaatatacgtttgacaaagatactgagttagttggaaacatgaacttaaaactatgggtaagcactacagactcagacgatatggatttatttgcaggtattaaaaagttagatcgtcgtggtaatgaagttaacttccctgattttaatcatattgaaaatggtcaagtagctactggttggttacgcgtatcacatcgtgaattagatcaagaaaaatccacaatcgcgcaaccttggcataaacatgaaacagaattaaagttgtcacaagatgagattgtacctgttgaaatcgaattgttaccttcagacacgctatttaaacaaggcgaaacattggaagttgttgtaaaaggtagtgaaattgtaattggtaatagtacccctggcatgaaaacacgttatgaacatgaagaaaccgtaaataaaggcatgcacatgatttatactggtggtaaatatgattcacaattaatcattcctatcgttaattga

SEQ ID NO: 417744 - DNA, 555 bp, Staphylococcus aureus
gtggttaaagatgctgataataatattgataaagatgtgcaacatgatgttgatcatttatccgatatgtcggataataatcacttcgataagtatgatttaaaagaaatggatactcaaattgccaaagatactgatagaaatgtggataaagatgccgataatagcgttggtatgtcatcgaatgtcgatactgataaagactctaataaaaataaagacaaagtcatacagctgaatcatattgccgataaaaataatcatactggaaaagcagcaaagcttgacgtagtgaaacaaaattataataatacagacaaagttactgacaaaaaaataactgaacatctgccgagtgatattcataaaactgtagataaaacagtgaaaacaaaagaaaaagccggcacaccatcgaaagaaaacaaacttagtcaatctaaaatgctaccaaaaactggagaaacaacttcaagccaatcatggtggggcttatatgcgttattaggtatgttagctttattcattcctaaattcagaaaagaatctaaataa

SEQ ID NO: 417745 - DNA, 603 bp, Staphylococcus aureus
gtgaaaggtattacacttcgtgaaggcgatgaagttgtagggcttgatgttgctcacgaaaatagtgtagatgaagttttagttgttactgaaaatggttatggtaaacgtacgccagttaatgactatcgcttatcaaaccgtggtggtaaaggtattaagactgcaacgattactgaacgtaatggtaatgttgtttgtattacaactgttactggtgaagaagatttaatgattgttacgaatgcaggtgtcattattcgactagatgttgcagatatttctcaaaatggtcgtgcagcacaaggtgttcgcttaattcgcttaggcgatgatcaatttgtttcaacggttgctaaagtaaaagaagatgcagaagatgaaacgaatgaagatgagcaatctacttcaactgtatctgaagatggtacagagcaacaacgtgaagcggttgtaaatgatgaaacaccaggaaatgcaattcatactgaagtgattgaatcagaagaaactgatgacgatggacgtattgaagtaagacaagatttcatggatcgtgttgaagaagatatacaacaatcattagatgaagatgaagaataa

SEQ ID NO: 417746 - DNA, 201 bp, Staphylococcus aureus; identical to SEQ ID NO: 405574

SEQ ID NO: 417747 - DNA, 588 bp, Staphylococcus aureus
gtgaaaggtattacacttcgtgaaggtgacgaagttgtagggcttgatgtagctcatgcaaacagtgttgatgaagtattagtagttactgaaaatggttatggtaaacgtacgccagttaatgactatcgtttatcaaatcgtggtggtaaaggtattaaaacagctacgattactgagcgtaatggtaatgttgtatgtatcactacagtaactggtgaagaagatttaatgattgttactaatgcaggtgtcattattcgactagatgttgcagatatttctcaaaatggtcgtgcagcacaaggtgttcgcttaattcgcttaggcgatgatcaatttgtttcaacggttgctaaagtaaaagaggatgcagacgaagtaaatgaagatgaacaatctactgtatctgaagatggtactgaacaacaacgtgaagcggttgtaagtgatgaagcaccaggaaatgcaattcatactgaagtgattgattcagaagaaaatgatgaagatggacgtattgaagtaagacaagatttcatggatcgtgttgaagaagatatacaacaatcatcagatgaagaataa

SEQ ID NO: 417748 - DNA, 306 bp, Staphylococcus aureus
atgctagccaattgtttcccactcttacttgatacagcagttccttctaatgtgcgatcagaaccttctctaccactactaacagttcctctatgcgttggtaacaacacaactttacttggcgctggttgtttcgctggattcatcactttgtctttaccaattggttgtgtatctttaccagactcactacctttgctaccttgttgtcctttagctggttgttcacttactgctggtttacctaataacatacgttgtggttctgtcgtatcatacttagctaagttagttgtttttaaataa

SEQ ID NO: 417749 - DNA, 345 bp, Staphylococcus aureus
ttgcaactaactgttcaagctatttcaactatgattagacagcatattaaaccggtattatttgtgattaataatgacggctatacggtagaacgacttattcacggcatgtatggaccttataatgaaattcacatgtgggattataaagctttaccagctgtatttggtggtaaaaatgttgaaattcatgacgttgaatcatcaaaagatttacaagacacgtttaatgcaattaatggtcatcccgatgtgatgcattttgtcgaagtcaaaatgtctgtcgaagacgcaccgaagaaactcatcgatatcgctaaagctttttcacaacaaaataaataa

SEQ ID NO: 417750 - DNA, 366 bp, Staphylococcus aureus
atgaatattgttccagattatttcatatataaaattgctttagttggtaaagacgataaaaaatatggtgaaggagtacataggaatgtcgatgtatttgtcgttttagaagaaaataattacaatctggaaaaatattctgtcggtggtatcacaaagagtaatagtaaaaaagttgatcacaaagcaggagtaagaattactaaggaagataataaaggtataatctctcatgatgtttcagaattcaagattactaaagagcagatttccttgaaagaacttgattttaaattgagaaaacaacttattgaaaaaataatctgtacggtaacgttggttcaggtaaaattgttattaaaatga

SEQ ID NO: 417751 - DNA, 306 bp, Staphylococcus aureus
atgttagttcaagctacgatttctggcgtagacggtgcaattggttctacatataacgttaatggtcgccgcgctagaaaaatcttcgacttagcaagacaaggtcaaattcaagaagcttaccaactacaacatgattcaaacgacatcatcgaaacagtgttatcaatggggatttatccaacattgaaagaaatattacgtcatcgtggcattgatgcaggattaccgaaaagacctttcaaaccttttaacgaagcacatcgacaaacattagatcaactcattgcaaaatacgatttatag

SEQ ID NO: 417752 - DNA, 420 bp, Staphylococcus aureus; identical to SEQ ID NO: 410132

SEQ ID NO: 417753 - DNA, 474 bp, Staphylococcus aureus
atgattggtgatagtgcgatggatgggtttaaaatcgctgttgtagtagccgtgatgttgttagcgtttatttcattaatggaagcaatcaatatcatttttggtagtgttggtttgaattttaaacagttaattggttatttgtttgcacctatcgcattcttaatggggattccttggagtgaagctgttccagctggctctttaatggctacaaaattaattacaaatgagtttgtagcaatgctagattttaaaaatgttttgggtgacgtatcagctagaacacaaggtattatctcagtttacttagtgagttttgctaatttcggtactgttggtatcatcgttggttcaattaaaggaattagtgataagcaaggagaaaaagttgcatcctttgcaatgaggttgctacttggttcaactctagcttcaatcatttcaggatcaattattggcttagtattgtaa

SEQ ID NO: 417754 - DNA, 474 bp, Staphylococcus aureus
atgattggtgatagtgcgatggatgggtttaaaatcgctgttgtagtagccgtaatgttgttagcatttatttcattaatggaagcaattaatatcatgtttggtagtgttggtttgaactttaaacagcttattggctatgtgtttgcaccaatcgcattcttaatggggattccatggagtgaagcagttccagctggctctttaatggcgactaaattaattacaaatgagtttgtagcaatgcttgattttaaaaatgtcctgggtgatgtatctgctcgaacacaaggtatcatttcagtttacttagtaagcttcgctaattttggtacggttggtatcatcgtaggttcaattaaaggcattagtgataaacaaggagaaaaagttgcatcctttgcaatgaggctgttacttggttcaactctagcttcaatcatttcaggatcaatcattggcttagtattgtaa

SEQ ID NO: 417755 - DNA, 123 bp, Staphylococcus aureus
atggaagatgaaccgtatgaaacattaggtgaaggtttatcattgccaccatttttagaaaataaaagagaatatattgaatcggaagttagaccttttaatacgaagcgtcaacatggttaa

SEQ ID NO: 417756 - DNA, 402 bp, Staphylococcus aureus
atgtgtgcaccaatgggtggcaaaactgaaggtgccatttatgaaggctttttagagtatgcacgtaattttaaaaagtatgaaggtaaaaatcaagagactattgataatgaaatggatcattttaaaccaactgaaactttaaaagaactaagtgaagcattagatacgattaaagatcaagttgatgaggtatttgacccaattttagtgattcaagcagaaaacgacaatatgattgatccacaatccgcaaattatatatatgaccatgtagattctgatgacaaagacatcaagtggtatagtcaatcaggacatgttattacgattgataaagaaaaagaacaagtatttgaagatatttatcaatttttagagtcattagactggtcagaataa

SEQ ID NO: 417757 - DNA, 204 bp, Staphylococcus aureus
atgaaggaaaacttagagaaatatattagaagtttgcctcttataagtctgattataagtatttttttaattattttatacttcttaatttatcgagtagaaggaaatttttgtgtaatcattttgtactgcttactgccattatttgtaaatacgtcactatatatattatacgtaatcatctttcgatattttaagaaatga

SEQ ID NO: 417758 - DNA, 282 bp, Staphylococcus aureus; identical to SEQ ID NO: 405087

SEQ ID NO: 417759 - DNA, 246 bp, Staphylococcus aureus
atgaagaaggatacttatcaatcatacctcttttacaacagtgaagaacccgtgcataatggcttacgaattatagtttgtaaggaagaagagggatacatgcgccgagcacatgaaaaaaatcccctaacaactaaaagttgtaaggaagaagagggatacatgcgccgagcgcaagcaaaaaagcccctaacaactaaaagttgtaaggtaaaagagggatacatgcaccgagcacatgcataa

SEQ ID NO: 417760 - DNA, 126 bp, Staphylococcus aureus; identical to SEQ ID NO: 411210

SEQ ID NO: 417761 - DNA, 309 bp, Staphylococcus aureus
atgacgcttgcagctggatcaggagcaggagctgttgtaacagttggtgcatcgatattattaggtagtaatccagttgggtgggctgttataggtggctttgtggctggaacattagtatcaaaagcagcggattgggcatatcaaagcaattggaatggtataaaagataaaacagactgggtaggacataaaatagacgatagtattgatgttgttaaaaaatctacagaaaaagccgtagatagtgttggtgaagctacaaaaagtatctctaatcatttaaaccctatgaaatggagctggtaa

SEQ ID NO: 417762 - DNA, 249 bp, Staphylococcus aureus
atgattggttatcatcccgattatgaatttttaaaatctgtaggcattcaaatcaatacaaatgaatttggaacagcgcctatgtataataaagagacatacgaaacaaatatcgaaaattgctacattgcaggtgtgattgctgcagggaatgatgcgaataccatttttattgaaaatggtaaattccacggtggcattattgctcaaagcatgctagctaagaaacaaacgccgttagaatcataa

SEQ ID NO: 417763 - DNA, 249 bp, Staphylococcus aureus
atgattggttatcatcccgattatgaatttttaaaatctgtaggcattcaaattaatacaaatgaatttggaacagcgcctatgtataataaagaaacatacgaaacaaatatcgaaaattgctatattgcaggtgtaattgctgcagggaacgatgcgaataccatttttattgaaaatggtaaattccacgggggcattattgctcaaagcatgctagctaagaaacaaacgcccttagaatcataa

SEQ ID NO: 417764 - DNA, 279 bp, Staphylococcus aureus
ttgtctggtgggaataaacgtaaaattaatatattagtaggtttactaggtcaacctcgaattctaattttagatgaaccgacagttggtattgatttgaaatctagacatgacatccaccaacttcttaacattatgaaatctaaatgtttaattatattaactacccatcatttagatgaagttgaagcacttgcagatgatatcaagttaattggccaagatcctttttatcaaaatgttttagaggacaagcaatgggcttatacctattattaa

SEQ ID NO: 417765 - DNA, 285 bp, Staphylococcus aureus
atgataggcataatatatcaatttattgttgcgaatatattgttcaattctaatcacgatatccaacattatattaattatttaacgaaattaggttatcctttagaaacaataaccgacatagatttcgaaacgatatatcaatacatgctaagtgataaaaagaacgacaaacaaggagttcaaatggtattgattaaacattttggcgatattgtagtgcaacacattgatcaaacaacactgcaacatgcgtgtgaacaactaaaaacatattttaagtag

SEQ ID NO: 417766 - DNA, 279 bp, Staphylococcus aureus
ttgtccggtggaaataaacgtaaaattaatatattagtaggtttactaggtcaacctcgaattctcattttagatgaaccgacagttggtattgatttaaaatctagacatgacatccaccaactacttaacatcatgaaatctaaatgtttaattatattaactacccatcatttagatgaagtggaagcacttgcagatgatatcaagttaattggccaagatcctttttatcaacatgttttagaggacaagcaatgggcttatacctattattaa

SEQ ID NO: 417767 - DNA, 189 bp, Staphylococcus aureus
atgagtgatcatgatgaaacagatggtgagtcagaagacattcaacatcatgacaatgataataacaaagcaattcaaaatgacataccaaatcaaaaagtcgatgataaaagtgataaaaatgctgataataaagtagaaaaacatgataaccatgcaaaaaattcagcagaaactaaagttaaataa

SEQ ID NO: 417768 - DNA, 192 bp, Staphylococcus aureus
gtgcaacgctacaatttaaatagccaacaaacggtttatattggtgattcaacatttgatgttgagatggcgcaaaatgctggtgtaccatctgcagcagtaacatggggagcacatgatgcaaggtcattacttcattcaaatccagattttataatcaatgatccatcagaaattaatacagtattataa

SEQ ID NO: 417769 - DNA, 222 bp, Staphylococcus aureus
atggtgataccgcaactcattagaaaatggcagtggaaacaatcattaggaagacaattggctttaaatattgtaactggaggacaaataatggttatggcagattttattggtagccatatattgtcaccagtacaaataccggcaagtattatcattgcattaattggtataccagtgttattttacatgctaatatctcagtcgaaacggttacactag

SEQ ID NO: 417770 - DNA, 273 bp, Staphylococcus aureus
gtggttggcgattgtggtggtgatgtgtctacattagacgaaggtggtgttgtcgcgtttgctgcttgttgcggtgcttccactttagttgaagatggtgttgtcgcatttgctgcttgttgcggtgcttccactttagtggaagatggtgttgtcgcgtttgcttcttgcgttgtcgttgtgattacacccgttgttaaaaggcctagtgctaaacttgttttagcaattgttgttattttcatagttgtatgctccattcgtaattattag

SEQ ID NO: 417771 - DNA, 207 bp, Staphylococcus aureus
ttgaaggaactggactttaaaataagaaaaatgttagtcgaaaaatatagattgtataaaggcgcgtcagataaaggtagaatcgttattaatatgaaagacgaaaagaaatatgtaattgatttaagtgaaaaattaagttttgatcgtatgtttgatgtaatggatagtaagaaaattaaaaacattgaagtgaatttaaattag

SEQ ID NO: 417772 - DNA, 207 bp, Staphylococcus aureus
ttgaaggaactggactttaaaataagaaaactcttaatcgaaaaatatagattgtataaaggaacgtctgataaaggtagaattgttatcaatatgaaagacgaaaagaagcatgaaattgatttaagtgaaaaattaagttttgaacgtatgtttgatgtaatggacagtaagaaaattaaaaacattgaagtgaatttaaattag

SEQ ID NO: 417773 - DNA, 192 bp, Staphylococcus aureus; identical to SEQ ID NO: 417726

SEQ ID NO: 417774 - DNA, 180 bp, Staphylococcus aureus
atggaaggttttagtctggatacagtgacagacattttagcaaataaaggtatcttagatactgagcaatttggtttatcagtgatggttgcatttggctacagacaacaagatccaccgaaaaataaaacacgccaagcatatgaagatgttattgaatgggttggaccaaaagaataa

SEQ ID NO: 417775 - DNA, 180 bp, Staphylococcus aureus
atggaaggttttagtctggatacagtgacagacattttagcaaataaagggatcttagatactgagcaatttggtttatcagtgatggtcgcatttggctacagacaacaagtgccaccgaaaaataaaacacgccaagcttatgaagatgttattgaatgggttggaccaaaagaataa

SEQ ID NO: 417776 - DNA, 189 bp, Staphylococcus aureus
atgtatctggcgactgttgctaaaacggctgcagataatgctagtgaaggtagaatagcagttgaaaatccttcccatccagctactgggaaccatctcaatttaactgcaaatacatattgtaaaagaactgcaagtacaaaagatggtactgatactgcgattactgaaattactgtagttgtatag

SEQ ID NO: 417777 - DNA, 195 bp, Staphylococcus aureus
atgtcagcccaagcggttggaggtgcagtcggaagtaatccattatctattatcgtgccatgtcatcgtgttgtcggtaaaacgggtagcttaacagggttcggtggaacgattaataataaaattaagttgttagagttggagaatatcgatatgtcaaagctttatgtaccaaaacatagcacgaagccgtaa

SEQ ID NO: 417778 - DNA, 195 bp, Staphylococcus aureus
ttgagaaaagaacaaaatgatacgacagataaagataaatcttcgaataatactgacgacagtaataatagtaataacaacaatggtgtcaataatcagcaacaacctactacgggtcaaaacactaaccaagatcaaggtaatattcaacaaacgccacaagcttcaaataaccaaaatggtgttgtaaactaa

SEQ ID NO: 417779 - DNA, 195 bp, Staphylococcus aureus
atgtcagcccaagcggttggaggtgcagtcggaagtaatccattatcaattatcgtgccatgtcatcgtgttgtcggtaaaacgggtagcttaacaggattcggtggaacgattaataataaaattaagctgttagagttggagaatatcgatatgtcaaagctttatatacctaaacacagtacaaagccgtaa

SEQ ID NO: 417780 - DNA, 165 bp, Staphylococcus aureus
atgcttgatgctaaccagcttgcagaagatatcatttatggcattaaaacaaaacaattagaaattaatcggcctaaatggattcaccatgcgttgaaaatgtatcaaattgcgcctagattttttgaacgatgttttcctaaattatttaaaaataaagcataa

SEQ ID NO: 417781 - DNA, 165 bp, Staphylococcus aureus
atgcttgatgctaatcagcttgcagaagatatcatttatggcattaaaacaaaacaattggaaattaatcggcctaaatggatgcatcatgcgttgaaaatgtatcaaattgcgcctagattttttgaacgatgtttccctaaattatttaaaaataaagcataa

SEQ ID NO: 417782 - DNA, 222 bp, Staphylococcus aureus
atgtatacaccggatattcttttattagatgaatcgaccagtgcattagacgttcataataaagaaaagatagaaaatatcatttttaagttagtggaacaggatgttgctatcatgtggattacccatagtgatgatcaaagtatgagacattttcaaaagcgcataacgattgttgatggcaaaatttctaaggttgaggagttgaatcaacatgagtaa

SEQ ID NO: 417783 - DNA, 144 bp, Staphylococcus aureus
gtgccatacataccagagcagattggtggtaaacccgatacaccatctataccattagaaaagatagttgcaggtttgactgcagccattgaagctatttctaatgatgaggatttacgtatagctctaggcacaacggaatag

SEQ ID NO: 417784 - DNA, 1380 bp, Staphylococcus aureus
atgggaaaatttggattgaatttctttaagccaacagaaaaatttaatgggaattggtcgatcctagaaagtaaaagtagagaatgggaaaaaatgtacagagaacgttggagccacgataaagaagtaagaacaacacatggtgttaactgtacaggctcatgttcttggaaagtatttgtgaaaaatggtgtgattacctgggaaaatcaacaaactgactatccaagttgtggtccggatatgcctgaatatgaaccgagaggatgtccacgaggtgcgtcattctcttggtatgaatacagtccgcttcgaatcaaatatccatatattcgtggaaaactctgggatttatggactgaagcattagaagaaaacaatggtaatcgcgttgctgcatgggcgtctattgttgaaaatgaagacaaagccaaacaatataagcaagcccgaggtatgggagggcacgtgcgttcaaattggaaagacgttacagagataatcgcagcacaattactgtatacaataaaaaaatatggtccagatcgaatcgcaggatttacacctattccagcgatgtcaatgattagttatgcagcaggtgctcgattcatcaatttgcttggtggtgaaatgcttagtttttatgactggtatgcagatttaccacctgcctctccacaaatttggggagagcaaacagatgtgcctgaatcaagtgactggtataacgcatcatacattattatgtggggctctaatgtacctttaacacgtactccggatgcacattttatgactgaagtccgctataaaggtacaaaagtcatttcagtagcaccagattacgcagaaaatgtgaaatttgcagataactggctagcaccgaatcctggttcagatgctgcaattgcacaagcaatgacgcatgttattttacaagaacattatgttaatcaacctaatgaacgctttataaattacgctaaacaatatacagatatgccgtttcttatcatgctggatgaagatgaaaatggatataaagcgggtcgatttttaagagcgagtgacttaggtcaaacaacagagcaaggcgaatggaagccagttattcatgatgcaatcagcgatagtttagtagtacctaatggcacaatgggtcaacgttgggaagaaggtaagaagtggaacttaaaactagaaacagaagatggttctaaaattaaccctacattatcaatgacagaaggtggatacgaattagaaacaattcaattcccgtactttgatagtgatggagatgggatattcaatcgtccaattccaactcgacaagtcactttagcaaagtccgtattgctacaatttttgacttaa

SEQ ID NO: 417785 - DNA, 159 bp, Staphylococcus aureus
atgagtaacgcaaataatgctgataataaacagtttttcagtaagattttaaattctattggtgctggtgttgttattgcacttgttccgaatgctctattaggtgaagtattaaaaatatttaaaagtggtaatgaaattttagaattaacgtattag

SEQ ID NO: 417786 - DNA, 414 bp, Staphylococcus aureus; identical to SEQ ID NO: 410173

SEQ ID NO: 417787 - DNA, 552 bp, Staphylococcus aureus
atgagtgaactcccattcacaattgcttcaaagagaataaaatacctaggaatccaacttacaagggatgtgaaggacctcttcaaggagaactgcaaaccactgctcaatgaaataaaaaaggatacaaagaaatggaagaacattccatgctcatgggtaggaagaatcaatatcgtgaaaatggccatactgcccaaggtaatttatagattcaatgccatccccatcaagctaccaatgactttcttcacagaattggaaaaaactactttaaagttcatatggaaccaaaaaagagccagcatttccaagtcaattctaagccaaaagaacaaagctggaggcatcacgctacctgacttcaaactatactacaaggctacagtaaccaaaacagcatggtactggtaccaaaacagagatatagatcaatggaacagaacagagccctcagaaatagcgccgcttatctacaactatctgatctttgacaaacctgagaaaaacaagcaatggggaaaggattccctatttaataaatggtgctga

SEQ ID NO: 417788 - DNA, 555 bp, Staphylococcus aureus
atgaaaaaatgctcatcatcactggccatcagagaaatgcaaatcaaaaccacaatgagataccatctcacaccagttagaatggcgatcattaaaaagtcaggaaacaacagatgctggagaggatgtggagaaataggaacacttttacactgttggtgggagtgtaaattagttcaaccattgtggaagacagtgtggcgattcctcagggatctagaactagaaataccatttgacccagccatcccattactgggtatatacccaaaggattataaatcatgctgctataaagacacatgcacacgtatgtttattgcggcactattcacaatagcaaagacttggaaccaacccaaatgtccatcaatgatagactggattaagaaaatgtggcacatatacaccatggaatactatgcagccataaaaaatgatgagttcatgtcctttgtagggacatggatgaaattggaaatcatcattctcagtaaactatcgcaagaacaaaaaaccaaacaccgcatattctcactcataggtgggaattga

SEQ ID NO: 417789 - DNA, 252 bp, Staphylococcus aureus
gtgcatattaattcgagaatgttaaaaacgtcagctgtaatttctaatacattattagtcataggtttagtctgtctatttatgatgaaattagtgttagctattactttttttgctgtttcattatcaattagtctagttgtctttaatatgatgttcagagatagaacaacgatgaaagtaatcgttaacgcttcttttttaatcgtaatattagcgattgtagtggcatattttttattgtctaagtaa

SEQ ID NO: 417790 - DNA, 396 bp, Staphylococcus aureus
atgaaaaataataaaattatcttattagacaaggtagaagatccaaaactaaaaaagagaatagaaaactttaaatttttcggacaatatgcaaaccttaaagaattgaaaaattacaacaatggtgatgtctcaattaatgagaatgttccaagttatgacgcaaaatttaaaatgagcaataaagatgaaaatgttaagcaattaagaagtcgttataatattcctactgataaagcaccggtattaaaaatgcatattgatggtaatttgaaaggaagttctgtgggttataaaaagttggaaattgacttttcaaaaggtgaaaaaagcgatttgtcagtaatagattcattaaatttccagccggcgaaggtggatgaagatgaaagataa

SEQ ID NO: 417791 - DNA, 357 bp, Staphylococcus aureus; identical to SEQ ID NO: 417425

SEQ ID NO: 417792 - DNA, 1488 bp, Staphylococcus aureus; identical to SEQ ID NO: 408360

SEQ ID NO: 417793 - DNA, 843 bp, Staphylococcus aureus
gtgattcagattcagcaagtgattcagactcagcaagtgattcagattcagcgagcgattcagattcagcgagtgattcagattcagacagcgattcagactcagacagtgactcagattccgatagtgactcagactcagatagcgactcagattccgatagtgactccgactcagacagcgattcagattcagatagtgattcagattcagatagcgattcggattcagatagtgactcagattcagatagcgactcagattcagatagcgattcagattccgacagtgactcagattccgacagcgattcagattccgacagtgactcagactcagacagtgattcggattcagatagcgattcagactcagacagtgactcggattcagatagcgattcagactcagacagtgactcggattcagatagcgattcagactcagacagtgattcggattcagatagcgattcagactcagacagtgactcggattcagatagcgattcagactcagacagtgactcggattcagatagcgattccgactcagacagtgattcagactcagacagcgattcagattccgacagtgactcagactcagacagcgattccgactcagacagtgactcggattcagatagcgattctgactcagatagtgactccgactcagacagcgactcagattcagatagcgattcagattccgacagtgactcagattcggatagcgattcagaatcagatagtgactccgactcagacagcgactcagattcagatagcgattcagaatcagatagtgactccgactcaggttctaacaataatgtag

SEQ ID NO: 417794 - DNA, 618 bp, Staphylococcus aureus
atggacaataaaattgaaaagattctagaagatattaataaattacaaggctataaagtaacatatcaatatgctactgctataaatataaaagataataacatgaacccttggtttgaaaaaattgaggaaattctattgaatgtaaaaggagttatacgcattttatctcctgacaaccccccggtaaattatgattattggattttacctagaagatataaaagacatacaaaagaatatcacgaaaaactagaaaaatttttagaaaaatttgctactaatgcaaatattaatgatggattgtttgatcaaaataatatacatggatacaaatataaaaaatatatattcactccacatattgaaattactcatgagaacactttgaatttattttttttaaccttaactatatttaacaatggtacatttgttatagaaatcattgaagacttagagagtataaactttggaagcgacttgtatagtactttctcatgtgtaaaagataagatatatcctctaattaatcaagaaaaaaataatagacaaagacagtatcaattgtatggtaatagacattgtaaaaatattagatgtaaatggcggttataa

SEQ ID NO: 417795 - DNA, 201 bp, Staphylococcus aureus
atgatactagtaatgttatctccattattaatcatattctttatagtgttgtctattttagaagagcgtaaacgtacgaagaaaaagcaactcgagaaagaaaaagcaaatacactaaatcaaaatacaaatgacatggaaagttcaaatcaagagctgtcattgcaacaggctaaagaacaaaaagataacaaaggataa

SEQ ID NO: 417796 - DNA, 1320 bp, Staphylococcus aureus; identical to SEQ ID NO: 408215

SEQ ID NO: 417797 - DNA, 783 bp, Staphylococcus aureus
gtggatgatgcaattaacggtatgccacgagctaaatataaatcttataaagattatcaatacttagtatttcatagtattatggggtcaaactattcaccaatagcactaaatatttttatacaagacaatgtattagtaacatatcatcatcaaacgttggaatcattaaataaagtagtctataagtatatgaatacattagatgcagaattagattgtgcagatgtcgtcatattaattttagatatgatggttgataaatatttcaactttgtatatgcacttgaagatagtgtttatcattttgaagaccgccatgtagatgatcgctttaataaaatggtcatggatagtgtctttaagttacgttcggatttgattaaagtaaaacgtgtactgtttcctatgcaagagctaattgatacaatgaaacaaaatggtgatttgattatagataataaacattcgctatacattcaacatatcgatgaccacttgattaagcaacgtaatatcattcgtactgctcaagaaatgacaaacgaaatacgagaaaattttgagtcatacacgtcatttagaatgaatagtattatgcaagtattaacgttagtatcagttatattttcaccgttaacattcatagctgggatttatggtatgaactttgtaaatatgccggcattacatttacattatggatattatatttgcttagctgtaatgtttgttatagctgtcgtattaatcatctttttcagacgtaaaaaatggttttaa

SEQ ID NO: 417798 - DNA, 492 bp, Staphylococcus aureus; identical to SEQ ID NO: 415150

SEQ ID NO: 417799 - DNA, 420 bp, Staphylococcus aureus; identical to SEQ ID NO: 415149

SEQ ID NO: 417800 - DNA, 456 bp, Staphylococcus aureus; identical to SEQ ID NO: 416406

SEQ ID NO: 417801 - DNA, 1056 bp, Staphylococcus aureus; identical to SEQ ID NO: 405038

SEQ ID NO: 417802 - DNA, 444 bp, Staphylococcus aureus; identical to SEQ ID NO: 415137

SEQ ID NO: 417803 - DNA, 1479 bp, Staphylococcus aureus; identical to SEQ ID NO: 415135

SEQ ID NO: 417804 - DNA, 1005 bp, Staphylococcus aureus
gtgatagaaacatttaaagcgtttgtaattgataaagatgagagcggtaaagtgacaccaactttcaaacaattatcgcctactgatttacctaaaggagatgtgctgattaaagtacattactctggtataaattataaagatgctttagcgactcaagatcataatgcagtcgtaaaatcgtatcctatgattccaggaatagatttagctggaacaattgttgaatccgaagcaccaggctttgaaaaaggagaacaagtaattgtaacgagttatgacctaggtgttagccattatggcggttttagtgaatatgcgcgtgtaaaatcagaatggattatcaagcttcctgatactttaacattagaagaatcaatgatatatggcacagctggttatactgccggtttagcaattgaaagacttgaaaaagttggaatgaatattgaagatggtcctgtactcgttcgcggtgcttcaggtggtgtcggtactttagcagtactcatgcttaatgaacttggttataaagttatcgcaagtacaggtaaacaagatgttagcgatcaattacttgaacttggtgccaaagaagttatcgatcgacttcctgttgaagatgatcataaaaagccactcgcatcatcaacttggcaagcttgtgtagaccctgttggtggcgaaggtattaattatgttacaaaacgtttaaatcatagtggatcaattgcagttattggtatgactgccggcaatacttatactaattctgtattccctcacattttaagaggcgtaaacattttaggaattgactcagtatttactgctatgaaattaagacagcgcgtttggcgtcgtctcgcaaaagatttaaagcctgaaaatttacatgagatcaagcaagttattacatttgatgaacttccagaacaacttaacaaagtaattaatcatgaaaataaaggccgcattgttatcgatttcggtgtagataaatag

SEQ ID NO: 417805 - DNA, 945 bp, Staphylococcus aureus; identical to SEQ ID NO: 415127

SEQ ID NO: 417806 - DNA, 3690 bp, Staphylococcus aureus; identical to SEQ ID NO: 415113

SEQ ID NO: 417807 - DNA, 2406 bp, Staphylococcus aureus; identical to SEQ ID NO: 413344

SEQ ID NO: 417808 - DNA, 1548 bp, Staphylococcus aureus
atgaaaaagaaattaggtatgttacttcttgtaccagccgtaactttatcattagccgcatgtgggaatgatgatggaaaagataaagatggcaaggtaacaattaaaacgacagtttatccattgcaatcatttgcagagcaaattggtggaaaacacgtgaaggtatcatcaatctatccagcagggacagatttacatagctatgaaccaacacaaaaagatatattaagtgcaagcaagtcagacttgtttatgtatacaggggataatttagatccggttgctaagaaagttgcatctactatcaaagataaagataaaaaacggtctttagaggataaattagataaagcaaagcttttaactgatcaacacgagcatggtgaagagcatgaacatgaggggcatgatcatgagaaagaagaacatcatcatcatggtggatatgatccacacgtatggttagatcctaaaattaaccaaactttcgctaaagaaattaaagatgaattagtgaaaaaagatccaaaacataaagatgactatgagaaaaactacaaaaaattaaacgacgatcttaagaaaattgataacgatatgaagcaagttacaaaagataagcaaggtaaggcagtatttatttcacatgaatcaattggatacttagctgatcgttatggttttgttcaaaaaggtattcaaaatatgaatgctgaagatccatcacaaaaagaattaactaaaattgttaaagaaattagagatagcaatgctaaatatattctttacgaagataatgttgcgaataaagtgactgaaacaattcgtaaagaaacagatgcgaagcctttaaaattctacaacatggagtctttaaataaagaacaacagaaaaaagataatattacgtatcaatcattaatgaaatcgaatattgaaaatatcggtaaagctttagacagtggtgttaaagtgaaagacgacaaagctgaaagtaaacacgataaagcaatttctgatgggtattttaaagatgagcaagttaaagaccgtgaattaagcgattatgctggtgaatggcaatctgtttacccttacttaaaagacggtacgcttgatgaagtgatggaacataaagctgaaaatgatccgaagaaatctgctaaagatttaaaagcttattatgacaaaggatataaaactgatattactaacattgatataaaaggaaatgaaattacatttactaaagatggtaagaaacacactggtaaatatgaatacaatggtaagaaaacattgaaatatcctaaaggtaaccgtggcgtgagatttatgtttaaattggtcgatggtaatgataaagacttaccgaaattcatccaatttagcgatcacaacattgcacctaaaaaggcagaacacttccatatctttatgggtaatgataatgacgcgttattaaaagaaatggataactggccaacatattatccttcaaaattaaataaagaccaaatcaaagaagaaatgttagcacattaa

SEQ ID NO: 417809 - DNA, 600 bp, Staphylococcus aureus; identical to SEQ ID NO: 415104

SEQ ID NO: 417810 - DNA, 729 bp, Staphylococcus aureus; identical to SEQ ID NO: 404986

SEQ ID NO: 417811 - DNA, 966 bp, Staphylococcus aureus; identical to SEQ ID NO: 415097

SEQ ID NO: 417812 - DNA, 387 bp, Staphylococcus aureus; identical to SEQ ID NO: 415089

SEQ ID NO: 417813 - DNA, 1143 bp, Staphylococcus aureus; identical to SEQ ID NO: 410321

SEQ ID NO: 417814 - DNA, 2079 bp, Staphylococcus aureus; identical to SEQ ID NO: 415083

SEQ ID NO: 417815 - DNA, 936 bp, Staphylococcus aureus
atgaaaattgcaattgctggatcgggtgcattaggtagtggctttggtgccaaactatttcaagcaggatatgatgtcacacttattgacggatatacatctcatgttgaagcggttaagcaacatggattaaatataacgattaatggagaggcattcgagttaaacattccgatgtatcattttaatgatcaacgggacgaaagcatttacgatgttgtctttctatttccaaagtctatgcaattaaaagaagtgatggaagatatgaagccacatattgataatgaaacgatcgtcgtatgtacgatgaatggtctgaagcatgaagaagtcattgcgcagtatgttgctcaatcacaaattgtcagaggtgttacgacttggacggcaggtcttgaaagccctggacacagtcatttacttggtagtggaccagttgaaataggtgaactagtggatgaaggtaaagaaaatgttataaaagttgctgatttacttaacgaagcggaattgaatggtgtcattagtaaagatttataccaatcgatttggaaaaagatttgtgttaatggtacggcaaatgcattaagcacagtgttggagtgtaatatggcatcactgaatgaaagtagttatgcgaagtgtttgatttataaattaacgcaagaaatagtgcatgtagcgacgattgataatgttcatttaaatgttgatgaagtatttgaatatttagttgatttaaatgaaaaagttggtgcgcattatccatccatgtatcaagatttaattgttaataatagaaaaactgaaattgattatattaatggcgcagttgcaacattgggtaaacaacgtcatattgaagcgccagtcaatcgctttattactgatttaattcatactaaagaaagtcagcgacacgcacaggattaa

SEQ ID NO: 417816 - DNA, 1401 bp, Staphylococcus aureus; identical to SEQ ID NO: 416379

SEQ ID NO: 417817 - DNA, 696 bp, Staphylococcus aureus; identical to SEQ ID NO: 404955

SEQ ID NO: 417818 - DNA, 663 bp, Staphylococcus aureus; identical to SEQ ID NO: 416657

SEQ ID NO: 417819 - DNA, 750 bp, Staphylococcus aureus; identical to SEQ ID NO: 408064

SEQ ID NO: 417820 - DNA, 249 bp, Staphylococcus aureus
atgaattataactttgtcattattgatacgccacctgttaatacagttacagatgcgcaattattttcaaagtttacaggtaatgttgtctatgtgattaattctgaaaataataataaagatgaagttaaaaaaggaaaagaacttattgaagcgacaggtgctaaattattaggtgtcgttttaaatagaatgccaaaagataaaagtgctagctattacgcatattatgggactgatgaatcatga

SEQ ID NO: 417821 - DNA, 768 bp, Staphylococcus aureus
atgattgatattcataaccatattttagttgatattgacgatggaccaaaaacaattgaaaaaagtattgctttattaaagcaagctaagtatgaaggtgtaacaagtattgtagcgacacctcatcatttgcatccgagatatgataatacatttcaacaagtgcttgtgaaattggcggagttaagaacgcatccagaagttcaagcattggatattaaattatttcccgggcaagaaattagaattacagattcgattctgcaaggcttagataatggtagtattcaaggtattaatcgttcgaaatatttactaattgaatttccaacgggcgaagtaccacattatacaaaacaattgttttttgaaatacaatcgagaggctacataccaatcattgcacatcctgaaagaaatagaagtatcgccaaaaatccagaaatattatatgaacttgttgcaaatggggcattgagtcaattaacatcgagttctttagttggtggatttggaaaaaacattcaaaagttatcattacaatttatagaatgtaatttggctcattttgtagcttcagatgcacattcatgtgaccaaagaccatttttgatgcaagaattatttcacaatcataaattgaagaaatattcgaatgacattgaagcattacttcgaaatgcaagttctgtaattaatgataattttgtttatttagacagaccgactaaaccaggaaaagtgaagtcgtttttgaagtggttttaa

SEQ ID NO: 417822 - DNA, 501 bp, Staphylococcus aureus
atggtattaagaaaagtaatcatgcaggacttagatcaaattattgcacttgaaaatattggtttttcaccggaagaagctgcaacaccagaggcattgaaattgagaattgaacaaattcaagaaacttttattgtagctgaaaagaatgatgaagtgattggatatatcaacggtcctgtcataaaagagcgttacattagcgatgatttatttaaaaatgtctccacaaataatagtgaaggtggttatattagtgtgttaggtcttgttgttgcaccaaattatcaaggtcagggtattgcaggtcgcttactaaactattttgaaaatcttgctaagaatcaacatcgagatggtgtaacgttaacatgtcgagaatcattaatttcattttatgaaaaatatgggtatcgtaatgaaggtgtatcagaatcatgtcatggcggtattaaatggtataaccttgttaaaaatataaaaaaggatgatgaggtgtaa

SEQ ID NO: 417823 - DNA, 927 bp, Staphylococcus aureus; identical to SEQ ID NO: 417487

SEQ ID NO: 417824 - DNA, 2190 bp, Staphylococcus aureus
atgtctaaatttatcgaaccaagcgttgaagaaattaaacttgaaaaagtatatcaagatatgggattaagtgatcaagaatatgaaaaagtttgcgatattttaggcagacaacctaactttacagaaacaggtatcttttctgttatgtggagtgaacattgctcttataaacattctaaaccgtttttaaagcaatttcctacgtcaggtgagcatgtgcttatgggtccaggtgaaggtgcaggggtagtcgatataggtgataatcaagccgtagtatttaaagtagagtctcacaatcatccatcagcaattgaaccatatcaaggggctgctacaggcgttggtggaatcattcgtgacattgtttctattggggctagacctattaatttgttaaacagtcttagatttggagaattagataataaacaaaaccaaagattacttaaaggggttgtaaagggtatcggaggttatggtaactgcattggtattccaacaactgctggtgaaatcgaatttgatgaacgttatgatggcaatccacttgttaatgcaatgtgtgttggtgttatcaatcacgacatgattcaaaaaggcacagcaaaaggtgtaggtaattcggtcatttatgttggtttgaaaactggtcgagatggtattcatggtgctacttttgcatctgaagaattgacggaagaaagcgaaagtaaacgaccttctgtacaaatcggtgatccatttgtaggtaaaaaattaatggaagcaacacttgaagcaattacatttgatgaattagttggtattcaagatatgggtgctgctggtttaacatcttcatcgtctgaaatggcggcaaaaggtggtagtgggttacatttgagattagaacaagtgccaacacgtgagccaggtatttctccttatgaaatgatgctttcagaaactcaagaacgtatgttactagttgttgaaaaaggtactgaacaaaaattcttagatttatttgataagcacgaattggatagtgctgttataggtgaagttacagatacaaatcgttttgttttaacatatgatgatgaagtttatgctgacattccagttgaaccactagctgatgaagcacctgtatatattttagaaggagaagaaaaagattataatacttctaaaaatgattatacacacatcgatgttaaagatactttctttaaattacttaagcatccgactatagcatctaaacactatttatatgatcaatacgaccaacaagttggtgccaatacgataattaagccaggacttcaagcatcggtagtacgtgtggaaggcacaaataaggcaattgcttcaacaattgatggtgaagcgcgttatgtatataacaatccatatgaaggtggaaagatggtagtagctgaagcttatcgaaatttaattgccgtgggtgcaacaccattagcaatgacagattgtttaaattatggttctcctgaaaagaaagaaatctatcaacagttgatagattcaacgaaaggtatggcagaagcatgcgacattcttaagacaccagtagtttctggaaatgtatctttatataacgaaacgaaaggtacttctattttcccaacaccagttgttggaatggttggtttgattgaaaatgtaaattatttaaatgattttgaacctcaagttggagataaattatatttaatcggtgatactaaggacgactttggtggtagtcaacttgaaaagttaatttatggcaaagttaatcatgaatttgagtcattagatttgagttcagaagttgaaaaaggtgaatcaatcaagacagctattcgtgaaggactattatcacatgttcaaacagtaggcaaaggtggtttgttgttaactttagctaaactaagtgcgcattacggtttaggattaaaatcttcaatagatataacaaatgcacaattgtttagtgagacacaaggccgatatgttgtttctgttaaatcaggtaaaactttaaatattgataatgcaatagaaattggacttttaacagatagtgataatttcaaagtaacaacaccatatacagagattagtgaaaatgtttcagatattaaacaaatatgggaaggggcaattgctcaatgtttaactactcaggattaa

SEQ ID NO: 417825 - DNA, 558 bp, Staphylococcus aureus
atgaacactatttacgaaccgtcaagtatttgtatgattagaacacctttattatcagttgaatttttcaatttatttttaaatactgaacaaattaaatatagcgacttacaattaaatgctcagatgaaagaatcaatcctaacaacaacatttaacttatatcgtactttacaagaaataaattttgatggcgataacaagaaggttagagatgctaaagaaagtttattaaaatatttaattagaatgtcaacacgtccaactccatttggattattaagtggtattaatttggggcattttgtaaatgaaccaacacgtcttaaagttggaaatagtattcaaaaatatgtgaaagtcgatggcgaatggttgtataaactgattagttatattgagagtattgatgaatattatcaaaatttgaaagttatttggaatagtaaagcacatattatcaatgatcgaatatatttaaatgaacaaagtgctatttatttaaacaacaataaagatacatctttttccattaaaaatagcgaattactcgtatga

SEQ ID NO: 417826 - DNA, 699 bp, Staphylococcus aureus
atggataacttcggtttaaaagttaaagctaccaatgttgtaggtagtggcgacggtgtagaagtattcgtgcattgtgatgaccacgacatcgtatttaatgcgagtattccattcgacaaatcaattattgacagtgatagctcattaagaagtgaggacaaaggtgatgatatgagtatgatggtgggtacagtactaagtggctttgaatatcgagcgcaaaaagaaaagtatgataacttatataaatttttcaaagataatgaagagaaataccaatatacaggctttacaaaagaagcaataaacaagacgcaaaatgtcggatataaaaatgaatatttttatatcacctactcgtcaagaagcttaaaagaatatcgtaagtattacgaaccattgattcataaaaatgataaagaatttaaagaaggaatggaacaagccagaaaagaagtgaattacgctgctaatacagatacagtaacaacattgtttagtacaaagaaaaattttactaaagataatacagttgatgatgtaattgaactgagtgataaattatataattttaaaaataagccagaaaaatctacaattacaattcaaataggaaagcctactattaatactaaaaaagccttttatgatgataatgatccaatagaatatggagtgtatcgtaaagatgaataa

SEQ ID NO: 417827 - DNA, 387 bp, Staphylococcus aureus
atgacatcagccagaacgaataaagagattgaagcggacgttaaagaaggcggtaaatatcgtattgtagatcaacaacgtaatggcaaagtaaatgtgattgaaggcatttatgaatctttagttatggatgaatacgttaagatgactatcggtatgcctggactaagtgaaacacaagatgtcattgaggtagaattttttgaacgtgaaacaggtggcacccaaatgctattttattatcgttcattagttgaaaaagaaagacgatttactaatttagaatacaagcaaaagaaaaaagaatatcatgatgccatggtgcatggtttcgaattgatgtttgataagatgtaccacgttatcgaaacatcaacacaacaataa

SEQ ID NO: 417828 - DNA, 252 bp, Staphylococcus aureus
ttggataaaaaagcttataatttaaagcgaacttttgaacaaccgatagttatgtatgaatttacagataagtttcgtattaataagggttttcgtttagatttttgggctacatttttgattgtgtggtttatattatttttcttcttatgggattttgtaatatttgtttttaatgtgcaattaagaaaagttaaattaagttatgatgaagaagtagaatatcatgataaaaaaataacatttaaatag

SEQ ID NO: 417829 - DNA, 375 bp, Staphylococcus aureus
ttgtttgttgattcttctccacctgtttcaggtagttcagatttcttagattgtgcttttttagttggtgccactgctttaaccttttcattgatttcaatgacaggtgttactaccttaccttgttccactggtttagaaggctttttaggttcttctttggcaggtggtactggtttaccaggttcagctggtacctctggcgttggtggtgttggtgtttccggctcacttggtacctctggtgttggcggtgttggtgtttccggctcacttggtacttctggtgtcggtggtgttggtgtttccggctcacttggtacttctggtgttggtggtgttggcggcgttgtatcttcttcaatcgtttgttga

SEQ ID NO: 417830 - DNA, 783 bp, Staphylococcus aureus; identical to SEQ ID NO: 414804

SEQ ID NO: 417831 - DNA, 813 bp, Staphylococcus aureus; identical to SEQ ID NO: 414803

SEQ ID NO: 417832 - DNA, 309 bp, Staphylococcus aureus
atgaaatttaaaaaggttttagtagctacggcaatggtaggtgttttagcaactggcgttgttggatatggtaatcaagcagatgcgaaagtttattctcaaaatggactcgtactacattatgatgcaaacttcttagaacatgaattaagttatattgatgtgttattagataagaatgctgaccaagctacaaaagacaacttaagatcatacttcgccgataaaggactacattcaatcaaagacattatcaacaaagctaaacaagacggctttgatgtttcaaaatatgaacacgtaaaataa

SEQ ID NO: 417833 - DNA, 1485 bp, Staphylococcus aureus
atgagggaaaattttaaattacgtaaaatgaaagtcggtttagtatcagttgcaattactatgttatatatcatgacaaacggacaagcagaagcatcagaaactaatcaaaagccaagtacaaatcaagaatcaacagctgttacacatactgaacaaaattcaaaagaaacaaaaacggcagagtcttctaagaactttgttaatttagaccctatcaaaccaggagatcaaaaggtaacagggactactatgccgaatcatattatattacttaacatagatggaaaaagtgttgattcagtagatggagaggacagttcatttataacttcaaaagaagatgggaagtttgagtatcctctaaataatcgtaaaatagttcacaaccaagaaattgaagtatcatcttcatctttagatgatttaggtgaagatgatgaagaggtagaagaagattccactgaaaaatctgaagctgaagaagaaagtacaggtgctaaagttacttacacaacaccgcgatatgaaaaagcgtatgaagtaccggaaaaacgattagaagaaaaagatggacatcaccaagttttcatcgaacctattactgaaggatcaggtattattaaagggcatacgtctgtaaaaggtaaagttgctttatctattaataataaatttattaattttgaaacaaattctaatggtggcccaaataaagaagaagcgaaatctggatcagaaggaatctggatgcctattgatgataaaggatactttaattttgacttcaaaacgaaacgtttcgataatttagagttaaaagaaggtaatgacatttcactaacatttgcacctgatgatgatgaagatgcattaaaacctttaattttcaaaactaaagtaacaagtttggaagatattgataaagcagaaactaaatatgaccatactaaagtcaacaaagtgaaaattttagataatgttaaagaagatttacatgttgatgaaatatatggaagcttatatcatacagacaaaggtaaaggtattcttgataaagaaggtactaaagtaattaaaggaaagactaaattcgcgaatgcagtagtgaaggtagactctgaactaggtgaagcacaattattccctgatttacaagtaaatgaaaaaggtgaatttagctttgactcacatggtgctggttttagattacaaaatggagaaaaactaaactttacagtagttgatcctattacaggtgagctgttgagtaatgagtttgtttctaaagagattgatattgaagaaacaccagaagaaaaagcagaccgtgaatttgatgaaagacttgaaaatacgcctgcttactacaagttatacggcgataaaatagttggtttcgatactaacgatttcccgattacttggttttatccattaggtgaaaagaaagttgaacgtataacacctaaattagaaaaataa

SEQ ID NO: 417834 - DNA, 687 bp, Staphylococcus aureus; identical to SEQ ID NO: 409768

SEQ ID NO: 417835 - DNA, 1260 bp, Staphylococcus aureus
atgagtaatacacaaaagaaaaatgtgccagagttgagattcccagggtttgaaggcgaatgggaagagaagaagttaggggatcttacagatagagtaattaggaaaaataaaaacttagaatcgaaaaagcctttaacaatatccggacagttaggtttaattgatcaaacagaatactttagtaaatcagtttcgtcgaaaaatctagaaaattatacactaataaagaatggagaattcgcgtataacaaaagttattctaatggatacccattaggggctattaaaagattaactagatatgatagtggtgtattgtcctctttgtatatttgtttttctattaaaagtgaaatgtctaaagatttcatggaagcatattttgattcgacacactggtatagagaagtttctggaattgcagttgagggtgcaagaaatcacggattattaaatgtttctgtgaatgatttttttactattctaattaaatatccaagtttagaagaacagcaaaaaataggcaagttcttcagcaaactcgaccgacaaattgaattagaagaacaaaagcttgaattacttcaacaacagaaaaaaggctatatgcagaaaatcttctcacaggaattgcgatttaagaatgagaatggtaatgattatcctgattgggaaagaattaaattttttgatgtaattgataaagtaatagattttagagggagaacaccaaaaaaattaaatatggaatggtctgacgaagggtatttagcattatcagcagtcaatgtaaaaaaaggctatattgattttaatgtagaggcgaaatatggaaatctagatttatatactagatggatgagaggaaatgaattatataaggggcaagtattatttacaactgaagcgccaatgggcaatgtagcacaggttccggataataaaggatatatattaagtcaaagaactatcgcgtttaattcaaatgaaaaaatcactgataactttttagcatcattgttgagctctgaaaatgtttataatgatttattaaaattgtgtagtggtgctacagcaaaaggtgtgagtcaaaaaaatttaaatcgactatacgttactattccacattccatatcagagcaagaagagattgctgaattctttagaaaaattaatcaattggttgagttgcaaaaatataaaattgaacatactaaaagtcaaaaacaagtgtttttacaaaagatgtttatttaa

SEQ ID NO: 417836 - DNA, 1557 bp, Staphylococcus aureus
atgtctattactgaaaaacaacgtcagcaacaagctgaattacataaaaaattatggtcgattgcgaatgatttaagagggaatatggatgcgagtgaattccgtaattacattttaggcttgattttctatcgcttcttatctgaaaaagcagaacaagaatatgcagatgccttgtcaggtgaagacatcacgtatcaagaagcatgggcagacgaagaataccgtgaagacttaaaagcagaattaattgaccaagtcggttacttcattgagccacaagatttattcagtgcgatgattcgtgaaattgaaacgcaagatttcgatatcgaacatttggcgacggcaattcgtaaagttgaaacatcaacactaggtgaagaaagtgaaaatgactttatcggactgttcagcgatatggatttgagttcaacgcgtttaggtaacaatgtcaaagaacgtactgcgttaatctctaaagtcatggttaaccttgacgatttaccattcgttcacagtgacatggaaattgatatgttaggtgatgcatacgaatttcttatcgggcgctttgcggcgacagcgggtaaaaaagcaggcgagttctatacaccacaacaagtatctaagatactggcgaagattgtcacagacggtaaagataaattacgtcacgtgtatgacccaacatgtggttcaggttcactgttgttacgtgttggtaaagaaacacaagtgtatcgttatttcggtcaagaacgtaacaataccacatacaacttagcgcgtatgaatatgttattacatgatgtgcgttatgaaaatttcgatatccgtaatgatgatacgttggaaaacccagcctttttaggccatacatttgatgcggttattgcgaatccaccgtatagtgcgaaatggacagcagattcaaaatttgaaaatgacgaacgatttagtggttacggcaagcttgcgccaaaatccaaagcagactttgcctttattcaacacatggtacattacctagacgatgaaggtaccatggcagttgtgctaccacatggcgtcttattccgtggggctgcagaaggtgtgattcgtcgttatttaatagaagaaaagaactacctagaagccgtgattggcttaccagccaatattttctatgggacaagtattccaacatgtattttagtatttaaaaaatgtcgccaacaagacgacaacgtattatttatcgatgcatccaatgattttgaaaaaggaaaaaatcaaaaccatttaagcgatgcccaagtcgatcgtattatagccacatataagcgtaaagaaacgattgataaatatagctacagcgcgacattacaagagattgccgataacgattacaacctaaatataccgagatatgtcgacacattcgaagaagaagagccaattgatttagatcaagtccaacaagatttgaaaaatattgacaaagaaatcgcagaaatcgaacaagaaatcaatgcatacctgaaagaacttggggtgttgaaagatgagtaa

SEQ ID NO: 417837 - DNA, 684 bp, Staphylococcus aureus
atgaaattgacagcattagcaaaagcaacattagcattagggattttaacaacaggaactttaacaacagaggcttattcaggtcatgctaaacaaaatcaaaagtcagtaaacaaacatgataaagaagcattacaccgatactacagtggaaactttaaggaaatgaaaaacattaatgctttgagacatggtaaaaataacttacgttttaaatatagaggtatgaagactcaagtattattgcctggagatgagtaccgtaaatatcaacagcgaagacatacaggcttagatgtgttttttgttcaagaaaaaagagacaagcacgacatatcatatactgttggtggcgtaacaaagtcgaataaaacacctgggtttgttagtgcaccattattaaatgttacaaaagaaaatggtgaagatgcttttgtgaaaggttacccttatgatattaaaaaagaagaaatatcactaaaagaattagattttaagttaagaaaacatctaattgaaaaatatggtctttataaaacaaaatcaaaagatggcaagattaaaattaacttgaaagatggcagcttttataaccttgatttaagatctaaattaaaattcaaacatatgggggaagtcatagatagtaaacaaattaaagatattgaagtgaatttgaagtaa

SEQ ID NO: 417838 - DNA, 624 bp, Staphylococcus aureus
atgatttcacacttgataacggatacttcgaagaagatacatcagatagcgactcagattcagatagcgattcagaatcagatagcgactcagactcagacagcgactcagattcagatagcgactcagattcagacagcgactcagattcagatagcgattcggactcagacagcgattcagattcggatagcgactcagactcagatagcgattcagattcagatagcgattcagactcagacagcgattcagattcagacagcgactcagactcagatagcgactcagattcggacagcgattcagactcagatagcgactcagactcagacagcgattcagactcagatagcgactcagactcagatagcgactcagattcagacagcgattcagattcagacagtgattcagattcagacagcgactcagattcagatagcgattcagactcagactcagatagcgattcagattcagacagcgactcagattcggacagcgactcagactcagacagtgattcagattcagatagcgactcagactcagatagcgactcagattcagacagtgattcagactcagatgcaggtaagcacacacctgttaaaccaatga

SEQ ID NO: 417839 - DNA, 462 bp, Staphylococcus aureus
atgatggcgaaagaaaacaaatcagataagcaaatgaagaaaattgcagaattagataagcaaattgatcatgatcagcatgaattattgaatgcaagtgaattgagcaaaacggacggcccaattctaaaccttgcttctggcgtttattttgcaaatgcatatgaagtgaattatttctctggtggttcatcagaaaaatataatcaatttatgggaccatacatgatgcattggtttatgattaactattgcttcgataatggttatgatcgttataatttctatggtttatcaggtgatttcacagaaaacagtgaagattatggcgtataccgctttaaacgtggatttaatgtacaaatcgaagaattaataggggatttctataaaccaattcataaagtgaaatattggttgttcacaacattggataaattacgtaaaaaattaaagaaatag

SEQ ID NO: 417840 - DNA, 201 bp, Staphylococcus aureus; identical to SEQ ID NO: 413950

SEQ ID NO: 417841 - DNA, 501 bp, Staphylococcus aureus; identical to SEQ ID NO: 412868

SEQ ID NO: 417842 - DNA, 576 bp, Staphylococcus aureus
atgtcaaaaggtttaaagctatctgaaatactagtaaccgtacttatttcagtagtattcgcagttatttacaatttatggtggtttgtttacaatggtgtgcaagctacaggccttcacctcgaacaattaacaaacggggtttggttcatggcagcgattgtctgctatctaattattccaaaaccaggtattgctttactggctgaatttgctgcaggtgccggcgaaactatcattatgggtcgtttcgatattccgacaatcgtttacgctttcatacaaggtttagcgtgtgaacttgtctttgcaatttttaaatatcaatctcgttcagttatggtagctatgttagcaggtttttgtacagcaatcgcggctttccctatagattatttctatggttatttaaatgaagttgcaggttggaacttaacattattcatcgtatttagattaattagtggtgcagtagtcgccggcgtcctatcttaccttttagtaaaagctttagataagacaggcgtaacaaaattatttagaccagctgctaaagaagattacgacaacttataa

SEQ ID NO: 417843 - DNA, 1401 bp, Staphylococcus aureus
gtgttaaaagtaagtgatttacgattaaaatatccaagtggtcagcgtaaaattttcgatcatttaaatatcactattcaagacaaagaaaaagtacttttactcggtccttctggttgcggtaaaagtacacttctgaatgtattaagtggtattgttcctaatttaattgaattacctatgaaatatgatgaactaatcgttgacccattaagtggcgttattttccaagaccctgatagccagttttgtatgccaaaagtatacgaagaacttgcattcgttttagaaaatagacaagtaccacgtgaagacatggatgcgttaattatcaatgctttaaatatggtcaatttaaatgttacccctgaaacgtatatcaaagatttaagtggcgggatgaaacagaaattggcaattgttgaaaccattcttcaacaatcaaaaacattgtttttagatgaaccgacagcaatgttagatgttcaagcaacagaagatttatggactaaactaattgaactttgggaagatcaaactgttgtaatcgttgaacataaagttaaacacatctggaatcatgtcgaccgcgtcattttgatggattataacggaaatatcattgccgatgaatgtcctgaaatcatattacagaagtatgttcatttactcagtgaatatggtgtgtggcatccacgtgcatgggaattcgcaccaagtcgtgttgactttccaacaacaaactcacacttattacaatttaaaaatggacgtattattcgcggtaaatcaaccttgctctcattttcagatttagaaattggtctaggtgagtggattacaattacaggggcaaatggtagtggtaaaacaaccttgcttgaatcaattatgcaattgattaaatatcaaggtgatgtttattttgaaaatcagcgtttaacaaaaattaaacatgcagcaaaacacatgtatctagtttatcaaaacccagaattacaatttataacaaattcggtttatgatgaaattaacattcattttaatcacctttctaaagatcaaagtgatgatgaaacgatacaacttttaaaacttttagatttacaaaatgtaaaagatcaacatccttatgagttgtctattggtcaaaaacgacgccttagcgtagctaccgcactaagttctaaagctgatattatctttttagatgaaccgacatttggacttgatagccataatacattccagttgatcaaacttttccaaaagcgaattaatttgggacaaagtattgtcatggttacacatgacgatgaaataattgaacgttatccatcaagaagacttaaaatttcagatggtgcgttactagattgtgatggtgatacgaatgtatga

SEQ ID NO: 417844 - DNA, 807 bp, Staphylococcus aureus
atgtatgagcaatggaaagttcggcaatcatttgttgatgatgtcaacattataacgaaactatttcttggaattatactatttttctttattatatttgtgcataatttcgattttatgctttatatcactatcttaatgttagttttcttattgatgtttaatggtactcagtttaaaattacagcaatttttataactataagtattggctttgcattactctcttccctgttcatgattttatacgggaatggtagccatacaattttgaaattcggatttatccatattacaacagaaagtttagttcgtggtttacatgtatcattaagaaccattgctatttcatttttcggtatcttaatcgcacttacatctcaggttgtcatgatattttatagtttaatgcaacatttaaaggttaaatcaaaagttgcttatgcattcatggctgccattcgtatgatacctttaatgattagttctttaatacagcttcgcagatctttaaaaatgcgctatcagatgatagacgcggcaaattatagagggttaaagcgatttaagcatttaattatacctctattaagccaaaatattagaaaggcacatcaattatcagttgcgatggagtcgaaaggatttagagatggtcctcgtacttactattacaacgtacctttctcatataaagatgtaatctttattatagttttaattgccattattactttggcatattattgttcaatcaccttacccatcacgggcatagatgatgttcgtcttggtcgtgtaggttaa

SEQ ID NO: 417845 - DNA, 1248 bp, Staphylococcus aureus; identical to SEQ ID NO: 405314

SEQ ID NO: 417846 - DNA, 1479 bp, Staphylococcus aureus
atgaagaaagctattttgagcgtatcaaataaaacaggtattgtagagtttgctaaagcgttaacgcaattaaattatgaattatattcaacaggtggtactaaacgtatattagatgaagcaaatgtaccagttcgttctgtttcagacttaacacattttccagaaataatggatggccgtgttaaaacattacatccagctgttcatggtggtattttagctgatcgaaataaaccgcagcatttaaatgaattatcagaacaacatatagatttaattgatatggtagtagttaatttatatccattccaacaaactgttgcaaaccctgatgtgacgatggacgaagcaattgaaaatattgatattggtggtccaacaatgttacgtgctgcagctaaaaactataaacatgtaacaacaattgtacatccggcagattatcatgaagtattgacgcgattaagaaacgattcgttagatgagtcatatagacaatcattaatgatcaaagtttttgagcatactgcagaatatgatgaagcgattgtacgtttctttaaaggggataaagaaactttaagatatggagaaaatccacaacaatcagcgtattttgtgagaacttcgaatgctaagcacacgattgcaggcgctaaacaattacatgggaaacaattaagctataacaatattaaagatgcagatgctacactagctttagttaaaaagtttgatacacctgctgcagttgcagttaaacacatgaatccatgtggtgttggtatcggtgacacgatagaacaagcatttcaacatgcgtatgaagcggatagtcaatcaatatttggtggaattgttgcattaaaccgagctgtaacacctgagttagcagagcaattgcatagtatctttttggaagtcattattgcaccaaaatttacggataaagcattaaatattttaaaacaaaagaagaatgtaagattattagaaattgatatgactatagacagtaacgaagaagagtttgtttcagtatctggcggatatttagttcaagataaagacaattatgtcgtgccaaaagaagaaatgaaagttgttacagaagttgcacctactgatgaacaatgggaagcaatgttattaggatggaaagttgtaccatcagtaaaaagtaatgcaattattttaagtaataataaacaaactgtaggaataggtgctggacaaatgaatcgtgtcggtgctgctaaaattgcattagaaagagctattgaaatcaatgatcatgtggcgttagtatctgatggatttttccctatgggagatacagttgaacttgcagcacaacatggtataaagacaattatccaaccgggtggttcgattaaagatcaagattcaattgatatggctaataaacatggtattgcaatggtagtcacaggcactcgacattttaaacactaa

SEQ ID NO: 417847 - DNA, 582 bp, Staphylococcus aureus
atggttaaaattgcgatttttgcatcaggttcaggaagtaactttgaaaatatagttgagcatgttgaatcaggaaaacttgaaaatattgaagttacggcgctatatacggatcatcaaaatgcgttttgtatagatagagcaaaaaagcacgatattcctgtttatattaatgaaccaaaacaatttgattcaaaagcagcatatgaacaacatttagtaacattattaaatgaagataaggtagagtggattattttagctggctacatgcgtctaattggtccagacttattagattcatttgaaggtaaaatattgaatatacatccatctctattgccgaaatataaggggattgacgcaataggccaagcatatcatagtggcgatactattactggttcgacagtacattatgttgatagtggtatggatacgggagaaattattgaacagagacaatgtgatattagaccggacgattcaaaagaacaattagaagagaaagtaaaaaaattggaatatgagttatatccaagtgttattgctaaaattgtaaaaaaaggagtatgtatgtga

SEQ ID NO: 417848 - DNA, 1029 bp, Staphylococcus aureus
atgtctaaagcatatgaacaatctggtgtaaatattcatgctggttatgaagctgtagaaagaatgtctagtcatgttaaacgtacgatgcgtaaagaagttatcggtggtttaggtggattcggtgctacatttgatttatcacaattaaatatgacagcaccagttttagtttctggaacagacggagtaggtacgaaattaaaactagctatcgactatgggaaacatgattcgataggtatcgatgcagtcgcaatgtgtgttaatgatattttaacgacaggtgcagaaccattgtattttttagattacatcgctacaaataaagttgttcctgaagttattgaacaaattgttaaaggtattagtgatgcatgcgttgaaacgaatactgcacttatcggtggagagactgctgaaatgggtgaaatgtatcacgaaggtgaatatgatgtagccggatttgcagttggagcagttgaaaaggatgactatgtagatggttcagaagtgaaagagggacaagttgttatagggcttgcgtcaagtggcattcattcaaatggatatagtttagtgcgcaaattaattaatgaatcaggcattgatttggcatcaaacttcgataatcgtccatttatagatgtctttttagaaccaactaaattatatgtcaaacctgtacttgctttaaaaaaagaagtttctattaaggcaatgaatcatattactggtggaggcttttatgaaaatattccacgtgcattgccagccggatatgctgctagaattgatactacatcatttccaacgccaaaaatatttgattggttacaacaacaaggcaatatagagacaaatgaaatgtataacatttttaacatgggtattggctatacggttatcgttgatgaaaaagatgtatcacgcgctttgaagattttagcagaacaaaatgtggaagcctatcaaattggtcatattgtgaaaaatgagtcaactgcaattgaattgttgggggtataa

SEQ ID NO: 417849 - DNA, 1485 bp, Staphylococcus aureus
atgtttaactactcaggattaaacgaagaatgtggcgtgtttggtatttggaatcatcctgaagcagcgcaactaacatatatgggacttcatagtttgcaacatcgtggtcaagaaggtgcaggtatagttgtttctgatcaaaatgaattaaaaggcgagcgaggattaggcttactaactgaagcgattaaagatgatcaaatggaacgattaaaaggatatcaacatgcaattggtcacgtccgttatgctacttcaggtaataaaggtattgaaaatattcaaccgtttctgtatcacttttatgatatgagtgtaggtatttgtcataatggtaacctcattaatgctaaatcattgcgtcagaatttagaaaaacaaggtgctatcttccattcgtcttctgatactgaagtcattatgcatttgatacgtcgaagtaaagctcctacttttgaggaagcgttgaaagaaagtttgcgaaaagttaaaggcggttttacatttgcgattttaactaaagatgcgttatatggcgcagtagatccaaatgctatcagaccacttgttgtaggtaaaatgaaagatgggacatacatccttgcaagtgaaacatgtgcaatagatgtgttaggtgcagaattcgttcaagatattcatgcaggtgaatatgtcgtgattaacgataaaggtattacagttaaatcttatacacatcatacgacaactgcaatttctgcgatggaatatatttattttgctagaccagactcaacaatagctggtaaaaatgtccatgcagtacgtaaagcttctggtaaaaaattagcccaagaaagccctgtaaatgctgatatggtcatcggtgtacccaattcatcgctatcagctgcgagtggttatgctgaagaaataggtttgccatatgaaatgggactagttaaaaatcaatatgttgcaagaacatttattcaaccaactcaagaattacgtgagcaaggtgtgagagtgaagttatctgcggtaaaagatatagtagatgggaaaaatatcattcttgttgatgattccattgttcgcggtacgacaattcgacgcattgtgaaaatgttaaaagattctggtgcaaataaagtacatgtgcgtatagcatcaccggaatttatgttcccaagtttttatggaatcgatgtttcaactacggcagaattaatttctgcaagcaaatcacctgaagaaattaaagattatattggcgctgattcattagcatatctatctgtagatgggttaattgaatcaattggtttagattatgacgcgccatatagtggcttatgtgtagaaagtttcactggagattatcctgcagggttatatgattatgaagcaaattataaagcgcatttaagtcatcgacaaaagcaatatatttctaaaaacaaacacttttttgatagcgagggaaatttaaatgtctaa

SEQ ID NO: 417850 - DNA, 2190 bp, Staphylococcus aureus
atgtctaaatttatcgaaccaagcgttgaagaaattaaacttgaaaaagtatatcaagatatgggattaagtgatcaagaatatgaaaaagtttgcgatattttaggcagacaacctaactttacagaaacaggtatcttttctgttatgtggagtgaacattgctcttataaacattctaaaccgtttttaaagcaatttcctacgtcaggtgagcatgtgcttatggggcctggtgaaggtgcaggggtagtcgatataggtgataatcaagccgtagtatttaaagtagagtctcacaaccatccatcagcaattgaaccatatcaaggggctgctacaggcgttggtggaatcattcgtgacattgtctctattggggctagacctattaatttgttaaacagtcttagatttggagaattagataataaacaaaaccaaagattacttaaaggggttgtaaagggtatcggaggttatggtaactgcattggtattccaacaactgctggtgaaatcgaatttgatgaacgttatgatggcaatccacttgttaatgcaatgtgtgttggtgttatcaatcacgacatgattcaaaaaggcacagcaaaaggtgtaggtaattcggtcatttatgttggtttgaaaactggtcgagatggtattcatggtgctacttttgcatctgaagaattgacggaagaaagcgaaagtaaacgaccttctgtacaaatcggtgatccatttgtaggtaaaaaattaatggaagcaacacttgaagcaattacatttgatgaattagttggtattcaagatatgggtgctgctggtttaacatcttcatcgtctgaaatggcggcaaaaggtggtagtggtttacatttgagattagaacaagtgccaacacgtgagccaggtatttctccttatgaaatgatgctttcagaaactcaagaacgtatgttactagttgttgaaaaaggtactgaacaaaaattcttagatttatttgataagcacgaattggatagtgctgttataggtgaagttacagatacaaatcgttttgttttaacatatgatgacgaagtttatgctgacattccagttgaaccactagctgatgaagcacctgtatatattttagaaggagaagaaaaagattataatacttctaaaaatgattatacacacatcgatgttaaagatactttctttaaattacttaagcatccgactatagcatctaaacactatttatatgatcaatacgaccaacaagttggtgccaatacgataattaagccaggacttcaagcatcggtagtacgtgtggaaggcacaaataaggcaattgcttcaacaattgatggtgaagcgcgttatgtatataacaatccatatgaaggtggaaagatggtagtagctgaagcttatcgaaatttaattgccgtgggtgcaacaccattagcaatgacagattgtttaaattatggttctcctgaaaagaaagaaatctatcaacagttgatagattcaacgaaaggtatggcagaagcatgcgacattcttaagacaccagtagtttctggaaatgtatctttatataacgaaacgaaaggtacttctattttcccaacaccagttgttggaatggtaggtttgattgaaaatgtaaattatttaaatgattttgaacctcaagttggagataaattatatttaatcggtgatactaaggacgactttggtggtagtcaacttgaaaagttaatttatggcaaagttaatcatgaatttgagtcattagatttgagttcagaagttgaaaaaggtgaatcaatcaagaccgctattcgtgaaggactattatcacatgttcaaacagttggtaaaggtggcttactgattaccttagctaaactaagtgcgcattacggtttaggattaaagtcttcaatagatataacaaatgcacaattgtttagtgagacgcaaggccgatatgttgtttctgttaaatcaggtaaaactttaaatattgataatgcaatagaaattggacttttaacagatagtgataatttcaaagtaacaacaccatatacagagattagtgaaaatgtttcagatattaaacaaatatgggaaggggcaattgctcaatgtttaactactcaggattaa

SEQ ID NO: 417851 - DNA, 672 bp, Staphylococcus aureus
atgaaatttgcggttcttgtttttccaggttcgaattgtgatagagacatgtttaatgctgctattaaaagtggtgttgaagcggaatatgtagattatagagaaacatcactaagtggatttgatggcgtacttattcctggtggattttcattcggggattacttaagatctggggcaatggctagtgtagcgccgattatttcggaagttaaacgtcttgcagctgaaggtaagccagtattaggtgtttgtaatgggtttcaaattttaactgaaataggcttattacctggtgcattattgcataacgattcacatttatttattagtagaaatgaagagttagaaatcgtgaataatcaaacggcatttacaaatctttatgaacaaggtgaaaaagttatatatcctgtagctcacggtgaaggtcattattattgtactgatgaaatatatcaacaattaaaagctaacaatcaaattattctgaaatatgtgaataatccgaacggttcaaatgatgatattgcaggaattgttaatgaaaaaggcaatgtatgcggcatgatgccacatcctgaaagagctttagaaacgttgttaggtactgatagtggtgtgaaattatttgaagcgatggtaaaaagttggagggaacaacatgtctaa

SEQ ID NO: 417852 - DNA, 264 bp, Staphylococcus aureus; identical to SEQ ID NO: 405321

SEQ ID NO: 417853 - DNA, 705 bp, Staphylococcus aureus
atgacattattatatgaaggaaaagcgaagcgcattttctcaacaaatcaagaaaatgaattaagagttaaatataaagatgaagttactgctggaaacggggctaagaaagacacaatggcaggtaaggggcgattaaataatcaaattacttctattatatttaaatatttacaagaaaatggaatagaaagtcactttattaaacaattatctgaaacagaacaattagttaagcctgtgaaaataattccattagaagtagttgttcgtaatattgctagtggatctattacaaagcgtttaggttttgaaaatggtgaagtttttagagaaccacttgtggaatttttctataaaaatgatgcgttaaatgatccgttgataacggatgaccatgttaaattgctcaatatagcatcagatgaagatattgaaatactaaaatccaaagcattaaagattaataatgtgttgaaacaattaatggatgctatgaatttaaaattagtagattttaaaatcgaatttggaaagactgagactggtcaaattttgttagcggatgaaatatctccagatacatgtcgaatttgggataaagctaccaatgcaaactttgataaagatgtatatagaaataacactggatcactgattgaaacatatcaaatatttttaaacaaattggaggatttaaaataa

SEQ ID NO: 417854 - DNA, 1125 bp, Staphylococcus aureus
atgaacttcaataaattaaagtttggtgcgactattggcattattggtggtggtcagcttggaaagatgatggcacaatcagctcaaaaaatgggttataaagtggttgtattggatcctgctgaagattgtccatgtagatacgttgcacacgaatttatacaagccaagtatgacgatgaaaaggcactcaatcaattaggacaaaaatgtgatgtgattacttatgaatttgaaaacatttcagcccaacaattaaaactattatgtgaaaagtacaatattccgcaaggttaccaagctatacagttattacaagaccgcttaactgaaaaagaaacattaaaaagtgctggtaccaaagttgtcccgttcatttcagtaaaagaatctacagatattgacaaagcaattgaaacattaggatatccttttattgtaaaaactagatttggtggctacgatggcaaaggtcaagttttaattaacaacgaaaaagacttacaagaaggttttaaattaattgaaactagtgaatgcgtagctgaaaaatatttgaatatcaagaaagaagtatctcttactgttacaagaggaaacaacaatcaaatcacttttttcccattacaagaaaatgagcatagaaatcaaatacttttcaaaacaattgttccagcgagaatagataaaacagctgaggcgaaagagcaagttaataaaattatccaatcgattcatttcattggaacatttacagtggaattttttatagatagtaacaaccaattgtatgtgaacgagattgcaccaaggcctcacaattccggacattattcaattgaagcatgtgattattcacaatttgatactcatattttagcagttaccggacaatcattaccaaattcaattgaattattaaagccagcagtcatgatgaacttactaggtaaagatttagatttattggaaaatgaatttaatgaacatccagagtggcacttacatatttatggtaagtctgagcgtaaagatagcagaaaaatggggcatatgactgtactaacgaatgatgtaaaccaaactgaacaagatatgtacgctaaatttgaggggagtaattaa

SEQ ID NO: 417855 - DNA, 483 bp, Staphylococcus aureus; identical to SEQ ID NO: 405324

SEQ ID NO: 417856 - DNA, 861 bp, Staphylococcus aureus
atggttgctaaaattttagatggtaaacaaattgccaaagactacagacaggggttacaagatcaagttgaagcgctaaaagaaaagggttttacacctaaattatccgttatattagttggtaatgatggcgctagtcaaagttatgttagatcaaaaaagaaagcagctgaaaaaattggtatgatttcagaaatcgtacatttggaagaaacagctactgaagaagaagtattaaacgaactaaatagactaaataatgatgattctgtaagtggtattttggtacaagtaccattaccaaaacaagttagcgaacagaaaatattagaagcaatcaatcctgaaaaagatgtggacggatttcatccaataaatatagggaaattatatatcgatgaacaaacttttgtaccttgcacaccgctcggcatcatggaaatattaaaacatgctgatattgatttagaaggtaaaaatgcagttgtaattggacgaagtcatattgtcggacaaccagtttctaagttactacttcaaaaaaatgcatcagtaacaatcttacattctcgttcaaaagatatggcatcatatttaaaggatgctgatgtcattgtcagtgcagttggtaagcctggtttagtaacaaaagatgtggtcaaagaaggagcagtaattatcgatgttggcaatacgccagatgaaaatggcaaattaaaaggtgacgttgattatgatgcggttaaagaaattgctggagctattacaccagttcctggtggcgttggtccattaacaattactatggtattaaataatactttgcttgcagaaaaaatgcgtcgaggtattgattcgtaa

SEQ ID NO: 417857 - DNA, 318 bp, Staphylococcus aureus; identical to SEQ ID NO: 405326

SEQ ID NO: 417858 - DNA, 1101 bp, Staphylococcus aureus; identical to SEQ ID NO: 405327

SEQ ID NO: 417859 - DNA, 1989 bp, Staphylococcus aureus
atgaattttccatgggatcaattactagttaaaggtaactggatgattacaatggcacaaattggtgccccattcttagttattggtttaatcgcagtaattacttactttaaattatggaaatatctttacaaagaatggttcacatctgtagaccataagaaaatcggtattatgtatttaatctgtgccgtattaatgttcgtccgtggtggtattgatgcgttacttattcgtgcgcaattaacagtacctgataacaaatttttagaatctaaccactataacgaaatttttagtacacatggtgtaatcatgattatcttcatggcaatgccatttatctttggtttatggaatatcgttgttccattacaaattggagcacgtgatgttgcattcccagtattaaacaacgtaagtttctggctattctttgcaggtatgattttattcaacctgtcatttattattggtggttcaccagcagctggttggacaaactatgcgccactagcaggtgaattcagtcctggtccgggtgttaactattacttaatagctatacaaatttcagggcttggtaccttagctacaggtatcaacttctttgtaacaattttaagatgtaaaacaccaactatgaagtttatgcaaatgccaatgtttacagtaacaacatttattactacattaattgttattcttgctttccctcctttaacagtagcgttagcattaatgacaactgatagaatatttgacacagcattcttcacagttgcacatggcggtatgccaatgctttgggctaacttcttctgggtatgggggcaccctgaagtttatatcgttatccttccagcatttggtatttactcagaaattatcccgacattcgctcgtaagcgtttattcggacatcaaagtatggtatgggcaactgccggtatcgcgttccttagtttcttagtttgggttcaccatttcttcacaatgggtaatggtgcgttaatcaactcattcttctcaatttcaacaatgctgattggtattccaactggtgtgaaattgtttaactggttattaacattatataaaggacgtattacatttgagtcaccaatgctattctcattagcatttatccctaacttccttttaggtggtgttacgggtgtaatgttagcaatggcatcagctgactatcaatatcacaatacgtacttcttagtagctcacttccactatacattggttactggtgttgtatttgcctgcttagccggtttaatcttctggtatccaaagatgatgggttacaaattaaacgaaacattaaacaaatggtgcttctggttcttcatgatcggatttaacgtttgtttcttaccacaattcattcttggattagatggtatgccacgtcgtttatacacttatatgccatcagatggttggttcttattaaacttaatttcaactatcggtgcattattaatggcaatcggattcttattccttgttgttagtatcgtatacagtcacttcaaatctccacgtgaagcaactggagataactgggatggccttggccgtactctagagtggactactgcatcagcaattccacctaaatacaactttgccattacaccagattggaatgactacgacacatttgttgatatgaaagaacatggtcgtcattacttagacaaccataattacaaagacattcatatgccaaacaatactcctgttggattctggattggtatctttatgactatcggcggtttcttcttaattttcgaaactgtaattccagcattaatttgtttattcggtatttttggtactatgatttatcgcagtttccaaatcgatcacggatatcatatccctgctgctgaagttgctgaaactgaagctagattaagagaagcgcgtattaaagaaagggaggctgtaagtcatgagtcatga

SEQ ID NO: 417860 - DNA, 606 bp, Staphylococcus aureus
atgagtcatgatacaaacactattgattcacgcacacatgaaggcgaattaaataagcttggcttttggattttcattacagccgaatttgcgttattcggtaccctatttgcgacactattaactttgcaacatggtggcgattatgcaggtaaaatgactactgagttatttgaattgcctcttgttttaataatgacgtttgcattattattcagttcttacacatgtggtattgctatttactacatgcgccaagaaaaacaaaagttaatgatgttttggatgattattacgttacttttaggtttagtctttgttggattcgaaatttatgaattcgcacactatgcatcagaaggcgttaacccaacaattggttcttactggtctagtttctttatcctattaggaacgcatggttgtcacgtatcgctaggtatcgtttgggccatttgtttattaatccaaatccaacgacgcggattagacaaatataatgcgccaaaattatttatagtaagtttatactggcacttcttagatgttgtttgggttttcatctttactgccgtatatatgatagggatggtgtatagcggatga

SEQ ID NO: 417861 - DNA, 291 bp, Staphylococcus aureus; identical to SEQ ID NO: 405330

SEQ ID NO: 417862 - DNA, 1194 bp, Staphylococcus aureus
atgaaatttaataaagtaaaactagttatacatgcgtgtgtactattatttatcattatttctatagcgttaatttttcatcgattacagacgaagacacattctatagacccaatacataaggaaacaaaattatcagacaatgaaaaatatttagtggatcgtaataaggaaaaggttgcgccgtctaaactaaaagaggtatataatagcaaggatcctaaatataagaaaattgacaagtatttacaaagttcattatttaacggttcagtagctatatatgaaaatggcaaattgaaaatgagtaaaggttatggatatcaagattttgaaaaaggtattaaaaacacaccgaatacgatgtttttaataggttcagctcaaaaattttcaacagggttactgttaaaacagttagaagaagaacataaaataaatatcaatgatccagtaagtaaataccttccatggtttaaaacatctaagcctatcccattgaaagatttaatgttgcatcaaagtggattatataaatataaatcctcaaaagattataaaaatttagatcaagcagttaaagcgattcaaaaacgtggtattgatcctaagaaatacaaaaagcatatgtataacgatgggaattatttagtacttgcgaaagtaattgaagaagttacaggtaaatcttatgctgagaattattatacaaaaataggagatcctttaaaacttcagcacacagcattttatgatgaacaaccttttaaaaaatatctagcaaaaggttatgcttataatagtacaggactttcattcttaagacctaatattttggaccaatactatggtgcaggtaatttatatatgacaccaacagatatgggtaaattaattactcaaatacaacaatataaattattcagtcctaaaataaccaatccattattacatgagtttggtacgaaacagtatccagatgaatatcgatatggtttctatgctaagccaacattgaatagacttaacgggggattctttggacaagtctttactgtttactataatgataagtatgtagttgtacttgcattaaatgtaaaaggaaacaatgaagttcgaatcaaacatatttataatgatattttaaaacaaaataaaccttacaatacgaagggtgttattgttcaataa

SEQ ID NO: 417863 - DNA, 1227 bp, Staphylococcus aureus
atgaataaatttttaaaatactttttgatccttctagcattggttctcattgttgttccaatagtcttcgctacgttactttttaaaacgtcccaagatgcattcgaatcttctcaagacagcaaaaatgctaatcgtcaatccaacttaagagataataaagtcaatcccgaagaacaacctatctctattcttttcttaggtatcgatgataacgatggaagaagaaaaaaaggacaggatgctgaacactctagatcagacgctatgattttaactacttttaatcaatcaaaacatcaaattagaatgcttagtattccacgtgatactatcagctacattcctaaagttggctattacgataagattacccatgcacatgcatatggtggtccaattgccgcaatggattcggtagaagctaccatgaatgtacctgttgattattatgtgagagttaatatgaaagcatttgtcgaggctgtaaatgagcttggtggcatatactatgatgtgccatacgacttaaatgaacctaacacagatgatactggtaagattaaaattaaaaaagggtaccaaaaattaaatggtgatgaggctttagcagttgctagaactagacatcatgattcagacttaaaacgtggacaacgtcaaatggaattaattaagattttattccaaaaagcacaggaagttgattctattgataaacttgataacgtgattcaaattgtaggtaaaaatgcaaagcataatttaactaactctgaaattaaagctttagcaaaaatgtacttaacaaatgatgttgaaattaaaactgcgcaattaaaaggtaaagatgatatgttaaatggtatttactattatcatccaagtgttgaaagcattcaaaaatatgcaaacttacttcgtaaagacttagaattatcacctattaatgataaaaatgatttcttagatcaacgtgttatcaaccattatggttcattaataccattaacgcctttagatagtagtttattgagaaaagaacaaaatgatacgacagataaagataaatcttcgaataatactgacgacagtaataatagtaataacaacaatggtgtcaataatcagcaacaacctactacgggtcaaaacactaaccaagatcaaggtaatattcaacaaacgccacaagcttcaaataaccaaaatggtgttgtaaactaa

SEQ ID NO: 417864 - DNA, 471 bp, Staphylococcus aureus
atgagtagaaaaacatacgaaaagattgcaaatataaatggcatgtttaatatgttagaacaacaaattattcatagccaagatatggctcattttagaagtgaatttttttacgtcaatcatgagcatcgagaaaactatgaagcactcctaatttattacaaaaatagtatcgagaatcctattgtagatggtgcatgttatattttagccctacctgaaattttcaatagtgtagatgttttcgaatcagagttaccattttcatgggtatatgatgaaaatggcattaccgaaacaatgaaatcacttagtattccattacaatatttagtcgcagcagctttagaagtgacagatgtgaatatatttaaaccttctgggtttgcaatgggaatgaataattggaatattgctcaaatgcgaatcttttggcaatatacagcaattattagaaaagaagcactataa

SEQ ID NO: 417865 - DNA, 435 bp, Staphylococcus aureus
atgttttcaaaagtaaacaatcaaaagatgttagaagattgcttctatataagaaagaaagtgtttgtagaagaacaaggcgtcccagaggaaagtgaaattgatgaatatgaatctgaatctattcacctcattggatatgataatggacagccagttgccacagctcgtatacgccctattaatgaaacaactgtcaaaatagaacgagtggctgtgacaaaatcacatcgtggacaaggaatgggtagaatgcttatgcaagctgtagaatcattagctaaagatgaaggtttttacgtagctactatgaatgcccaatgtcatgctatcccattttatgaaagtttaaactttaaaatgagaggtaatatatttcttgaggaaggcatcgagcatattgaaatgacaaaaaagttaacctcgcttaattaa

SEQ ID NO: 417866 - DNA, 3771 bp, Staphylococcus aureus
atggcgaaaaaattcaattacaaactaccatcaatggttgcattaacgcttgtaggttcagcagtcactgcacatcaagttcaagcagctgagacgacacaagatcaaactactaataaaaacgttttagatagtaataaagttaaagcaactactgaacaagcaaaagctgaggtaaaaaatccaacgcaaaacatttctggcactcaagtatatcaagaccctgctattgtccaaccaaaaacagcaaataacaaaacaggcaatgctcaagtaagtcaaaaagttgatactgcacaagtaaatggtgacactcgtgctaatcaatcagcgactacaaataatacgcagcctgttgcaaagtcaacaagcactacagcaactaaaactaacactaatgttacaaatgctggttatagtttagttgatgatgaagatgataattcagaaaatcaaattaatccagacttaattaaatcagctgctaaacctgcagctcttgaaacgcaatataaagccgcagcacctaaagctgcaactacaacagcacctaaagctaaaactgaagcgacacctaaagtaactacatttagcgcttcagcacaaccaagatcagttgctgcaacaccaaaaacgagtttgccaaaatataaaccacaagtaaactcttcaattaacgattacattcgtaaaaataacttaaaagcacctaaaattgaagaagattatacatcttacttccctaaatacgcataccgtaacggcgtaggtcgtcctgaaggtatcgtagttcatgatacagctaatgatcgttcgacgataaatggtgaaattagttatatgaaaaataactatcaaaacgcattcgtacatgcatttgttgatggggatcgtataatcgaaacagcaccaacggattacttatcttggggtgtcggtgcagtcggtaaccctagattcatcaatgttgaaatcgtacacacacacgactatgcttcatttgcacgttcaatgaataactatgctgactatgcagctacacaattacaatattatggtttaaaaccagacagtgctgagtatgatggaaatggtacagtatggactcactacgctgtaagtaaatatttaggtggtacggaccatgccgatccacatggatatttaagaagtcataattatagttatgatcaattatatgacttaattaatgaaaaatatttaataaaaatgggtaaagtggcgccatggggtacgcaatctacaactacccctactacaccatcaaaaccaacaacaccgtcgaaaccatcaactggtaaattaacagttacagcaaacaatggtgtcgcgcaaatcaaaccaacaaatagtggtttatatactactgtttacgacaaaactggtaaagcaactaatgaagttcaaaaaacatttgctgtatctaaaacagctacattaggtaatcaaaaattctatcttgttcaagattacaattctggtaataaatttggttgggttaaagaaggcgatgtggtttacaacacagctaaatcacctgtaaatgtaaatcaatcatattcaatcaaacctggtacgaaactttatacagtaccttggggtacatctaaacaagttgctggtagcgtgtctggctctggaaaccaaacatttaaggcttcaaagcaacaacaaattgataaatcaatttatttatatggctctgtgaatggtaaatctggttgggtaagtaaagcatatttagttgatactgctaaacctacgcctacaccaacacctaagccatcaacacctacaacaaataataaattaacagtttcatcattaaacggtgttgctcaaattaatgctaaaaacaatggcttattcactacagtttatgacaaaaccggtaagccaacgaaagaagttcaaaaaacatttgctgtaacaaaagaagcaagtctaggtggaaacaaattctacttagttaaagattataatagtccaactttaattggttgggttaaacaaggtgacgttatttataacaatgcaaaatcacctgtaaatgtaatgcaaacatatacagtaaaaccaggcactaaattatattcagtaccttggggcacttataaacaagaagctggtgcagtttctggtacaggtaaccaaacttttaaagcgactaagcaacaacaaattgataaatctatctatttatttggaactgtaaatggtaaatctggttgggtaagtaaagcatatttagctgtacctgctgcacctaaaaaagcagtagcacaaccaaaaacagctgtaaaagcttatactgttactaaaccacaaacgactcaaacagttagcaagattgctcaagttaaaccaaacaacactggtattcgtgcttctgtttatgaaaaaacagcgaaaaacggtgcgaaatatgcagaccgtacgttctatgtaacaaaagagcgtgctcatggtaatgaaacgtatgtattattaaacaatacaagccataacatcccattaggttggttcaatgtaaaagacttaaatgttcaaaacttaggcaaagaagttaaaacgactcaaaaatatactgttaataaatcaaataacggcttatcaatggttccttggggtactaaaaaccaagtcattttaacaggcaataacattgctcaaggtacatttaatgcaacgaaacaagtatctgtaggcaaagatgtttatttatacggtactattaataaccgcactggttgggtaaatgcaaaagatttaactgcaccaactgctgttaaaccaactacatcagctgccaaagattataactacacttatgtaattaaaaatggtaatggttattactatgtaacaccaaattctgatacagctaaatactcattaaaagcatttaatgagcaaccattcgcagttgttaaagaacaagtcattaatggacaaacttggtactatggtaaattatctaacggtaaattagcatggattaaatcaactgatttagctaaagaattaattaagtataatcaaacaggtatgacattaaaccaagttgctcaaatacaagctggtttacaatataaaccacaagtacaacgtgtaccaggtaagtggacagatgctaactttaatgatgttaagcatgcaatggatacgaagcgtttagctcaagatccagcattaaaatatcaattcttacgcttagaccaaccacaaaatatttctattgataaaattaatcaattcttaaaaggtaaaggtgtattagaaaaccaaggtgctgcatttaacaaagctgctcaaatgtatggcattaatgaagtttatcttatctcacatgccctattagaaacaggtaacggtacttctcaattagcgaaaggtgcagatgtagtgaacaacaaagttgtaactaactcaaacacgaaataccataacgtatttggtattgctgcatatgataacgatcctttacgtgaaggtattaaatatgctaaacaagctggttgggacacagtatcaaaagcaatcgttggtggtgctaaattcatcggcaactcatatgtaaaagctggtcaaaatacactttacaaaatgagatggaatcctgcacatccaggaacacaccaatatgctacagatgtagattgggctaacatcaatgctaaaatcatcaaaggctactatgataaaattggcgaagtcggcaaatacttcgacatcccacaatataaataa

SEQ ID NO: 417867 - DNA, 420 bp, Staphylococcus aureus
atgtataaacaacttgaaaaacttattacactgactaacaatgacttaaacttagtgaatagaagatttggacaacgcacggatatcacatctgaacagctagaacttctccgtattttatttaattacgatcgcttatcacagtatgatttgacgatgaagattagcagggaacaatctatagtttcaagatggattaagaaattagttttgaaagggtacatcacaagtcaacaatctagcgaagatttaagatgtaaagaattaattttgactgatcaagcacgtacattaatttcacaaataaataatgcacgttgcgaattgattgaagcaagatgtcaatgtttatcggaagtcgaattagacaatttaaatcaattacttgataagttaaatcaacgacgcatatcgttgtaa

SEQ ID NO: 417868 - DNA, 1011 bp, Staphylococcus aureus; identical to SEQ ID NO: 411164

SEQ ID NO: 417869 - DNA, 1155 bp, Staphylococcus aureus; identical to SEQ ID NO: 405338

SEQ ID NO: 417870 - DNA, 1029 bp, Staphylococcus aureus
atgaaaggtaaatttttaaaagttagttctttattcgttgcaactttgacaacagcgacacttgtgagttctccagcagcaaacgcgttatcttcaaaggctatggacaatcatccacaacaaacgcagtcaagcaaacagcaaacacctaagattcaaaaaggcggtaaccttaaaccattagaacaacgtgaacacgcaaatgttatattaccaaataacgatcgtcaccaaatcacagatacaacgaatggtcattatgcacccgtaacttatattcaagttgaagcacctactggtacatttattgcttccggtgtagttgtaggtaaagatactcttttaacaaataaacacgtcgtagatgctacgcacggtgatcctcatgctttaaaagcattcccttctgcaattaaccaagacaattatccaaatggtggtttcactgctgaacaaatcactaaatattcaggcgaaggtgatttagcaatagttaaattctcccctaatgagcaaaacaaacatattggtgaagtagttaaaccagcaacaatgagtaataatgctgaaacacaagttaaccaaaatattactgtaacaggatatcctggtgataaacctgtagcaacaatgtgggaaagtaaaggaaaaatcacttacctcaaaggcgaagctatgcaatatgatttaagtacaactggtggtaactcaggttcacctgtatttaatgaaaaaaatgaagtgatcggaattcattggggcggtgtaccaaatgaatttaatggtgcggtatttattaatgaaaatgtacgcaacttcttaaaacaaaatattgaagatatccattttgccaacgatgaccaacctaataacccagataatcctgataaccctaacaatcctgataaccctaacaatcctgataaccctaacaacccagatgaaccaaataaccctgacaaccctaacaaccctgataatccagacaatggcgataacaataattcagacaaccctgacgctgcataa

SEQ ID NO: 417871 - DNA, 1182 bp, Staphylococcus aureus
atgaatagttcatataaatctagagtattcaatattataagcatcataatggtttcaatgcttattttatcactaggcgcatttgctaataacaataaagccaaagccgattcacactctaaacagctagaaattaatgttaagagtgacaaagtacctcaaaaagtaaaagatctagcacaacaacaatttgctggttatgctaaagcattagataaacaaagtaatgcaaaaactggtaaatatgaacttggcgaagcttttaaaatttataaatttaatggtgaagaagataatagttactattatccagttataaaagacggtaaaattgtttatactttaacacttagccctaaaaataaagatgatttaaacaaatcaaaagaagacatgaattacagtgttaaaatttcaaacttcatcgctaaagatttagaccaaattaaagataaaaattcaaatatcactgttcttactgatgaaaaaggattttattttgaagaagatggcaaagttagattagtaaaagctacgccactacctggtaatgtaaaagaaaaagaaagtgctaaaacagtttcatcaaaattgaaacaagagttaaaaaatacagtaacacctactaaagttgaagaaaacgaagcgatacaagaagatcaagttcaatatgaaaatacattaaaaaacttcaaaattagagaacaacaattcgataactcatggtgtgcaggatttagtatggcagcattattaaatgcaactaaaaatacagacacttataatgcacatgatattatgcgtacattataccctgaagtaagtgagcaagaccttcctaattgctcaacattccctaatcaaatgattgaatacggtaaatcacaaggcagagatattcattatcaagaaggcgtaccatcatatgaacaagttgatcaacttacaaaagataatgtaggaattatgattcttgcacaaagtgtatctcaaaaccctaatgatccacatttaggacatgccctagcagttgttggtaatgctaaaattaatgaccaagaaaaacttatttactggaatccttgggatacagaattatcaatccaagatgcagattcaagcctattacatttatcattcaatcgtgattataactggtatggttcaatgataggttactaa

SEQ ID NO: 417872 - DNA, 330 bp, Staphylococcus aureus
atgtatcaactacaatttataaatttagtttacgacacaaccaaactcacacatctagaacaaaccaatatcaatttattcattggtaattggagtaatcatcaattacaaaaatcaatttgtatacgtcatggcgatgatacaagtcacaatcaatatcatattctttttatagatacggcacatcaacgcattaaattttcatctattgataatgaagaaatcatttatattcttgattatgatgatacacagcatatcctcatgcaaacgtcatccaaacaaggtattggcacttcgcgcccaatcgtttatgagcgcttagtataa

SEQ ID NO: 417873 - DNA, 822 bp, Staphylococcus aureus
atgactaacagacaatgggaaacacttagagaatatgatgaaatcaaatatgaattttacgaagggattgctaaggtaacaataaatcgccctgaagtacgcaatgcgtttacacctaaaacagttgctgaaatgattgacgcattttcacgtgcacgtgatgatcaaaacgtttcagttatcgtattaactggtgaaggtgatttagcattctgttctggtggtgaccagaagaaacgtggacatggtggttatgtaggtgaagaccaaatccctcgcttaaatgtattagatttacagcgtttaattcgtattattccaaaaccggttatcgcgatggtaaaaggttatgctgtaggtggcggtaatgtactaaatgttgtttgtgacttaacgattgctgctgataatgctatttttggacaaactggtcctaaagtaggttcatttgatgcgggttatggttcaggatatttagcacgtatcgttggacataagaaagcacgtgaaatttggtacttatgtcgtcaatacaatgcacaagaagctttagatatgggtctagtaaatacagtggtacctttagagaaagttgaagatgaaactgtgcaatggtgtaaagagattatgaaacactcaccaacagcgttacgattccttaaagcagctatgaatgctgacacagatggtttagctggtttacaacaaatggctggggatgcaacactgctttattacacaactgatgaagcgaaagaaggccgtgatgcgtttaaagaaaaacgtgatcctgacttcgatcaattccctaaattcccataa

SEQ ID NO: 417874 - DNA, 804 bp, Staphylococcus aureus
atgacacattataattactatgaagcaaacgttgagaccaatcaagttttagtattactgcatggttttcttagcgacagtcgtacttatcataatcacatcgataaatatactgatatctgtcatgtcgtcactatagacttaccaggacatggcgaagatcagtcttcaatggatgaaacgtggaattttgattatattacgacgttattagaccgaattttagataaatataaagataaatcaataacattgtttggatattcaatgggtgggcgtgttgcattatattatgcaattaatggtcacatccctatatctaatttgatattagaaagtacgtcaccaggtattaaagaagaagcaaatcaattggaacgtcgtcttgttgatgatgcacgtgctaaagtattagacatagcaggtattgaattatttgttaatgattgggaaaagttgccattatttcaatcgcaactagaattaccagttgaaatacaacatcaaataagacaacaacgattgtcccaatcgccacataaaatggccaaagcattaagagattatggtacaggtcaaatgccaaacttatggccgcgcctgaaagaaattaaagtaccaacattaatattagctggagaatatgatgaaaaatttgtacagattgcgaaaaaaatggcaaatttaattcctaatagtaaatgtaaattaatttctgctacaggtcatacaattcatgtggaagatattgatgaatttgatacaatgatattaggatttttaaaggaggagcaaaatgactaa

SEQ ID NO: 417875 - DNA, 1674 bp, Staphylococcus aureus
atgggaaatcataaagcagctttaacgaagcaagtttttacatttgcatctgagttatatgcgtacggcgtaagggaagtagttatcagtccgggatcacgctcaacgccacttgcacttgcatttgaagcacatccaaatattaaaacatggatacaccccgatgagcgaagtgcagcgttttttgcagttgggttaattaaaggcagtgaaagacctgtcgctatattatgtacgtcaggtacagcagcagcgaattatacgcctgcaattgctgaaagccaaattagtagaattccattaatcgttttaacaagtgaccgtccgcatgaattaagaagtgtaggcgcaccacaagcgattaatcaagtaaatatgtttaataattatgtaagttatgagttcgatatgcctattgcggatgatagtaaagagaccattgatgcaatttattatcaaatgcaaattgctagtcaatatttatatggaccacataaagggccgattcattttaacttgccatttagagatccgttaacacctgatttgaatgcaacagaattgttaacttctgagatgaagattttaccgcactatcaaaaaagtatagatgcatcggcattaagactcattttaaataagaaaaaaggtttaattattgtaggggatatgcagcaccaagaagttgatcaaatactgacgtattcaacgatatatgatttgcctattttagctgatcctttaagtcatttaagaaaatttgatcatccgaatgttatctgtacatatgatttgttgtttagaagcggtttagacttaaaagtcgatttcgtaattcgtgttgggaaaccagtgatttctaaaaagttgaatcaatggttaaagaaaactgatgcatttcaaatattagtgcaaaacaatgataagattgatgtctttccaatagcaccagatatttcatatgaaatatctgcgaatgatttctttaggtcattaatggaagacacgacagttaatcgagtcaattggttagaaaaatggcaacgcttagagaaaaaagggcgtaaagaaattaaatgttatttggaacaagctacagatgagagtgcattcgttggtgaattgattaagaaaacatctgaaaaagatgcattatttattagtaatagtatgccaatcagagatgtagataacttgttattgaataaaaatatagatgtctatgcgaatcgtggtgcgaatggtattgatggtatcgtttcaactgcactgggtatggctgtccataaacgagttacattattgataggtgatttgtcattttatcatgatatgaatggactattaatgtcaaaattaaataatattcagatgaatattgtattattgaacaacgatggtggcggtattttttcatatttaccacaaaaagaaagtgcaaccgattattttgaacggttgtttggcacaccgacgggattggatttcgagtatacagcgaagttatatcaattcgattttaaacgttttaacagtgtttcagaatttaaaaatgccacattgttatctgaaacttcaacgatttatgaattgataacgaatcgtgaagataattatgaacagcatcaaattttatatcagaaattgagtgaaatgattcatgacacattataa

SEQ ID NO: 417876 - DNA, 1362 bp, Staphylococcus aureus
atggctacgggcgtattagaggacgatattgtcaaagagatatatggcagctcaaaggaatgggtttcagttgaagtgaaattatcacagtcactagacccgagcacattatttcatctcactgacaatgaggcaggagatcgcttttatatgcgtttgaatgataatcgaacgtcatattttggctacaaagcaattcaattattcaaaaataattctaaaaataaacaatctatttttaaagactgggaaaaattaaaacataacatcacatttatacatccgcaatctgagaaacatcatcttcgagttgttggagggtttcaattttcaagtcataaatcagatgatgaatggcgagagtttggactaaatcattttgtattacctgaagttttaatttcaactgataataatgggacatttttaacttatacagttaaaagggaaagttttactgttgaggcattgaacgatttaatggatttgttcaacaatatatcggatatagatgtggacgagcaaattggggaaattactagaaatgaagatatttataaagatgactggcgtcaacttgtagtagaagctatagaatctattaataatgaagaaaaaattgtactagcacgtagacggttaataaagttcgataaagatatcagtattccatatattctaaagcaagcatattctaaagaaaaaaacagttatatattcttgttagaatcacaagattctattttcttttcacaaacacctgaacaattaataaaggtcaataataaaatactatcgactaaagctgtagcaggtacaattaaacgttcacaagatgaggacgaagatacaaaaaatgttgaagcatttttaaaagataataaaaacttaatcgaacatcgatttgttgttgacagtattttacatgatattaaaccttatatcactgaattacattatgataagacgcctaaaattctaaaaaatgatcatttatatcacttgtacactgaaataaaggcgccactgaaggatgattcgtatattagtttaattgatcatttacatccaacacctgctttaggtggctatccaaaagaatttgcgatggattttattgaacagaaagaatttggtacacgaggattatatggtgcgccggttggctatatagatatatatgatgattgtgaatttattgttgcaattcgttcgatgcttattaagaaagcacaagcaactttatttgctgggtgtggcattgttaaagattctgatccagatagtgaattggcagaaacgaaccttaagttcacacctatgatgaatgcattaggagtcgatatgaatgggaaatcataa

SEQ ID NO: 417877 - DNA, 939 bp, Staphylococcus aureus; identical to SEQ ID NO: 405346

SEQ ID NO: 417878 - DNA, 552 bp, Staphylococcus aureus; identical to SEQ ID NO: 407829

SEQ ID NO: 417879 - DNA, 216 bp, Staphylococcus aureus
atgaaagtcaataaagccatttatgttattgttgcattatttcttggaggtttaggtattcataaattttatgctgataaatttggacaaggtctttttcacttattatttttctggacaggtatccctaccatcatctcaataatacatgccatttttgtcatttttactaaaaaagcagataaagatggttatattatattccctaaaaattaa

SEQ ID NO: 417880 - DNA, 960 bp, Staphylococcus aureus
gtgaataggaatatcgttaaactagttgtgtttatgctaattttagttgtagcagtagcgggttgtggtcaaaaagatactgaagagaaaactgaaatgacgacaataaaagatgaattaggaactgaaaaaattaagaaaaatcctaaacgtgttgttgtattagaatatagttttgctgattatttagcagcattagatatgaaacctgttggtattgcagatgatggcagcactaaaaatataacaaagtcagtaagagataagattggggcatatgaatcggttgggtctagactgcaaccgaatatggaagtgataagtaaattaaaaccggatttgatcattgcagatgttagcagacataagaaaatcaaatcagaattgagcaaaattgcgccgacaattatgttagtcagtggtacgggcgattataatgcaaatattgaagcatttaaaacagtcgctaaagcagtaggcaaagagaaagaaggcgagaaacgtctggaaaagcatgataaaatattagcggagattagaaagaaaattgaacagagtacgttaaaatctgcatttgcattcggtatctcaagagcaggtatgtttattaataatgaagatacatttatgggacaattcttaattaaaatgggtattcaacctgaagtcacaaaagacaaaactactcatgttggtgaacgcaagggtggtccttatatttatttaaataatgaagaacttgccaatatcaatccaaaagttatgattttagccactgacggaaaaacggacaaaaatagaacgaaattcattgatcctgcagtttggaaatcattaaaagctgtgaaagataacaaagtttatgacgttgaccgaaataagtggttgaaatcaagggggattatcgcaagtgaaagtatggcagaagatttagaaaaaattgtagaaaaagcaaaataa

SEQ ID NO: 417881 - DNA, 357 bp, Staphylococcus aureus; identical to SEQ ID NO: 417645

SEQ ID NO: 417882 - DNA, 246 bp, Staphylococcus aureus; identical to SEQ ID NO: 410943

SEQ ID NO: 417883 - DNA, 321 bp, Staphylococcus aureus
atgaaatttatcattgcaatattattaggattaatcgtatccattactattgcttttacaatcatacatcatcctatacttgatcgttttaatcctttcttaaaaacggagtatagttatgccaaagtgccaaaaggtacgcaacaatatgttaatattacggcttatagtgaaagaggggaaaagcttgattataaattaacatttaatggattttcacctagtagaacgtatgtcgaaataaagcataaagggcaatatgtcatatcgatcacatatgttgaaaaagaggatataccaaaagaggtaagacaagaatga

SEQ ID NO: 417884 - DNA, 1965 bp, Staphylococcus aureus
atgaaatggttcaaattaatacttgatgttacaatcttcattctgattgctatattgttatttgtttatacatataaagaaaacgaagaaatattgcctgatactaaataccctatagcggtaactgactggaataaaaaatatagtaaaaatgagatttataaacgtatagatcaattcgctaaaaatgagaacgtagcaatctataaatcaacttcaaattatacaaacaaaaacgtagataaagatatatatgtatttaataaatcaaaagcagcaactatcactccttttaatgctaaatataacattcattatttaagtgatgacgaattattaaaaaaagatatcaaagggagttattttgtaaaagacaaaaattttgacgtatctaaattcataaattttttaaaagaatatggtgttactgctgaatcatacaaaatagatcatatgatgattgccgttggtgtcgttaaacaaatgaatatagtagttccgttatcctcacttttaatcgtttattttatttattatattttcgaaaagaacattaatttcaaagcgtatgcgattaagtatttaaatggttttacattaagaaaaataatttttgaaaatttttcaaaaaaatgcacgtattgggtaacgttaatcataactcaaattcttttaactacaagtgtactttggatattaaattacacgggtaatttagatttattcatattaagattagttttgctttcatgtcttttcattttaacgattagtgttattaatttatggactttcttaatgttactaaatttaaatattgccaatatgattaaaggtaagcagcactttaaaacaattcgttttattaatacagtttgtaaaagtattctcttagtactaatagctagtgtaatgatagaaaatactagtgttattaaagatttgaataaaataaaggaaactgagaaatattggaatgtattagatgattattacacgattgaatttgcaccttatcacgaaacgaaacaaagtttgattgataatatgctgcgatcagaacaattagtaaaggctagtgaagcagaaaataatgcgattttattcaaaccaaagggtgactccgttgacaatgacaacttttcgcctgatgaggggaatgtaatattagtaaataatcagttctggtcgatttattacaagcagtttcaacctgatattccgataaaaaatcaaaaaaataatgtcgaagtaattattccacaaaagtttcatgcaatgcgtaatgaaatcaatcaagcatatcattcatggtttgaatttgtacaaaataaaaataataaagagaataagttatctatacagtttatcaacaaaaatgattatcgaattttttcatttgatgcacgagatagtcgccatttgtcatttatagaggcgccaatcattgtgaatgttcaggcatcagatttatcgaatgatttttattatgccatgatcagtcaaggcgggtatttattcaaaaattatgacgcgctagtaaaaaatattgaaaagtatcatcttgatggggaaatcagtggaataaccaattataaagatagcgtgatggaaatgtatcatgaaaacaatttgaaattaacagtactcaacttttcacaaatcattatcgcaatcattttaataattattattttatttgatgtgaaatattattttgaacagcatcgaaaattactcgtaatcaaaaagctatatggttattcaacattaagagccaattaccaatacttattaataaataatatagttgttgtttttattggaatattgacgaatgtaattttacattctcactatataatgatgatatttgcaacgattcttgtcgttcaaatattattgcagatttgcagcctatactatcatggccgacgttttaatgaagttatcaaggagttttaa

SEQ ID NO: 417885 - DNA, 603 bp, Staphylococcus aureus
atgaataaaatctcgaaggctttaacttggtttattataagtttcattatatttcatctcatattatttattatgtggggcgaacaccaagaatactggtatttatatacaggtataatgctaattgctggtatcagttatgtattttatcaaagagatattgaatctaagcggttgcttacatcaattggtgttggtattattacagcaattattttaattatgcttcaacttttattctcacttataacttctaatttaagttatagttcattaattaaagaattagcaagaacaggtgtcaattggaagtggcaaatgttagtaactttactttttgtcattccatgtcacgagttatatatgagaactgttttacaaaaagaattaacacatttttcaataccgaaatgggtagctatattaataactgcaatttgttctagttcattatttatttatttagataattggtggatagtaacatttatatttgttgcacaagtgatattatcattaagttatgagtatactcgacgtatagcaacaacatccgttgcacaaattgtagctattatattgttattaatttttaatgcttaa

SEQ ID NO: 417886 - DNA, 177 bp, Staphylococcus aureus; identical to SEQ ID NO: 405358

SEQ ID NO: 417887 - DNA, 987 bp, Staphylococcus aureus
atgaaattcattagtaataataatattacagatccaactttaaacttagcaatggaagaatatgttttaaaaaatttaccagcagaagaaagttactttttattttacataaatagaccatctatcattgttggaaagaatcaaaatacgatagaggaagtaaatcagacatatatagatgctcataacatcgatgtagttagaagaatttctggtggtggcgctgtttatcatgatactggcaatttaaactttagttttataacagatgatgatggtaacagtttccacaatttccaaaaattcactgaaccaattgttcaagcattacaatctttaggcgtaaatgctgaattaactggtcgtaacgatattcaagttggacaagcgaaaatctcagggaatgctatggttaaagttaaaaatagaatgtttagtcatggtacgttgatgttaaatagtgatttagacgaagttcagaatgcactaaaagttaatccagctaagattaaatcaaaaggtattaaatctgttcgtaaacgagtagcaaacattcaagaatttttaaatgaccctttagaaattgaagaatttaaaaaaatcatcttgaaaactatctttggagaaactgaagtagaagaatataaattaacggatgaagattgggaaaatattgaaaagttaagtaacgacaaatatagaacttgggaatggaattatggtagaaaccctaaatataactttgaacgcgaggaaaaatttgaaaaaggatttgtacaaattaagtttgatgttaaacgaggtaaaatcgaacatgcaaaaattttcggtgatttctttggtgtcggagatgtcactgatcttgaaaatgcattagttggctgtctacacgactttgagcacatagaagaagcactatcagaatatgatttatatcattatttcggtgacatagatagacatgaattaattagattaatgtcataa

SEQ ID NO: 417888 - DNA, 219 bp, Staphylococcus aureus; identical to SEQ ID NO: 405360

SEQ ID NO: 417889 - DNA, 570 bp, Staphylococcus aureus; identical to SEQ ID NO: 405361

SEQ ID NO: 417890 - DNA, 1515 bp, Staphylococcus aureus
atgatggaaaaaaatgaaaacattaatgtagagattttaactacgtcagatatgcatagtcatttcttaaatggtgattatggttcaaatatttatagagctggtacttatgttaaccaagtaagagcacaaaatcatcgcgtcattttattagatagtggcggaagtttagctggctcgttagcggcctattattatgctattgttgcaccttataaacgacatccaatgataaagttaatgaacagaatgcattatgatgctagcggtgtgagtccaagtgaattcaagtttggtttatcatttttaactcgttcaattgctttggcacgttttccatggttatcagcaaatattgaatacaatgttactaaggagccttatttttcaactccatattgtattaaacattttggtgacttaaaaattgctatcgtaggcgtcacagcagatggtttaatggaaaatgagtattctgaaatggagcaagatgtatctattgaaaagacattagtggcatcaaaacgatggattagatatatccatgaagttgaagagccagattttttgattgtaatttatcatggtggattgaataaaattagtaatagtacgaaaaataaaaaggcaagttcgaatgaagctgaaaaattaatggaagaactcggtgttatagatttaatgattacagctcatcagcatcaaacaatagtaggtcaagatcatgaaacgtattatgttcaggctggtcaagatgccaaagagcttgtacatctttcgattaattttaaaaagagaacaacaacttatgatgttgaaagcattgattctaaagtgattgatttaaatgagtatgaagaggatcaagaattattagatttaacattctatgatagaaaagcagtggcttattggtcacaggaaatcataagtgataaaggtttgatgttatcagtaaatgggttacaagatttagtctgtcaaacacatccattttcgcaattattacatgatgcaattcaccttgcatttgataatggtataacatgtgtccacgtgcctatgaacggagagaaggggctgagtggacagattcgaaatgaagatttgtatcatgcatacccatatccagataagccaatggatatgacaattagtggtcaaaatatcaaagatatattggagtatagttattcacatttagattttgttaacgagcaattaagcttaacaattattgatgaaacattatgtacaatgtggcaaggattcaattatgagattgatatgaatcaagaacctggtcaacgagtaatgttagatcaaattgatttgactaagagttatagagttacaatgactgactattgttatcgtaactacaagaattatttgaaaaatgctattatacatgaatcatacgatgaaacaatgagtacattaattgcagagaagttaagagatccgaattatcgtatttcatgtagtgataattttgtagttaaaaacaggtaa

SEQ ID NO: 417891 - DNA, 1359 bp, Staphylococcus aureus
gtgtcaatttttagccagtttttaaaaagatcaagccctcaacaaggtattgtattgtactatatcgtcgcaattgtcattgcatttttattattaaacttaccgtatgttcataaaccaggtgtagaagtaaatccaattgacacattatttgttgccgtatccggaattagtgttactggattgtctccgataagtattgtcgatacctattctacatttggacaattaattatcctcgtgatattaaatattggtggaattggcgtcatggcaattggtacgatgttatgggtggtactaggtaaacatattggaattagagaacgtcagttaattatgttagataataacaaaaacacaatgagtggtaccgtcaaattgattattgatattgtaaaatcaatatttgtaatcgaactcgtaggagccatgttattagcattttacttttatcgagataatccagatttaaaatatgcaatcatgcaaggtgtttttgtttctatttctgctactaccaatggtggattagatattacaggtaagtcattaattccttatgcacatgattattttgtacaagcgatagttatatttttaataattttaggatcaatcggcttcccagtattattagaagttaaagcttatattcaaaatagggttactaattttagattttcattatttactaaaattacgacatcaacatatttattcctatttgttgttggggtattagccattctattatttgaacataaccatgcgttcaaaggattaaattggcatcaatcgttattctattcgctgtttcaatcagcgactacaagaagtgcaggtcttcaaacaattgatgtgacaactctaagtgaccctacgaatattatcatgggtattttaatgtttataggatcttcgccaagttcggttggtggcggtattcgtacaacaactttcgctattttaattttgtttttaattaactttagtaataatgccgataaaacatccattaaagtttacaatagagaagtacacattatggatattcaacgttcatttgcagtatttacaatggcgacaattttaacatttttaggaatgctaattatatcagctactgaaaatggtaagcttacatttttacaagtattttttgaagtcatgtctgcatttggaacttgtggactatcgcttggtgtcacaagtgatattagtgatatttccaaggtcgtactaatggtactcatgtttataggacgtgttggcttaatatcatttatcattatgatagcaggacgtcgagaaccagataaattccattatccaaaagaacgtattcaaataggataa

SEQ ID NO: 417892 - DNA, 2310 bp, Staphylococcus aureus
gtggatattggtaaaaaacatgtaattcctaaaagtcagtaccgacgtaagcgtcgtgaattcttccacaacgaagacagagaagaaaatttaaatcaacatcaagataaacaaaatatagataatacaacatcaaaaaaagcagataagcaaatacataaagattcaattgataagcacgaacgttttaaaaatagtttatcatcgcatttagaacagagaaaccgtgatgttaatgagaataaagctgaagaaagtaaaagtaatcaggatagtaagtcagcatataacagagatcattatataacagacgatgtatctaaaaaacaaaattcattagattcagtggaccaagatacagagaaatcaaaatattatgagcaaaattctgaagcgactttatcaactaaatcaaccgataaagtagaatcaactgacatgagaaagctaagttcagataaaaacaaagttggtcatgaagagcaacatgtactttctaaaccttcagaacatgataaagagactagaattgattctgagtcttcaagaactgattcagacagctcgatgcagacagagaaaataaaaaaagacagttcagatggaaataaaagtagtaatctgaaatctgaagtaatatcagacaaatcaaatacagtaccaaaattgtcggaatctgatgatgaagtaaataatcagaagccattaactttgccggaagaacagaaattgaaaagacagcaaagtcaaaatgagcaaacaaaaacctatacatatggtgatagcgaacaaaatgacaagtctaatcatgaaaatgatttaagtcatcatataccatcgataagtgatgataaagataacgtcatgagagaaaatcatattgttgacgataatcctgataatgatatcaatacaccatcattatcaaaaacagatgacgatcgaaaacttgatgaaaaaattcatgttgaagataaacataaacaaaatgcagactcgtctgaaacggtgggatatcaaagtcagtcaactgcatctcatcgtagcactgaaaaaagaaatatttctattaatgaccatgataaattaaacggtcaaaaaacaaatacaaagacatcggcaaataataatcaaaaaaaggctacatcaaaattgaacaaagggcgcgctacgaataataattatagtgacattttgaaaaagttttggatgatgtattggcctaaattagttattctaatgggtattattattctaattgttattttgaatgccatttttaataatgtgaacaaaaatgatcgcatgaatgataataatgatgcaaatgctcaaaaatatacgacaacgatgaaaaatgccaataacacagttaaatcggtcgttacagttgaaaatgaaacatcaaaagattcatcattacctaaagataaagcatctcaagacgaagtaggatcaggtgttgtatataaaaaatctggagatacgttatatattgttacgaatgcacacgttgtcggtgataaagaaaatcaaaaaataactttctcgaataataagagtgttgttgggaaagtgcttggtaaagataaatggtcagatttagctgttgttaaagcgacttcttcagacagttcagtgaaagagatagctattggagattcaaataatttagtgttaggagagccaatattagtcgtaggtaatccacttggtgtagactttaaaggcactgtgacagaaggtattatttcaggtctgaacagaaatgttcctattgatttcgataaaggtaataaatatgatatgttgatgaaagctttccaaattgatgcatcagtaaatccaggtaactcgggtggtgctgtcgtcaatagagaaggaaaattaattggtgtagttgcagctaaaattagtatgccaaacgttgaaaatatgtcatttgcaatacctgttaatgaagtacaaaagattgtaaaagatttagaaacaaaaggtaaaattgactatcccgatgtaggtgttaaaatgaagaatattgccagtctaaatagttttgaaagacaagcagttaaattgccaggaaaagttaagaacggtgttgttgtagatcaagttgacaacaatggtttagcagatcaatctggtctgaaaaaaggtgatgtaattactgaattagatggcaaacttttagaagatgatttacgctttaggcagattatatttagtcataaagatgacttgaaatcaattacagcgaagatttatagagatggtaaagagaaagaaattaatattaaactaaaataa

SEQ ID NO: 417893 - DNA, 804 bp, Staphylococcus aureus
atgttaatggatccaagtttgatcttaccttatttatgggtacttgtcgttttagtatttttagaaggcttattagcagcagataacgcgattgttatggctgtaatggttaagcacttaccacccgaacagcgtaaaaaagctttgttttacggtttgttaggtgcatttgtatttagatttttagcattattcttaattagtattatcgcgaacttttggtttattcaagctgcaggagcggtttacttaatttatatgtcaatcaaaaatctgtggcagttctttaaacacccagaaattgaaagtcctgaagctggagatgatcatcattatgatgaatctggtgaagagattaaagcaagtaacaaatcattctggggaactgtgttgaaaatagaatttgcagatatcgcatttgccattgattctatgcttgctgctttagctattgctgtaacacttcctaaagttggtattcactttggtggtatggacttaggtcagttcgtagtcatgttcctaggtggaatgattggtgttattctaatgcgttatgcagcaacatggtttgtagagctattaaacaaatatccaggacttgaaggtgcagccttcgcgatcgttggttgggtaggtgttaaattagttgtcatggtattagcgcacccagacatcgctgtattgcctgagcacttcccacatggcgtattatggcaatctattttctggacagtactaattggattagtaattatcggttggttaggttcagttgttaaaaataaaaaatcgcataaataa

SEQ ID NO: 417894 - DNA, 1563 bp, Staphylococcus aureus
atgaacttaaagcaagaagttgagtctagaaagacttttgcgattatttcacatcccgatgcagggaaaacaacgttaactgaaaaactattgtacttcagtggtgctattcgtgaagcgggtacagttaaagggaagaagactggtaaatttgcgacaagtgactggatgaaagttgaacaagagcgtggtatttctgtaactagttcagtaatgcaatttgattacgatgattataaaatcaatatcttagatacaccaggacatgaagacttttcagaagatacgtatagaacattaatggcagttgacagtgctgtcatggtcatagactgtgcaaaaggtattgaaccacaaacattgaagttatttaaagtttgtaaaatgcgtggtattccaatctttacattcattaataaattagaccgagtaggtaaagaaccatttgaattattagatgaaatcgaagagacattaaatattgaaacataccctatgaattggccaattggtatgggacaaagtttctttggcatcattgatagaaagtctaaaacaattgaaccatttagagatgaagaaaatatattacatttgaatgatgattttgagttggaagaagatcatgcaattacaaatgatagtgcttttgaacaagcgattgaagaattaatgttggttgaagaagcgggtgaagcctttgataatgacgcgctgttgagtggagacttaacacctgtatttttcggttcagctttagctaactttggtgtacaaaatttcttaaatgcatatgttgattttgcgccaatgccaaatgcgagacaaacaaaagaagacgttgaagtaagcccgtttgatgattcattttcaggatttatctttaaaattcaagccaacatggaccctaaacaccgtgatagaattgcctttatgcgtgtcgttagtggtgcatttgaacgtggtatggatgttactttgcaacgtactaataaaaagcaaaagatcacacgttcaacgtcatttatggcagacgataaagaaactgtgaatcatgctgtagcaggcgatatcattggactatatgatactggtaattatcaaattggagatactttagttggtgggaaacaaacctacagtttccaagatttaccacaatttacgccagaaatttttatgaaagtttctgctaaaaacgtcatgaaacagaagcatttccataaaggtattgaacaattagtacaagaaggtgcgattcaatactataaaacattacacacaaaccaaattattttaggtgctgttggtcagttacaatttgaagttttcgaacatagaatgaaaaatgaatataatgttgatgttgttatggagccagtaggccgtaaaattgcacgttggattgaaaatgaagaccaaattacagataagatgaacacatcaagatcgattttagtgaaagatagatatgacgatttagtattcttatttgaaaatgaatttgcaacaagatggttcgaagagaaattccctgaaattaaattgtatagtttactttaa

SEQ ID NO: 417895 - DNA, 252 bp, Staphylococcus aureus
ttgatcaataaaagatttattgatgaaggtaaaactattgatgtttatttattcgaagcattaaataaccagataatcattgctataccagattggttttggtcatatcagatggcaatgacattagatgaagaaacttgttttgaagcaatactcatgcaattgtttgtttttaaagaagaggaagaggcagaatcgattgcatcacaactaacagattggatagaaacatataaaaaggagaaagactaa

SEQ ID NO: 417896 - DNA, 1485 bp, Staphylococcus aureus
ttggatgcaagtacgttgtttaagaaagtaaaagtaaagcgtgtattgggttctttagaacaacaaatagatgatatcactactgattcacgtacagcgagagaaggtagcatttttgtcgcttcagttggatatactgtagacagtcataagttctgtcaaaatgtagctgatcaagggtgtaagttggtagtggtcaataaagaacaatcattaccagctaacgtaacacaagtggttgtgccggacacattaagagtagctagtattctagcacacacattatatgattatccgagtcatcagttagtgacatttggtgtaacgggtacaaatggtaaaacttctattgcgacgatgattcatttaattcaaagaaagttacaaaaaaatagtgcatatttaggaactaatggtttccaaattaatgaaacaaagacaaaaggtgcaaatacgacaccagaaacagtttctttaactaagaaaattaaagaagcagttgatgcaggcgctgaatctatgacattagaagtatcaagccatggcttagtattaggaagactgcgaggcgttgaatttgacgttgcaatattttcaaatttaacacaagaccatttagattttcatggcacaatggaagcatacggacacgcgaagtctttattgtttagtcaattaggtgaagatttgtcgaaagaaaagtatgtcgtgttaaacaatgacgattcattttctgagtatttaagaacagtgacgccttatgaagtatttagttatggaattgatgaggaagcccaatttatggctaaaaatattcaagaatctttacaaggtgtcagctttgattttgtaacgccttttggaacttacccagtaaaatcgccttatgttggtaagtttaatatttctaatattatggcggcaatgattgcggtgtggagtaaaggtacatctttagaaacgattattaaagctgttgaaaatttagaacctgttgaagggcgattagaagttttagatccttcgttacctattgatttaattatcgattatgcacatacagctgatggtatgaacaaattaatcgatgcagtacagccttttgtaaagcaaaagttgatatttttagttggtatggcaggcgaacgtgatttaactaaaacgcctgaaatggggcgagttgcctgtcgtgcagattatgtcattttcacaccggataatccggcaaatgatgacccgaaaatgttaacggcagaattagccaaaggtgcaacacatcaaaactatattgaatttgatgatcgtgcagaagggataaaacatgcaattgacatagctgagcctggggatactgtcgttttagcatcaaaaggaagagaaccatatcaaatcatgccagggcatattaaggtgccacatcgagatgatttaattggccttgaagcagcttacaaaaagttcggtggtggccctgttgatcaataa

SEQ ID NO: 417897 - DNA, 1176 bp, Staphylococcus aureus
atggttactcaaaataaaaagatattgattattactggctcattcggtaacggtcatatgcaagttacacagagtatcgttaatcaacttaatgatatgaatctagaccatttaagcgtcattgagcacgatttatttatggaagctcatccaattttgacttctatttgtaaaaaatggtatatcaatagctttaaatattttagaaatatgtacaaagggttttattacagccgcccagataaactagacaaatgtttttacaaatactatggacttaataagttaattaatttattgataaaagaaaagccagatttaatattattaacgtttcctacaccagttatgtcggtactaactgagcaatttaacattaatattccagttgctacagtgatgacagactatcgcttacataaaaactggattacgccgtattcaacaagatattatgtggcaacaaaagaaacgaaacaagacttcatagacgtaggtattgatccttcaacagttaaagtgacaggtattcctattgataacaaatttgaaacgcctattaatcaaaagcagtggttaatagacaacaacttagatccagataagcaaactattttaatgtcagctggtgcatttggtgtatctaaaggttttgacacgatgattactgatatattagcgaaaagtgcaaatgcacaagtagttatgatttgtggtaagagcaaagagctaaagcgttctttaatagctaagtttaaatctaacgagaatgtattgattctaggttataccaaacacatgaatgaatggatggcatcaagtcaacttatgattacgaaacctggtggtatcacaataactgaaggtttcgcccgttgtattccaatgattttcctaaatcctgcacctggtcaagagcttgaaaatgccctttactttgaagaaaaaggttttggtaaaatcgctgatactccagaagaagcaataaaaattgtagctagtttaacgaatggtaatgagcaattaactaacatgattagtacaatggaacaagataaaattaagtatgctacacagacaatatgtcgagacttacttgatttaatcggtcattcatcacaaccacaagagatttatggaaaggttcctttatatgcaagattcttcgttaaataa

SEQ ID NO: 417898 - DNA, 1191 bp, Staphylococcus aureus
atgcaagattcttcgttaaataattacgctaatcataaaaatttcattttaatgcttattatcttatttttaatggaatttgcgagaggcatgtatatcctaagctatattaatttcttgccaacagttacatccattgctgtagcaataacgtctctagcattttcaatacattttattgctgatgcatctacaaactttgttataggattttcactgaaaaaattcggcacaaaaatcgttttaacgactggatttattttagcatttacaagtttatttttagttatttggtttccagcatcaccttttgtaatcatatttagtgctatgatgctcggtattgcagttagtcctatttgggtaattatgttatccagtgttgaagaagataaacgtggtaaacaaatgggctatgtttatttttcatggttgttaggcctattggtaggtatggtttttatgaatctacttatcaaagtgcacccaacacactttgccttcatgatgtctttagtcgttttaattgcatggatattatattattttgtcgatgtaaagttaacaaattataatactcgtccagttaaagctcaattgagacaaattgttgatgtgacaaagcgccatttattgttgttccctggtattcttttacaaggtgccgcaattgctgccctagttcctatattaccaacatatgctactaaggttattaacgtaagtacaattgaatatactgttgcaatcattattggtggtatcggctgtgcagtttcgatgctatttttatcgaaactaatagataaccgcagcagaaactttatgtatggtgttattctaagcggatttattttatacatgatattaattttcactctatctatgattgttaatattcacatcgtgtggattatcgctttagctatcggtctaatgtatggcatcttattaccagcatggaatacctttatggcacgatttatcaaatcagatgaacaagaagaaacttggggtgtttttaatagtatccaaggattcggctcaatgatcgggccattatttggcggattaattacacaatttaccaacaatttaaacaatacattttatttctcggcattaatctttttagtcttagctgtattttatggaagctactttatagcaaatagagaaaaagctaagtaa

SEQ ID NO: 417899 - DNA, 510 bp, Staphylococcus aureus
atgattttaggattagcattaattccatcaaagtcatttcaagaagcggtggattcttaccgtaaaagatatgataaacagtattcacgaattaaaccacatgtgacaattaaagcgccatttgaaattgaagatggtgatttagattctgtcattgaacaggttagagctcgtattaatggtataccagcagtagaagttcatgctacaaaagcttctagcttcaaaccaacgaacaatgtgatttactttaaagttgcgaagacggacgacttagaagaattgtttaatcgctttaatggagaagatttctatggagaagctgaacatgtttttgtgccacactttacaatagcacaaggactatctagccaagaattcgaagatatttttggtcaagtagcattagctggggtagaccataaagaaattatcgatgaattaactttgttacgttttgacgatgacgaagataaatggaaagttattgaaacgtttaaattagcttaa

SEQ ID NO: 417900 - DNA, 759 bp, Staphylococcus aureus; identical to SEQ ID NO: 411227

SEQ ID NO: 417901 - DNA, 1569 bp, Staphylococcus aureus
atgattgaaaaattagtaacctttttaaatgaggttgtttggagtaagccattagtttatggtttgctaattactggtgtgctatttacattgcgtatgcgattttttcaagttagacattttaaagaaatgattcgattaatgtttcaaggagagaagtctcctaatggtatttcaagttttcaagcgatagccatgtctttagcaggcagggttggtacaggtaatattgtcggtgtatctactgcaatatttataggaggacctggtgcagtattttggatgtggattactgcgtttttaggtgcaagtagtgcttttattgaatctacacttggtcaaatattcaagagagttgaaaataatgaataccgtggtggaccagcgtattatattgaatatggtattggtggtaaatttggtaaaatttacggaattatctttgctattgttacgattatctcagtaggtctattgcttcctggtgtgcaatctaacgctatagcaagttctatgcataatgcgattcatgttccacaatggttaatgggtgctattgttgtagttattttgggattaattatttttggtggtgtacgtagtattgccaatgttgcaacagccgttgtaccatttatggcaattatttacatactgatggctgtcattatcatttgtatcaatatacaagaagtgccagcgttatttgcattaattttcaaatcagcatttggattacaatctgcttttggtggtatcgttggcgcaatgatagagattggtgttaaacgtggattatactcaaatgaggctggtcaaggtacaggtccacacgcagcagcggcagcagaagtatcacatccaagtaaacaaggtctagtacaagcattttcagtttatattgatacattatttgtatgtactgcaactgctctgattatacttatttctggtacatataatgtgactgatggtacggttaatgcgaatggcacaccgcatttaattaaagatggcggtatttatgttgaaaatgcaacaggtaaagattattcaggtactgcgatgtatgcacaagccggcattgataaagcgttccatggcagtggttatcaatttgatcctactttctctggcgtaggttcgtactttattgcatttgctttattcttctttgcatttactacaattttgtcgtactactacattacagaaacaaatgttgcttatttaacgcgtaatcaaaataatcaagtttcatcgatatttattaatattgctcgtgtgattattttgttcgctacattttacggtgcagttaaaacagctgatgtagcatgggcattcggtgatttaggtgtaggtctaatggcttggttaaatatcattgcgatttggattttacataagcctgccgtaaatgctttaaaagattatgaaattcaaaagaaacgtttaggaaacggttataatgcagtttatcaacctgatccgaataaattacctaatgctgtcttttggttgaagacatatccagaacgtttaaaacaagcacgtgccaaaaagtaa

SEQ ID NO: 417902 - DNA, 1086 bp, Staphylococcus aureus
atgttaaacaaggtttggttccgaactggcatcgctctgattatgctgttcattctcatcaaactatttatggaagtgcacgaagtatttactccaatagctacaatcatcggttctgtatttcttccatttttaattagtggttttttattttatatctgtctaccttttcaaaacttacttgaaaaagtcggttttccaagatgggctagtataacaacaatcatgttagctttgtttgctattatcggcttaattgttgcgtttgttgcaccaatcatcatttcaaatatcaacaatttaattagtcagacacctgccctacaaaaagaagcagagcaaattattaaattcgcactagctcaaatggataaattacctgaagatgtaacaagtagaattacaaatatggttaaatcaatgggtgatggcgttactaatattttatctaattcattacagtacattacatcattaatttcaaccatcttcttattgattatggttccattcttcttaatttatatgttaaaagaccatgaaaaatttatcccagctgttgctaaatttttcaaaggtgaacgtaaagtatttttcgtagatttattaactgatttaaactttacattaaaatcttacattcaaggtcaagtaactgtcagtgttattttaggtatattcttatatatcggttattcaattattgacttaccatatattcctttattagttctatttgctggtgtcgcaaacttaattcctttcttaggttcatggttatcatttgcacctgcagcaatactcggtattatagatagtcctactacatttatatgggtttgtatcattacattaattgcacaccaacttgaaggtaatatcattacgccaaatgtaatgggtaaatctttaagtatccatcctttaacaattatcgttgttattttagcagcaggagatttaggtggctttacattagttctgattgcagtgccattatatgctgtacttaaaacggttgttagtaatattttcaaataccgccaacgcattattgataaagcaaacagtaatgttaaggactaa

SEQ ID NO: 417903 - DNA, 771 bp, Staphylococcus aureus
atgttaaatcttgaaaacaaaacatatgtcatcatgggaatcgctaataagcgtagtattgcttttggtgtcgctaaagttttagatcaattaggtgctaaattagtatttacttaccgtaaagaacgtagccgtaaagagcttgaaaaattattagaacaattaaatcaaccagaagcgcacttatatcaaattgatgttcaaagcgatgaagaggttattaatggttttgagcaaattggtaaagatgttggcaatattgatggtgtatatcattcaatcgcatttgctaatatggaagacttacgcggacgcttttctgaaacttcacgtgaaggcttcttgttagctcaagacattagttcttactcattaacaattgtggctcatgaagctaaaaaattaatgccagaaggtggtagcattgttgcaacaacatatttaggtggcgaattcgcagttcaaaattataatgtgatgggtgttgctaaagcgagcttagaagcaaatgttaaatatttagcattagacttaggtcctgataatattcgcgttaatgcaatttcagctggtccaatccgtacattaagtgcaaaaggtgtgggtggtttcaatacaattcttaaagaaatcgaagagcgtgcacctttaaaacgtaacgttgatcaagtagaagtaggtaaaacagcggcttacttattaagtgacttatcaagtggcgttacaggtgaaaatattcatgtagatagcggattccacgcaattaaataa

SEQ ID NO: 417904 - DNA, 1845 bp, Staphylococcus aureus
atggagtttttatctttagttattgttgttttagcagcgtttttaactccaataattgtcaatcgattaaatattaatttcttgccagttgttgttgcagaaattttgatggggattgtgattggaaattcatttctaaatatagtagaaagggattcaattctaaatattttatcaacgttaggctttatctttttaatgtttttaagtggtttagaaattgattttaaagcttttaaaaaagataaacgcgcacgtcaaggacaaaatgatgatgaatcctcaattccagggcatcttaatctagcgttaactgtatttgcatttattatgattatttcgattcttttagcgtatgtatttaaatggcttggattagtggatgatgtgttattaatggtcattatcatttcaactatttccttaggcgtagttgttccaactttaaaagaaatgaatattatgagaacaactatagggcaatttatcctattagtagcagtacttgcggacttagtaactatgattttattaacggtctatggcgcaatcaatggtcaaggcggcagtacaatatggttaataggtatattagttgttttcacagcaatttcatatattttaggtgttcaatttaaaagaatgtcatttttacaaaaattgatggatggtacgacgcaaatcggtattcgtgcggtatttgcattaataatattattagtagccctagcagagggagttggcgcagaaaatatattaggtgcattcttagcaggtgtcgttgtttcattattaaatccagatgaagaaatggttgaaaagttagactcatttggttatgggttctttattcctattttctttataatggttggtgtagatttaaacataccttcattaattaaagaaccgaaattactaattatcataccgattttaatcgttgcatttatcatttcaaaattaattccagtcatgtttattcgacgttggtttgatatgaaaacaacgattgcatcagcatttttattaacatcaacattatcgctcgtgatagctgcagccaaaatttcagaaagattaaatgctatttcagctgaaacgtcaggtatattaattttaagcgcagtcattacatgtgtattcgttccgattattttcaaaaaactgtttccagttccagatgagtttaaccgtaaaattgaagttagtttaattggtaaaaatcaattaacgattcctatagcgcaaaatttaacatctcagttatatgacgtgacattatattatcgcaaagacttgagtgatcgtcgtcaattgtcagatgatatcacgatgatagaaattgctgattatgaacaagatgttttagaacgactaggtctgtttgaccgagacatagttgtttgtgctacgaatgacgatgatattaaccgaaaagttgctaaattagccaaagcacatcaagttgagcgtgtcatttgcagacttgaaagcacaacggacgatacagagttagttgattcaggtattgaaattttcagtagctacttaagtaataaaatcttattaaaaggtttaattgaaacacctaacatgttgaatttattaagtaatgttgaaacgtcactatatgaaattcaaatgttaaattataaatatgaaaatattcaattacgtaatttcccattcggaggagaaatcatcttcgtgcgtattatccgtaataatgagtcgattgttccgcatggagatacacaattgcgatatggagatcgcttaattgttaccggtgctaaagaatacgttgatgaattgaagcaagagttagaattttatttttaa

SEQ ID NO: 417905 - DNA, 1386 bp, Staphylococcus aureus
atgtcaatgaacacagatgaaaaagagcgtgttcaagaggaattatatgatgagacattattagatcaatacttagaaaatgatgatattgatcaatttagagatgaatttctagcattacacacatatgaacaaagtgagtattttgaagatactaccgatgaaaatagacaaaagatttttcaatatttatcacctgaagaggttgcaaatttctttgatcaattagatattgatgacgatgaatatgagttgctatttgataaaatgaatgcgacatacgcaagtcacatattagaagaaatgtcatacgataatgcagtagatattttaaatgagttgactaaaccaaaagttgctagtcttttaacattgatgaataaagatgacgcgaatgaaatcaaagcattacttcactatgatgaggatacggccggcggtattatgacgacggagtatttatcacttaaagcgcatacgcctgttaaagaagcgttattattggtcaaagcgcaagcgccagacgcagaaacaatatatgttatatttgtcgttgatgatgatggtaaattagtaggtgttttatcactaagagatttaattgtagctgaaaatgatgcttatattgaagatattatgaatgaacgtgtcattagtgtgaatgtagcagacgaccaagaagatgttgctcaagttatgagagactatgatttcatggctgtacctgttatagattaccaagaacatttgcttggtatcatcacgattgatgatattttagacgttatggatgaagaggctagtgaagactactctcgtttagccggggtatcagatatcgattcgactaatgattcaatcattaaaacagcattaaaacgtttaccatggttgattattttaacatttttaggaatgattactgcgacaattttagggagatttgaaaaaacattagaaaatgtagcgctactcgcagcgtttattcctattattagtggtatgtcaggaaattcaggtacacaatctttagccgtttcagttcgtaacattacgacaggggaaattaatgagcaaagtaaatttagaattgcattaagagaagcgggaagtggtgtattatcgggcgttgtatgttcaacaatattatttacaattattgttgcaatatatcatcagccacttttagcattaatcgttgcaggaagtttaacttgtgcgatgacggtggggacgtttgtaggttcgatgattccattattgatgaataaattaaatatcgatccagcagtggctagtggaccatttattacaacaattaatgatattattagtatgttgatttattttggtttagctacatcatttatggcttacttaatttaa

SEQ ID NO: 417906 - DNA, 855 bp, Staphylococcus aureus
atgaaatttaagtatcatatatcacaacaagaaactgttaaagcttttttagcacgacatgatttttctaagaagacagtgagcgccattaaaaataatggcgctttaattgttaatgatgaaccagtcacagtacgtaagcaattaatgccaaatgatatattagaaattcatttaccgcgagaaataccgagtgttaatttaataccttatgctcgtaagctagaagtattgtatgaagatgcttttatcatcatagttactaaaccaaacaatcaaaattgtacgccttcgagagaacatcctcatgaaagtttaatcgaacaagtactatatcattgtcaggaacatggtgaaaatattaacccacatattgttacgcgtctagatcgtaatacaactggtattgtgatattcgctaaatatggacatatccatcatttattttctaaagtaaacttgaaaaaaatatatacttgccttgtatatggtaaaacccatacatctggtattattgaagctaatattagacggtcaaaggatagtattataactagagaagttgcctcggatggtaaatacgctaaaacatcttatgaagtaataaatcagaatgataaatacagtttatgcaaagttcatttgcatacgggacgtacacatcaaattcgtgtacattttcaacatattgggcatccaattgtgggagattctttgtatgatggttttcatgacaaaattcatggtcaagtactgcaatgtacgcaaatatattttgttcatccaatcaataagaacaatatttatattacaattgattataagcaattacttaaattattcaatcaactctaa

SEQ ID NO: 417907 - DNA, 810 bp, Staphylococcus aureus
atgcgttatacaattttaactaaaggtgactccaagtctaatgccttaaagcataaaatgatgaactatatgaaagattttcgcatgattgaggatagtgaaaatcctgaaattgttatttcagttggtggtgatggtacattactacaagcattccatcagtatagccacatgttatcaaaagtggcatttgttggagttcatacaggtcatttaggattttatgcggattggttacctcatgaagttgaaaaattaatcatcgaaattaataattcagagtttcaggtcattgaatatccattgcttgaaattattatgagatacaacgacaacggctatgaaacaaggtatttagcattaaatgaagcaacgatgaaaactgaaaatggctcaacacttgttgtggatgttaacttaagagggaaacactttgagcgatttagaggcgatggattatgtgtatcaacaccttcgggttcaacggcttataacaaagcgctaggtggcgcactgatacatccttcacttgaagcaatgcaaattacagaaattgcctcaataaataatcgtgtgtttagaacggtaggatcaccacttgtattaccaaagcatcatacatgtttaatatcaccagttaatcatgataccattagaatgacgatagatcatgttagtatcaaacataaaaatgttaattcaatacaataccgtgtagcaaatgaaaaagtgaggtttgcacgttttagaccattcccgttctggaaacgtgtacacgattctttcatatcaagtgatgaagaacgatga

SEQ ID NO: 417908 - DNA, 636 bp, Staphylococcus aureus; identical to SEQ ID NO: 405380

SEQ ID NO: 417909 - DNA, 348 bp, Staphylococcus aureus; identical to SEQ ID NO: 405381

SEQ ID NO: 417910 - DNA, 594 bp, Staphylococcus aureus
atggcaacaaatcatgaaatagaatttaaacaaatgataactgcatcaatctataataaattgcaagagaaatattttaaagacagtgtgctttttaagcaagtcaattactatattgatacacccgatttcaaattaaaggaacatcgctctgcactacgcataagagttaaagacaatcaatatgaaatgactttaaagacaccagcaaaggttggtctattagaatacaactatatcgtcgacattaaaccagagatgaacttgattatttcaaacgacaatcttccagatgacattcgtcaaattatagttgaacagtttggtgtaaaagatacaactttatcaatacttggtgcattaacgacatatcgccaagaaactaaatataaaggtgatttactcgttttagataaaagtgagtatttcgatactgcggattatgagttagagttcgaagttaaagactataatcaaggtttacaaaagttccaatctttattaaacgaactaaacctcgaacatcatcaacctttaaataaagttcaacgttttttcaagaaaaaagaaacactttcaaacaatataaattaa

SEQ ID NO: 417911 - DNA, 366 bp, Staphylococcus aureus
atgacaacaacaccatatgacatcattggtaaagaagcgttatacgatatgattgattatttttacacccttgtagaaaaagatgaacgacttaatcacctgtttccaggagattttgcagaaacaagtcgtaaacaaaaacaatttttaacacagtttttgggcggtccaaacatttataccgaagaacacggacatcctatgctaagaaaaagacatatggattttacaatcactgaatttgaaagagatgcatggttagaaaatatgcagacagcaattaatcgcgctgcgtttccacaaggtgttggagattatttatttgagcgcttaagattaactgctaatcatatggtgaattcctaa

SEQ ID NO: 417912 - DNA, 807 bp, Staphylococcus aureus
atggctggagaattacgaataatggaaaataagagtcgtgaagatattaatctatcacctgtaagtaaaatcgaaatttattcatttttcgatccatttagctccgattgcttcaaattatcagcaatcttatccaaattaagaattgaatataatcaatatatacgtatcagacatatattaaatccttcgttaaaagtattaacgaaatgccaagctcaaagtacatccaactttgataacatcgccctagcttataaagcagctgagttacaaggtcgtgtacgtgccgaacgatttatacatttaatgcaaaatgaaatcatacctaaaagagatattattacagaatcaatgatttgtgactgtattcaaaatgcaggtattgatttagaagtatttaaagacgacttacaaaaaagtaaactaaccgaaagcttgaaaattgatttgcatattgcaagagaaatggaaatcgaacaagccccttctctcgttttctttagtgaagatgttcatgaagaaggtttaaaagtcgaaggattatacccatatcacatctatacttatataattaatgaattgatgggtaaacctatcgaaaagaatcttcctcctaaattagaaacttatatacagcaacaacaacttgtaacgatggaagaattacttactatttatgaatggccagaaaaacttttaaacaaagagttaaagaagttagccattcaacaaaaaattgaaaaacttaaatatccagatggcgatttctggaaatctaaaatgcctaaaatcaaatcaaaataa

SEQ ID NO: 417913 - DNA, 1809 bp, Staphylococcus aureus; identical to SEQ ID NO: 411168

SEQ ID NO: 417914 - DNA, 987 bp, Staphylococcus aureus
atgttagtagctttaaatgaagaaaaggaacgtgtgttagcaactactgcattgagaaagacacaatatttttgtccggtgtgtggcaagcaagttattttaaagcgtgggctcaaagtaattagtcattttgcacataaacatttagcggaacaaaaatgttttaataatgaaacgattaaacattataaaagtaaattgattttagcacagatgatacagcaacaaggatgtaaagtagagatagagccatttttaaaagaaataaaacaaattccggatattttgattaataataaatatgttattgagctacagtattcgccaattccttataaacagattcttcaacgaacggaaggtttaaagaaaatgggatataaagtaagttggttattaaatgatgttgattattgtcataataaagtgaagttcaatcattttcaaagtttgtttattaatccattcactcgaaaacttcatacgttcaatttagagaaaaaacaaacaatgatgtttcaacaaatacaatatttaggcgggcacaaatatgttgctgaaaaaaggaatgccaaaattagtgagttgtttaatgaggcgccttgtgattatcatgctgtttataaattatcaaagttcgcaattaatcaatatatcaaatattgtcgctggcaaaattccgttttagaacccactttaagtgcaatgtatcaattacagttaactgatcaagaagtagtgcacaattatggttatatttttccagagcaaatttatattgaaaatcatccaattgagtggcaattacaagttgatttatggttaaagaatggaaaaagcaaattagtaaatgacaatcttaattattttaaactgaaaaaatttattgttgctctagaaagtaaaacagcaattatagaaaaacttattaacaattatttaaatatttgttcagataaaggtaatgacgtgcaaattttgttctaa

SEQ ID NO: 417915 - DNA, 396 bp, Staphylococcus aureus; identical to SEQ ID NO: 405389

SEQ ID NO: 417916 - DNA, 990 bp, Staphylococcus aureus
atggagacattattttcaggcatccaacctagtggaattcctactattggaaattatattggcgcactaaaacaatttgttgatgtgcaaaatgactatgattgttatttctgtatcgtagatcaacatgcaattacaatgccacaagatcgcttaaaattacgtaaacaaactagacaattagcagcgatttatttagcttctggtatagatccagacaaagcaacattgttcatacaatctgaagtccctgcacacgtacaagcaggatggatgttaactacgattgcttctgttggagaattagagcgtatgacgcaatacaaagataaagctcagaaagcagttgaaggtataccagctggtctattaacatatccacctttaatggcagctgatattgttctttacaatactaatatcgttccagttggcgatgaccaaaagcagcatatcgaattgactcgtaaccttgtagatagatttaatagtcgctataatgatgtgcttgtgaaacctgaaattcgtatgcctaaagttggtggacgtgtcatgagtttacaagacccaacaagaaaaatgagtaagagtgatgataatgctaaaaacttcatttcattattggacgagccgaatgttgcagctaaaaaaattaaaagcgcagtaactgattcagatggtattattaaatttgatcgtgacaacaagccaggtataacaaatttaatttcaatatacgctggattaaccgacatgccaattaaagatattgaggcaaaatatgaaggggaaggttatggtaaatttaaaggtgaccttgctgaaatagttaaagcatttttagtagaattccaagaaaaatacgaaagtttctataactcagataaacttgatgatattttagatcaaggtagagataaagcacacaaagtttcatttaaaactgtcaaaaaaatggaaaaagcgatgggattaggacgtaagagataa

SEQ ID NO: 417917 - DNA, 1401 bp, Staphylococcus aureus
atggatagaatgtatgagcaaaatcaaatgccgcataacaatgaagctgaacagtctgtcttaggttcaattattatagatccagaattgattaatactactcaggaagttttgcttcctgagtcgttttataggggtgcccatcaacatattttccgtgcaatgatgcacttaaatgaagataataaagaaattgatgttgtaacattgatggatcaattatcgacggaaggtacgttgaatgaagcgggtggcccgcaatatcttgcagagttatctacaaatgtaccaacgacacgaaatgttcagtattatacggacattgtttctaagcatgcattaaaacgtagattgattcaaactgcagatagtattgccaatgatggatataatgatgaacttgaactagatgcgattttaagtgatgcagaacgtcgaattttagagctgtcatcttctcgtgaaagcgatggctttaaagacattcgagacgtcttaggacaagtgtatgaaacagctgaagagcttgatcaaaatagtggtcaaacaccaggtatacctacagggtatcgagatttagaccaaatgacagcagggttcaaccgaaatgatttaattatccttgcagcgcgtccatctgtaggtaagactgcgttcgcacttaatattgcacaaaaagttgcaacgcatgaagatatgtatacagttggtattttctcgctagagatgggtgctgatcagttagccacacgtatgatttgtagttctggtaatgttgactcaaaccgcttaagaacaggtacgatgactgaggaagattggagtcgttttactatagcggtaggtaaattatcacgtacgaagatttttattgatgatacaccgggtattcgaattaatgatttacgttctaaatgtcgtcgattaaagcaagaacatggcttagacatgattgtgattgactacttacagttgattcaaggtagtggttcacgtgcgtccgataacagacaacaggaagtttctgaaatctctcgtacattaaaagcattagcccgtgaattagaatgtccagttatcgcattaagtcagttatctcgtggtgttgaacaacgacaagataaacgtccaatgatgagtgatattcgtgaatctggttcgattgagcaagatgccgatatcgttgcattcttataccgtgatgattactataaccgtggtggcgatgaagatgatgacgatgatggtggtttcgagccacaaacgaatgatgaaaacggtgaaattgaaattatcattgctaagcaacgtaacggtccaacaggcacagttaagttacactttatgaaacaatataataaatttaccgatatcgattatgcacatgcagatatgatgtaa

SEQ ID NO: 417918 - DNA, 627 bp, Staphylococcus aureus
ttgctttgcgaatttaaaattatcaacaaaaatccaaaatatagaattattaagtataatgatgaatatttgatagttgatttagtaagtagttggatagtattttttcttccaatgatcaattggtttatccctaaaaattacgtcaaaattagcaaggaagaatttgatgtcttaaacattttcaaaccagttagaaataatgctttttggcctgttacaggcgctttagttttacttgtaaccttgtcgaaaaaatatatttatttgctcaatacccatttagacaaaaaaacagtaataatcatatgttttgtcatattactatgtgtaataacatgctttttatacttgaaccaaaaactaaaactacatatttgggacaaaaataaaggtgaaaacgaaaaaattatattaatacctacgttaaaaaatatatttatgtctttgtttgcttatatattttttggcagcttttcaattttatctctaaatatattattaacaatggattctcaaaatataataggatttcttggttggattgtaacgacgtcatgtttcttttttgttaacaggtcatcaataatcggtggaaatgttcgtgtcatacttaaaaagtattag

SEQ ID NO: 417919 - DNA, 846 bp, Staphylococcus aureus
atgaatattatgttaacaggtgctacaggtcatttaggcacacatattacaaatcaagccattgcaaatcacatagatcattttcacattggtgttagaaatgttgagaaagttccagaagattggcgtggaaaagtttctgttcgacaattagattattttaatcaagaaagcatggtagaagcatttaaaggaatggataccgttgtgtttattccaagtattattcatccatcattcaaacgtattcctgaagtggaaaatttagtatatgcggcaaagcaaagtggcgttgctcatatcattttcataggttattacgcagatcagcataataatccattccatatgagtccttattttggttatgcagcacgtctattggcaacaagtggcattgactatacgtatgtaagaatggcaatgtacatggatccacttaaaccctatttaccagaattgatgaatatgcacaaactgatttatccagctggtgatggtcgtattaattatattactagaaatgatattgctagaggcgtcattgctattattaaaaatccagatacttggggcaaacgttatttattatcaggctacagttatgatatgaaagaacttgctgcaattttatctgaggcatcaggcacagaaattaaatatgaacccgtttcattagagacatttgcagaaatgtacgatgaacctaaaggctttggtgcattattggcatcaatgtacgacgcaggagcaagaggactattagaccaagaatccaatgatttcaaacaattagtcaatgatcaaccacagacactgcaatcatttttacaagaaattatttaa

SEQ ID NO: 417920 - DNA, 2409 bp, Staphylococcus aureus
gtggctaatacgaaaaaaacaacattagatatcactggtatgacttgtgccgcatgttcaaatcgtatcgaaaagaaactgaataaacttgatgacgttaatgcccaagtgaatttaactacagagaaagcaactgttgagtataaccctaatcaacatgatgtccaagaatttattaatacgattcaacatttaggttacggtgtcgctgtagaaactgtcgaattagacattacaggtatgacttgtgctgcatgctcaagccgtattgaaaaagtgttaaataaaatggacggcgttcaaaatgcaacggtcaatttaacaacagagcaagctaaagttgactattatcctgaagaaacagatgctgataaacttgtcactcgcattcaaaaattaggttatgacgcgtctattaaagataacaataaagatcaaacgtcacgcaaagcggaagcgctacaacataaattgattaagcttatcatatcaacagtattatctttaccactattaatgttaatgtttgtgcatcttttcaatatgcatataccagcactatttacgaatccatggttccaatttattttagctacacctgtacaatttattattggatggcaattttatgtaggtgcttataaaaacttaagaaatggtggcgccaatatggatgtacttgttgctgttggtacaagtgcagcatatttttacagtatttatgaaatggttcgttggctaaatggctcaacaacgcaaccgcatttatactttgaaacaagcgccgtactaattaccttaatcttattcggtaagtatttagaagctcgagcgaagtctcaaacaaccaatgcgcttggcgaattattaagtttgcaagctaaagaagcacgcattttaaaagatggtaatgaagtgatgattcctctaaatgaagtacatgttggagatacacttatcgttaagccaggtgaaaagatacctgttgatggcaaaattattaaaggtatgactgccatcgacgaatctatgttaacaggtgaatctatccctgttgagaagaatgttgatgatactgtaattggttcaacgatgaacaaaaacggtactattactatgacagcaacaaaagttggcggggacactgcgttggcaaatattattaaagttgtcgaagaagctcaaagttctaaagcgccgattcaacgattggcagatattatttctggttatttcgttcctatcgttgttggtatcgcactattaacatttatcgtgtggattactttagttacaccaggtacatttgaacctgcacttgttgcgagtatttccgttcttgtcattgcttgtccatgcgcattaggacttgctacaccaacttctattatggtaggtactggtcgcgctgctgaaaatggcattttatttaaaggtggcgagtttgttgaacgcacacatcaaattgataccatcgttttagataagacgggtaccattacaaatggtcatccagtcgtgacagattatcatggtgacaatcaaacgctacaactgcttgctactgctgaaaaagattctgaacacccattggcagaagccattgtcaattatgcaaaagaaaagcaattaacattaactgagacaacaacatttaaagcagtacctggccatggtattgaagcaacgattgatcatcaccatatattggttggtaaccgtaaattaatggctgacaatgatattagcttgcctaagcatatttctgatgatttaacacattatgaacgagatggtaaaactgctatgctcattgctgttaattattcattaactggtatcatcgcagtggcagatactgtaaaagatcatgccaaagatgctataaaacaattgcatgatatgggcattgaagttgccatgttaactggcgataataaaaacactgctcaagccattgcaaaacaagtaggcatagatactgttattgcagatattttaccagaagaaaaagctgcacaaattacgaaactacagcaacaaggtaagaaggttgcgatggttggtgacggtgtaaatgatgcacctgcattagttaaagctgatatcggtatcgccattggtacaggtacagaagttgccattgaagcagctgatattactattcttggtggcgacttgatgcttattcctaaagccatttatgcaagtaaagcaaccattcgtaatattcgtcaaaatctattttgggcattcggctataatattgccggtatccctatagctgcattgggcttacttgcgccatgggttgctggtgctgcaatggcactaagttcagtaagtgttgtcacaaacgcacttagattgaaaaaaatgcgattagaaccacgccgtaaagatgcctag

SEQ ID NO: 417921 - DNA, 192 bp, Staphylococcus aureus
atgagaatattaattacaggcacagttgctatcttaatcattttaggtttggtcaaaacgatacaagattacgaaatgacaaacgacacgagtcgtcagttgtcagacaacaaagatgatgataaagtcatccatcttaataattttaaaaatttacatgcgaaagaatttaacccatctgatttcttttaa

SEQ ID NO: 417922 - DNA, 600 bp, Staphylococcus aureus
atgactgaaaaagaaaaaatgttagcagaaaaatggtacgatgcaaactttgatcaagacttaatcaatgaacgtgcacgagcgaaagatatttgctttgaattaaatcatacaagaccgagtgctacaaataaaagaaaggaattaattgatcaattatttcaaacaacaacagacaatgtaagtatttcgattccttttgatacagattatggttggaacgttaaactaggaaaaaatgtctatgtaaacaccaattgttattttatggatggtggacagattacaattggcgataatgtttttataggacctaattgtggattctacacagcgacacatccacttaattttcatcatagaaatgaaggttttgaaaaagccggacccattcatattggcagtaatacttggtttggcggtcatgtagccgtgctaccaggggtgacgattggagaaggtagtgtgattggtgctggtagtgttgtcactaaagatattccgccacacagcttagcggttggaaacccttgtaaagtcgttcgtaaaattgataatgacctaccatccgaaacattaaatgacgaaacgataaagtag

SEQ ID NO: 417923 - DNA, 1545 bp, Staphylococcus aureus
atggtagtagaatttaaaaatgaacctggttacgatttttcagtccaagaaaatgtggatatgtttaagaaagcattgaaagacgtggaaaaagaattaggtcaagacataccattagtgattaatggagagaagattttcaaagatgacaaaattaaatcaatcaatcctgcagacacatcacaagtgattgcaaatgcatcaaaggcaacaaaacaagatgttgaagatgcgtttaaagcagcaaacgaagcttataaatcttggaaaacatggtcagcaaatgatcgtgcagagcttatgttacgtgtttcggcaattattcgtcgtcgaaaagcggaaattgcagcaattatggtttatgaagcaggtaagccatgggatgaagcagttggtgatgcagctgaaggtattgattttattgaatactatgcacgttcaatgatggacttggctcaaggcaagccagtacttgatcgtgaaggtgaacacaataaatatttctataaatcaattggtacaggtgttacaatttcgccgtggaacttcccgtttgcgattatggctggtacaactttagcaccagttgtggcaggtaatacagtgttattgaaacctgctgaggatacaccttatatcgcttataaattaatggaaattttagaagaagcaggattaccaaaaggcgtagttaactttgttcctggtgatccgaaagaaattggtgattacttagttgatcataaagatacgcatttcgttacatttacaggatcacgtgcgacaggtactagaatttatgaacgtagtgccgtagttcaagaaggtcaaaacttcttgaaacgtgttatcgctgaaatgggtggtaaagatgccattgtagttgatgaaaatattgatacagatatggcggcagaagctattgtaacgtcagcgtttggtttctctggtcaaaaatgttctgcatgttcacgtgcaattgtgcataaagacgtttatgacgaagtattagagaaatcaatcaaattaacaaaagaattaacgttgggcaatactgtagacaatacgtatatgggcccagttattaataaaaaacaatttgataagattaaaaattatattgagattggtaaagaagaaggtaaattagaacaaggtggcggcactgatgattcaaaaggttactttgtagaaccaacaatcatttcaggacttaaatctaaagatagaatcatgcaagaagaaatttttggtccagttgttggctttgtgaaagttaacgattttgatgaagccattgaggttgcaaatgatacagattacggtttaactggtgcagtgattacaaataatcgcgagcattggattaaagcggtaaacgaatttgatgtaggtaatttataccttaacagaggttgtacttcagcagttgttggataccatccatttggtggtttcaaaatgtcaggtacggacgctaaaacaggtagcccagactacttattacacttcttagaacaaaaggttgtttcagaaatgttctaa

SEQ ID NO: 417924 - DNA, 549 bp, Staphylococcus aureus
atgaaagagactgatttacgagttataaagacaaaaaaagcattgtcgagtagcttgctacaattgttagaacagcaattattccaaacgattactgtcaatcaaatttgcgacaacgcactcgtacaccgcacaacattttataaacatttttatgataaatatgatcttctagagtatttgttcaatcaattgactaaagactactttgctagagatatcagtgaccgtcttaatcatccattccaaacgatgagtgatacgattaataataaagaggatttgagagaaatcgcagaattccaagaagaagacgctgaatttaataaagtattaaaaaatgtctgcattaaaattatgcataacgatatcaaaaataatagagaccgtatcgatattgacagcgacatcccagataatctcatattttatatttatgactcgttgattgaaggttttatacattggataaaagatgaaaaaattgattggcctggcgaagatattgataacattttccatagattaatcaatattaagattaaatag

SEQ ID NO: 417925 - DNA, 2490 bp, Staphylococcus aureus
ttggcaaaatttttatataagatggggacattcatcgcaaaacataaatggtccgcggtcattgcatggatagtgattgtagctgcaatattgataccacttgctacaaatgcaccgaaatttgacaatgatattaaaataacaggattagagtcgttggatacgaataaaaagattgaaaaacattttaatcaagatagtgaaaaggcacaaatacgtgttgtctttaagacgactaaagatgatggtattgtgcaaccgaacattactaaagatattaagaaaacgttagatgatattaaaaaagatgacaagcacattgataaaatatcagatccttatgaaaataagcaaattagtaaagataaaacaactgcatttgcagatatcacatatgacgttagtcaaacatctttaaaagatggctctagagataatgttaaaagtcatttgaaagacttacgtgacaatcataatgtacaaacagagttaactggtacaggaatgacatctacagaagtaggcggtaattctgaactagttggtatcattgttgcatttgtagtgttattgattacatttggttcagtcattgctgcaggattaccaattataagtgcattgattggtctagcatctggggttggcattatcagtttgttaacttatgcatttgatataccaaatgtcacactgacattagccgtaatgattggactagcagttggtatcgattatgcattatttattttattcagatatcgacaagttatgaaaactgaaacagattacattaaaggcattggtcttgcaataggaacagcaggtagcgcagtcatcttcgctggtgtgacagttgtgattgccgtatgcggtttatcgctagttggcatagatttcttagcagtgatggggtttgcttcggcaattagtgttatatttgctgtattcagtgcactgactttattacctgcgttaattagtattttccataaacgcattaaagtgaacaaattgcagtctaattttaaaaaagatattgatacgccttggtctaaatttattacaggaaatgcacttgcggcagtattactaggtttaatcatattagtagcagctgcaataccagttagtcatatgcgacttggtattccagatgacggtgttaaaccagcagattctacacagaaaaaagcttacgatataatctcggataaatttggtgaaggatttaatggccaaattccgatgttgataaatgtgaaagataaaaaggatgatccacaaggattacaacaagatttacagtctgtatataaagatattaaagataagaaaaatgtagatatcgttacgccgccacaaatgagtaaagataatgattacgctttgatggtcgtgatacctaagaaagggcctaatgcagagagtacaaatgatttagtgcatgatttacgagattatcataaagatgcacaagataaatatgggttcaaaacggagatttcgggacaaagtgtcattaatattgatatgtctaaaaagttaaatgaggcgatacctttatttgcaacagtaattgttgtattggcatttttcttattaatgattgtcttccgttcaattctaataccgttaaaagcagttttaggatttgtcttgtcattaatggcaacgctaggatttacaacattagtaatgcaagatggttttatgaaaggtctgtttggtattgaaacgacaggaccaatgctagcatttttaccggttattactataggtatcttatttggattagcgatggattatgaagtcttccttatgtcgcgaattcatgaagaatatagtaaaacaggggataatgattattctatcaaagtagggttgaaagaaagcggtcctgttattgtagcagctgcattaatcatgtttagtgtcttctttgcgtttgtattccaagaagatgtcatgattaaatcaatgggtatggcattagcgtttggtgtactctttgatgccttcgtagtcagaatgatgttaattcctgcattaacgaaattgtttggaaaaggttcgtggtatttaccagcatggttgaatcgcattattccacgagttgatattgaaggacatgcacttgaaaaatataaaacggttgaatcacaggaatctgaagccaaagatagtaaggaaacatacgacacaacctttaaagtatatccacaaggtgcaacaaatgtatcgaaacatcaagatgcacatgggcaagatgatgcacattcaatagtactagatgataaaacgatggcattgtaccaagaagtgaaacagcaatcagcaagttcattgttcttatatgatgctttaatagattatcaaaacaagcatcaactaaattcaaaacaacaagtaacgaatatagaacagttgaataaaaatattgaaaagctcaatcaattgttagaaaaaaatctacgaaataaatcataa

SEQ ID NO: 417926 - DNA, 228 bp, Staphylococcus aureus
atgttaaacattaaaaatggtgaaatgaataaggcttataaaataaagcgaatggatattgctaatgagaatatgttgtatcgtctaagtgcctttgggttaacagatgacgctatcataacgattaaacaaaaatgtttatttaaagggccatgtattattgaagtaaacggacaacagttaagtattaggcattgcgatgcttgttctattgcattagaagaatag

SEQ ID NO: 417927 - DNA, 171 bp, Staphylococcus aureus
gtgtcagtcattattaacattttaatttttttagcaattttcggatatgccttgtatacactagtgaaatttttcaaacgttcgaaacaaggaaaatgtggtacatgtgacattaatcgtgattgttgtggaacagaacagcacacagcgaatcattttccagggaaataa

SEQ ID NO: 417928 - DNA, 336 bp, Staphylococcus aureus
atgtgcaagttggagtgggacgacgaaataaattttgggaaaatatcatttctgtcccactcccatattcccgatagaaaaacaggacttgaacttgcagaaaaatatggcattgatggcgtcatgattggtagcggcattttccataatccattcgcttttgaaaaagaaccacgcgaacacacaagcaaggaactattagatctgttgagattgcatttatcattgtttaacaaatatgaaaaagatgaaatacgacaattcaagagtttgcgtagattctttaaaatctatgtgcgtggcataagagcgctagcgaacttcgacatcaattga

SEQ ID NO: 417929 - DNA, 885 bp, Staphylococcus aureus; identical to SEQ ID NO: 410342

SEQ ID NO: 417930 - DNA, 1122 bp, Staphylococcus aureus
atgggattaaaagatcaagctgttacctggagaaggtattttcatcaatttccagaactatccgataaagaatttaagactacacaaaaaattaaagatattttaacagaacatcatattagaatattagacttaccacttgcgactgggcttgttgctgaattgggacaaggtctgagttgtatagctgttcgggctgacattgatgctttaccgattcaagagcttgttgaacaggattttaaatctgaaaatgaaggtgttatgcatgcgtgcggtcatgatattcacatggctagtattttggctacggctgtaaaattaaaagaaattgagggcactcttactgggcgtgttaaattcatttttcaaccagcagaagaactaggacatggcgcttttaaaattattgaaacacatgcattaaaagatgtacaagcagtattgggttttcataatgacccatcgcgttcggtaggtacatttgcaatcaaaacaggggcaattacatcagcagtagatcgttttgagtttcatattaaaggcgtgggtggtcatgctgcaaagccagaacaatgcaacgatccagttattgtgttggcgcaattgattaatagtattcaatccatagttagtagaaatctatctgcgtttgatgaagcggtagtaacaattggacaaatatcatgtggtaatacttggaatgtcattgctgatcatgcgtatgtacaaggcacagtgcgtagttttgatcctgtggtacgaaagcttgtagaaacacgattacaagatattgcggacggattggctcaagcatataatatgaaaattaatttaaattatacacatttacctggcgctgtgatgaatgatgaggcattgacgcataaagcaattgcagtagcccaacatgttggatataaggtggaaatgatggaacagccgcttacgattggagaagatttttcaggttatagtcaacattttccaagtgtatttgcgttaattggttctcatagtgaatatgatttacatcatcctcaatataaaccggatgaaaggattctggaaaaagtacctgagtattttgttgaatttgtaaagagactattgcatgaataa

SEQ ID NO: 417931 - DNA, 1497 bp, Staphylococcus aureus
atgactactaaaaaactgtattttctatccatttctattatcattttagtcgccatttcaattgctatatatataacattaaatagcaatacgaagacacggttaaccaatgattcgcaacaacaaatagatacaattatcgagcatgatttacaaaagggacacattcctggagcatcaattttaatagtaaaaaatggcaaagtttttttaaataaaggttatggttatcaagatgttgataaaaaagtcaaagcttctcccacaacaaagtatgaaattgcttctaatactaaagctttcacaggtcttgcaattttaaaattagctcaagaaggtcgattaaacttaaatgatgacgtatccaaacatgtgcctcattttaaaatgaactataatggtcaaaatgaaactattacgattaagcaacttttggctcaaacaagtggtatacctagtgatattacaagcgaagacgccgtaacaaataaaaataatcgtttaaatgatgtaacccgtgcaattatgggtgatgaattacatcataagcccggagaagaatttgaatactcaaatatgaactatgatttattaggtttaattatccaaaacgttacgaagcaatcctatacaaaatatattacaaattcatggctcaagcctttgcatatgacacatacatcattcaaacaaaccaattacaaatcaaaacatgatgctattggctatgaattacaaggttcgacacctgtcgtctctaaacctgaatttaacctttgggatacaccatcagcatatatgatgacatcaactgaagatttggaacattggataaaattccaacttaatccacctgataaatacaaatcattagttcaacaatcacataaaaatttatcttcaacaattggtgaacctaatgccaatgcatatgcttccggctggtttaccaataatgatgaacatttagtgtttcattcaggaacgctagataacttttcatcatttattttactaaatccaaaacaaaattatggaattgttgtacttgcaaatctaaattcggaatatgtacccaaattagttgagcatcttaatacacaaattgtaaatcacaagcgatattcgacggttgcgtctatgctcaatcaatataaagatcaatttaatattgttaccgttttgatgacaacacttattttattagcatttatattctcagcttatcgtgcttggcaaatgcgccatggtcaaattcttttgcgtagatcaaaacggattgctgtattgagttggttatcattatgtatatgtatcgctttagcgctcgcgctttatgcattaccatatttaattctcggtagcaataactggtcttttgtactgacttggctaccaatagaaattaaattagcactaatcacaacattaattgcattattcagtacattaattgtaattctgttattccttcatacaaagataacgaagacataa

SEQ ID NO: 417932 - DNA, 153 bp, Staphylococcus aureus; identical to SEQ ID NO: 417585

SEQ ID NO: 417933 - DNA, 957 bp, Staphylococcus aureus
atgaactatcaagttcttttatattataaatatacgacgattgatgaccctgaacagtttgctcaggatcacttagccttttgtaaagcacaccatttaaaaggtagaattcttgtttctacagaaggtattaacggcacattatctggtacaaaagaagaaaccgaacaatatatagcacatatgcatgccgatgaacgattcaaagatatggtgtttaaaattgatgaagctgaaggacatgcttttaagaaaatgcatgtacgtcctcgaaaagaaatcgttgctttagatttagaagatgacgtcgatccaagacacacaactggtcagtatttatcacctgtagagtttagaaaagctcttgaagatgatgacacagtcattattgatgcacgtaatgattatgaatttgatttaggtcatttccgaggtgcaattcgtccaaatatcacacgttttagagatttgcctgactggattaaagagaataaagcgttatttgcagataaaaaagtggttacgtactgtactggtggcattcgatgcgaaaaattttctggatggcttttaaaagaaggtttcgaagatgtagcacaacttcatggcggtattgctacatatggtaaagattctgaaacaaaaggtgaatattgggacggtaaaatgtacgtatttgatgaccgtatcagtgttgatatcaaccaagttgaaaaaacgattattggtaaggattggtttgatggcaaaccatgtgaacgttatattaattgcgctaacccagaatgtaataaacaaatattagtttctgaagaaaacgaaactaaatatttaggtgcatgctcttatgaatgtgctaaacatgagcgtaatcgttatgttcaagcaaataatattagtgataatgagtggcaacaacgtttaacaaactttgatgatttacatcaacatgcttag

SEQ ID NO: 417934 - DNA, 975 bp, Staphylococcus aureus; identical to SEQ ID NO: 405592

SEQ ID NO: 417935 - DNA, 516 bp, Staphylococcus aureus
atgactaactttacttttgatggtgcacatagtagtttagaattccaaattaaacatttaatggtttctaaagtgaaaggttcatttgatcaatttgatgtagctgttgaaggagatattaatgacttcagtactttgaaagctactgcaacaattattccaagctcaattaacactaaaaacgaagcacgtgataaccacttaaaatctggtgatttctttggtactgacgaatttgataaaattacatttgtgacaaaatcagtatctgaaagcaaagttgttggtgatttaacaattaaaggcatcactaacgaagaaacattcgatgttgaattcaacggagtaagtaaaaatccaatggatggttctcaagtaacaggtgttattgttactggtacaatcaatagagaaaactacggcattaactttaaccaagcacttgaaactggtggcgtaatgctaggcaaagatgttaaattcgaagcatcagctgaattctcaatctcagaataa

SEQ ID NO: 417936 - DNA, 465 bp, Staphylococcus aureus
atgggaaattatttggtattgcaatcagattttggacttagtgatggcgctgtaagtgcaatgtatggagttgcatatactgtaagtgatgatatacgtgttgaaaacttaacgcatgatataccaccgtatgacatttgggtagcgtcatatcgtttatatcaaactgtaaaatactggcctaaaggcacagtttttgtatcagtggtagacccgggtgtaggtagtgataggcggagcattgcttgcttaacatattcaggtcattacattattacacctgataatggttctttaagtcatattaaacattacgaaggtattaaaaaagttatcgaaattgatgaagtgaaaagccgattgcctcattcggaagaaagtcatacttttcatggtagagatgtttatgcatacaatggtgcgagattagctgcaaataagatagcgtttgaacgtctcggttag

SEQ ID NO: 417937 - DNA, 261 bp, Staphylococcus aureus
ttggcattcttaaaatccttggaaattgttcatggtaataatttggtggtaacaatttatcatcaagataagaaagtctatcaaaatattattaaatttgcgcgatcgtttgcagatgttaatgtgggtgaacctcttgtgtatgttaactcgctagtaaatattggtgtagcagtcaatcaagactcattttcagatttatatcatattggtactggaaatgattggacgattcatttatctaaagcaccatcaatataa

SEQ ID NO: 417938 - DNA, 555 bp, Staphylococcus aureus
atgaaaaaacaagatatttcagttaaaactgttgttgcaattggtataggagcagcggtatttgtgattttagggcgttttgttgtaataccaacaggttttcctaatacgaatatagaaacatcttatgcatttttagcattaatatctgcaatatttgggccttttgctggtttaatgactggattagttggacacgctattaaagatttcacgacatacggtagtgcttggtggagttgggttatttgttcaggaattataggctgtttatatggatggattggcctaaaattaaatctttcttcaggcctattttctaggaaatcgatgatttattttaatatcggtcaaattattgcgaatattatttgctgggcacttattgcaccaacattagatattttgatttataacgaaccggctaacaaggtttatacacaaggtgttatctctgcagtattaaatattatttcagttggtattattgggacaatattattaaaagcatatgcttcatctcaaataaaaaaaggtagtttacgtaaagaataa

SEQ ID NO: 417939 - DNA, 498 bp, Staphylococcus aureus
atgataaatactgaaagattaaatttaatgattccaagttcctcgcatttaattgaactttataatatttgtagtcatccacaagcaaatatatacactcccaaaggtttacataattccaaattagacacacaacggtggattgaaaaatggcaaaaccattggcaacaatatcaatttggttactttgtattggtgaaaaaaatagattgtagtgttattggtatttgtggatatgaatatcgacaattaaagcaagaaacagtactaaatttattttataaattacatccaagttttgaaggacaagggtacgcatgtgaggctattacagcaatcacaaattttgtgaattatatcgatcaagaaacagtaaaagttatcaggacaaataagtgtaaccaacgttcaataaatttagcagaaaggcttaaattcaagcgagacaaagctatggacgacattatcaatcaaggagacattgtgttttataaataa

SEQ ID NO: 417940 - DNA, 1125 bp, Staphylococcus aureus
atgcataaaaaatatttattgctattttttctgttattatcagttgcattgttatatagctgttccaagcaaaatgagaaagctcaaaataaatctgttaatccaaatgagtatgcaaagcataaatcgaaaatggatgaacattgggaaacatatcacggccaagtttatcatgtgttttatcacccattaattacagacccaaaagttgcgtttacaggagatacacaccaagctaagggcaacaatgattggatgattactgtaagtgaatttaaaaaatcattgaacgaattatataaaaataattacatcatcgttaatccacatgatgtatacgacttatcatctcatcatgtaaaagccaaaaaaataaaattgccgaaaggtaaaaagccactaatcatctcaattgatgatatgaattactatagttacatgagacaccatggttatgctgaccgtttagtactcgataaaaataaacatgttgtttctgaaactacagacaaaaaaggccatgctacttattctgatgacaatgatatcgtgccaattttaaataaatttgtaaaagagcatccagatttttctttaaatggtgaaaaaggtgttgttgctttaaccggttatgagggcgtattaggttatcgcacgaatgaattaacgagtaaagattatacaaagaataaaaaggcagctgaggaagttgttcgcgcaatgaaacgggatggatggtcatttgcgagtcattcatatggtcacattaattttgaaaaaacatctttagaaggtattaaacgtgatactaaaagatggaaagatgaagttgaaccaattgtaggtaaaacagatatgtttgtatttccacatggcgcacaggatagacatacacaagcgtatgattatttggtagatgaagcagagtttaagtttattgcaggtgtcggtccaaacaattttatagatatatcagcaacgaacgtttaccaagatagggttgcgattgatggtctaaacttatttgaatttaaatataaactcaaaccgttttttaatcctgaaaatgtatatagtaaacaagatagacgttactttaaagggaatcgggattatgaagaatag

SEQ ID NO: 417941 - DNA, 819 bp, Staphylococcus aureus
gtgaataattcagaacaattaattgcgttaaaagaatcggaaacagcatttttaaaatattttaataaagcggattatgagttagttgattttagtgtggttgaaaagttggactggaaacaattgaaccatgaggatttgcagcagatgggtgagcgaaatttttggcaacatgagcatcaaatttatgcacttcgaaatgattttacagatcaattattgcgttattactcaatgtatccaactgcagcaacaaaagtggcatacacaggtttaatcattcggaataatgaagcggctgtacaagttggtttggaaaactatgcaccatcattagcgaatgtacaacagagcttaaagctatttattcagtttattcaacagcagttgagagacaacgtgcattttgttgtattgggacattatcaattgcttgatgccttactcgataaatcgttacaaacaccagacatactatcaatgattgaggaacgtaatttatcgggactggttacatatttgtcgactgaacatccaatcgtgcaaatcttgaaagagaatacgcaacaacaattaaatgtattggaacactatattccaaatgaccatccagcactcgttgaattaaaaatatggaaacgttggttacatacacaaggttataaagacatccatttagatattactgcgcagccacctagatcctattacacaggtttatttattcaatgtcattttgctgaaaatgaatctcgagttttaacaggtggttattacaaaggaagcatcgaagggtttggattaggattaacactttaa

SEQ ID NO: 417942 - DNA, 1251 bp, Staphylococcus aureus
atgcttaatgcacaacaatttttaaatcaattttcattagaagcaccattagatgagtcattgtatccaattattcgcgatatttgtcaggaagttaaagttcatggagataaggctttgaaaatgtataatctaacattcgatcatacgaaaacagatcatttagaaattagtcatgaacaaattaaagcagcatttgacacattagatgaaaaaacaaaacaagcattacaacaaagttatgaaagaattaaagcatatcaagaaagtattaaacagacgaatcaacagttagaagaatcagtggagtgttatgaaatataccatccactagaaagtgtgggtatttatgtgcctggtggcaaagcaagttatccatcaacggttctaatgacagcgactttagcacaagtagcgggtgtagaaaatattgttgttgtgacaccacctcaacctaacggagtatcccaagaggtattagctgcatgttatattacgcaagttaatcaagtgtttcaagttggtggtgctcaaagtattgctgcattgacttatggaacagaaacgatacctaaagttgataagattgtaggtccaggtaaccaatttgttgcatatgccaaaaaatatttatttggacaggtaggtattgatcaaattgcaggaccaacagaaatagcactgattattgatgacaccgcagatttagatgccatcgtatatgatgtatttgcgcaagcagaacatgatgaattagcacgtacatatgtcattagtgaagatgcgcaagtccttaaagatttagaatcacgtattgctaaagcattgcctaatgtggacagatacgacattgtttctaaaagtatcgctaatcaacactaccttatccatgctagtaattttgatgaagcatgccatgtcatgaatacaatcgcgcctgaacatgcgtcgattcaaacagtaaatcctcaaccatatattgaaaaagtgaaatatgtgggtgcattgtttattggacattattcgccagaggtcataggagattacgttgcaggtccaagtcatgtattacctacaaatagaacagctagatttaccaatgggttatcggtcaatgatttcttaacacggaacacggtcatccatttatcaaaagatacgtttgaacaaattgctgattcagcacaacatattgctcatgttgaagcattatacaatcaccagcagtctattttaatacgtcagtcttag

SEQ ID NO: 417943 - DNA, 1881 bp, Staphylococcus aureus
ttgaaattaaatacatctaatagtccatttacagaaaaacaagtcacagagattaacaatctgctgcaaacattaacagagagccaacaacagtggcttagtggttttttactagctaatagtaacgatacgacaagtgatagtaatcaacaacaattagagacaaaagtgtggcaacaatcacaaatatcagaagaacaagcaacttcaacaacgtatatgttacaaaataaagagccacatatcgaagctaatcagcggcatgttacagtgctatatggttctgaatcaggtaatgccatgcgtttagctgaaattttttcagaacgtttaagtgatatcggacatcaagttgttttgatgtcaatggatgaatatgatacgacaaacatcgcacagttagaagatttatttattattacgtctactcatggtgaaggagaaccgcctgataatgcatgggatttctttgaatttttagaagacgataacgcacctaatttaaatcatgtgagatattcagtactagctttaggtgatcaaacatatgaatttttctgtcaagccggtaaagatgttgatgctttactagaaaatctaggcgctgagcgtatatgtaagcgtgtagattgtgatattgattatgaagaagacgcagaaaagtggatggcagacatcattaatattattgataccacatcagaaggtattcgaagtgaatcggtgataagtgaatcaattaagtctgccaaagaaaagaaatattctaaatcaaatccataccaagcagaagttttagcgaatatcaatttaaatggtaccgattcaaataaagaaacacgacatatagaatttttacttgatgattttagtgaatcatatgaaccaggagattgtatagtagcattaccgcaaaacgaccctgaattggttgaaaaactaatatccatgttaggttgggatccgcaatctccggtgccaattaatgatcatggtgatacagttcctattgttgaagcactaacatcacattttgaatttactaaattaacattgccattattgaaaaatgcagatatctattttgacaatgaagaattatctgaacgtattcaagatgagtcatgggcgcgtgaatatgttataaatcgggactttatagatttaataacagattttccaactatagaattacaacctgagaatatgtatcaaatccttagaaaattaccaccaagagagtattcgatttctagtagttttatggcaacgccagatgaagtgcatattaccgttggtacggttcgttatcaagcacatggacgtgagagaaaaggtgtatgctcggttcattttgctgagcgaattaaaccaggcgatatagtaccaatttatttgaagaaaaatccgaacttcaaatttccgatgaagcaagatataccggttattatgattggaccaggtactggaattgctccttttagagcatatttacaagaacgtgaagaacttggtatgactggaaaaacatggttgttctttggtgatcaacaccgtagttctgactttttatatgaagaagaaatagaagaatggcttgaaaatggaaacttaacacgcgtagatttagcattttcaagagaccaagaacacaaagaatatgtacagcatcgtataatggaagaaagtgaacgtttcaatgaatggattgagcaaggcgcagcaatctatatttgtggcgatgaaaaatgtatggcgaaagatgtccatcaagccattaaagatgtattggtaaaagaacgtcatatttctcaagaagaagcagagttattattgcgacaaatgaaacaacaacaacgctatcaacgtgatgtttattag

SEQ ID NO: 417944 - DNA, 498 bp, Staphylococcus aureus
atgaataatagaaatgtgtatgatatcgaagtaagtgattataaaggcttaacttataaattagaagcatttagaggtaaagtgattttggttgttaatactgcaacagaatgtatatatagcgaacaattgaaaaaactagagactttgtttcaaaaatataaggatcgtgggtttgtagtgttgagttttccgaataataattttgacaatcgacaaccaggttctaatgaagaaatcttgaaaattagtcgtgagaaatttggtgtaacatttccagtgttagctaaaatatctgtgaacgggaacgatgaacatccgttatttacgcatttaaagaatgaacaaccaggaatctttgggtccccaataaaatggaatttcacaaaatttataatcgatcgacaaggaaatgttgtaaatcgattcttgccaatggaagatccattggatatatcgacaaatatagaaatattattgcaagaatcttcatcttaa

SEQ ID NO: 417945 - DNA, 2001 bp, Staphylococcus aureus
atgaagttaagattgttatggcacatagtgcgacgtcaatttattatgcagcgacttgtaatcattccattcattttagcggtaagtgtactattcatgattgaatatacgcttgtgtcaattgggttaaatagctacataaaacagaagaatgacttcctagtaccatttattatcatagctaatttttttatggcgcttttaacttttatttttattttctatgcaaatcactttatgatgtcacaaagacgaaaagagtttagcatttttatgacattgggcatgaccaagaaaagtatgcgtttaattgtagtgatggaaactatcttacaatttataataatttcagtcgttagtattgccggcggatacttacttggtgcgatatttttcttgtttatacagaaaataatgggcagtgaagttgcgacgttaaggtattatccatttgactttgtagcgatgtttattactttgattatcattgctgtattaatgggcatgctacttatattcaacttgttcagtattaattttcaacggccgataacttatcaacatcgttccgattccagggtcatatcacgatggttgcgttacgttttaattgttataggaagcgcagcactatatttaggctactttattgcattacaacaagatacgacgtttggtgccttttttaaaatatggattgtcataggattagttattatcggtacttatgcattttttgttggtataagtgaaataattattagtatattgcagcaggtatcaaaagtttactatcatccacggtatttttttgtggtagttgggatgcgtgtacgtcttaaaatgaatgcagtcagtcttgcaacaatcactttgctgtgtacatttttgattgtaacgctcacaatgacattaacaacctatcgtgatatgaatcataccattacgaaattgattacgaatgattatgatttgtcatttagcgacaattctaagtcacaaatagaacgtcaacaaacaattgagaatattaaacgtgatatacagggttcggttaatgcaaaagacttcaaagtatatgaaacgacattatttagagcttctttagaaaagaatcgtgcttattacaagttaaaacaggctagtgatgatattccaatagacttcattggtaatgaaggcgcgatattttcaagacaatcagtaatgattacagcttttacagcacaagattataatcgatatcaccaaaacaaattacacttagacaatcaaagtataggtatgattacgaatgtacctatttttaaaaagcagtctaaggtcggtcttaataatgaagtctttaaagtgaaacaacttgacgcacatgcattaaatttgatgatgattcaagatagtatggttttaattgttaaagataacaatcaattacaaaaagtaaaaggattttatgcacatgagcaaaagaagtcgacaatatcgataaactttaatgtatttggaaagacgaaattaacaacatcacaaatacaaaagctatcgaaaaaatacgatgcgtcaataaattctaaatcagaaatgctaatggtttgggatcgtttgacaggtggactaatatttgtaggtggcgtagtatcaattgtacttgtcattggaatatttctaatgatgtactataaacaagtctcagaagcctatgcaaatcagcacaattatgacattatgaaaaaacttggtttagataatggaagaatagcaaagataacacgaaatcaaatgacattcttgttcgcaataccaataacagtagcactgattcacacattaatttctagtaacattgtatatacgttactaaatatgataggtattaataaccatcatatatttttaacaagttacgtactagctgtcattataatttcgtttctatatatggcgatgtacaaaataacttcctatatttatgctaaagttattcatcaacaacgcaattaa

SEQ ID NO: 417946 - DNA, 756 bp, Staphylococcus aureus; identical to SEQ ID NO: 411158

SEQ ID NO: 417947 - DNA, 201 bp, Staphylococcus aureus; identical to SEQ ID NO: 414461

SEQ ID NO: 417948 - DNA, 1425 bp, Staphylococcus aureus; identical to SEQ ID NO: 414460

SEQ ID NO: 417949 - DNA, 762 bp, Staphylococcus aureus; identical to SEQ ID NO: 414459

SEQ ID NO: 417950 - DNA, 1434 bp, Staphylococcus aureus
atgaaatttaagtcattgattacaacaacattagcattaggcgttatagcatcaacaggagcaaactttaatactaacgaagcatctgccgcagctaagccattagataaatcatcaagtacattacaccatggacattctaacatccagattccatatacaattactgtgaacggtacaagccaaaacattttatcaagcttaacatttaataagaatcaaaatattagttataaagatatagagaataaagttaaatcagttttatactttaatagaggtattagtgatatcgatttaagactttcaaagcaagcggaatatacggttcattttaaaaatggaacaaaaagagttatcgatttgaaatcaggtatctacacagctgacttaatcaatacaagtgacattaaagctatcagtgttaacgtagatactaaaaagcaacctaaagataaagctaaagcaaatgttcaagtgccatatacaatcacagtgaacggcacaagccaaaacattttatcaaacctaacatttaataaaaatcaaaatattagttacaaagatttagagggtaaagttaaatcagttttagaatcaaatagaggtattactgatgttgatttaagactttcgaagcaagcgaaatatacagttaattttaaaaatggaacgaagaaagttatagatttgaaatcaggtatttacacagcgaatttaatcaattcaagtgatattaaaagtatcaatattaacgtagatacaaaaaaacatatcgaaaataaagctaaaagaaactatcaagttccatattcaattaatttaaatggtacatctacaaacattttatcgaatctttcattttcaaataaaccttggacaaattacaaaaatttaactagtcaaataaaatcagtactgaagcatgatagaggtattagtgaacaagatttaaaatatgctaagaaagcttattatactgtttattttaaaaatggtggtaaaagaatcttacagttaaattcaaaaaattacacagcaaacttagttcatgcgaaagatgttaagagaattgaaattactgttaaaacagggtcaaaagcgaaagcggatagctatgtaccatatacaattgcagtaaatggcacatcaacaccaattttatcaaaactaaaaatttcgaataaacaattaattagttacaaatatttaaatgacaaagtgaaatctgtattaaaaagtgaaagaggtatcagtgatcttgacttaaaatttgcgaaacaagcaaaatatacagtatatttcaaaaatggaaagaaacaagtagtgaatttaaaatcagacatctttacacctaatttatttagtgccaaagatattaaaaagattgatattgatgtaaaacaatacactaaatcaaaaaaaaataaataa

SEQ ID NO: 417951 - DNA, 813 bp, Staphylococcus aureus
atggaaacgttaaattctattaacattcctaagcgtaaagaagattcacataaaggtgattatggcaaaattttattaattggtggatctgctaacttaggtggtgccattatgttagcggctcgtgcatgtgtatttagcggtagtggtttaatcactgtagctacacatccaacaaatcattcagcattacattctcgttgcccagaagcgatggttattgatattaatgatacgaaaatgttgacgaaaatgattgaaatgactgacagtatactaattggtccaggtcttggcgttgatttcaaaggaaataatgccattacattcctactacaaaatatacaaccgcatcaaaatttaatcgtagacggcgatgcgattacaatatttagtaaactgaaaccgcaattacctacatgtcgcgtgatttttactccgcatctcaaagaatgggagcgattaagtggtattcctattgaggaacagacatatgagcgtaatcgtgaagcagttgatcgtttaggtgcaactgttgtacttaaaaaacatggtactgaaattttctttaaagatgaagactttaaattgacaatcggtagcccagcaatggcgactggtggtatgggcgatacacttgctggtatgattacaagttttgtcggtcaatttgataacttaaaagaagcggttatgagtgccacatatacacatagttttattggcgaaaatcttgcaaaagatatgtatgtggtgccaccatcaagacttatcaatgaaataccttacgcaatgaaacaattagaaagttag

SEQ ID NO: 417952 - DNA, 1515 bp, Staphylococcus aureus
atgactttatatttagatggtgaaacactaacaattgaggatattaaatcatttttacaacaacaatcaaagattgaaattattgatgatgcgttagaacgtgtcaaaaaaagtagagcggtagttgaacgtattattgaaaatgaggaaacggtttacggtattactacaggttttgggttatttagtgatgtacgtatagacccgacgcaatataatgaattacaagtgaatctgatacgctcacatgcctgtggactaggtgagccattttcaaaagaagtagcattagtcatgatgattttacgattgaatacattattaaaaggtcattcaggtgccactttagaattagtgagacaattacaattttttataaatgaacgtattataccgataatcccacagcaaggctctctcggtgcatcaggagatttagcgccattatcacacttagcattagcattaattggtgaagggaaagtattgtacagaggggaagaaaaggatagtgacgatgtattaagagaattaaatagacaacctttgaaccttcaggctaaagaaggtttagcattgattaatggtacgcaagctatgacagctcaaggtgtcattagttatatagaagcagaagatttaggttaccaatctgaatggattgctgcattaacgcatcagtctcttaatggcattatagatgcatatcgacatgatgtgcacgctgttcgtaattttcaagaacagattaatgtggcagcgcgtatgcgtgattggttagaaggatcagcattaacgacgcgacaagcagaaatacgtgtacaagatgcatatacgttgcgttgtataccacaaatccatggtgcgagttttcaagtattcaattatgttaaacagcaattagaatttgaaatgaatgcggctaatgataatccacttatatttgaggaagcaaatgaaacgtttgttatttcaggtggtaacttccatggacaacctattgcttttgcattagatcatcttaaattaggtgtaagtgaattagcaaacgtatcggaacgtcgtttagagcgactagtaaatcctcaattaaatggtgatttaccagcatttcttagtccagagccaggattgcaaagtggcgcgatgattatgcaatatgctgctgcaagtctcgtttctgaaaataaaactttagcgcatccagcgagtgttgattctatcacttcatctgcgaaccaagaagatcacgtatctatgggaactacagctgctagacatggttatcaaattattgaaaatgcaagacgtgtgctggcaatcgaatgtgttattgcattacaagcagcagagttaaaaggtgttgaaggtttatcaccaaaaacacgtcgtaaatatgaggagtttcgaagtatcgtgccatccattacacatgaccgtcaatttcataaagatattgaagcggttgcacagtatttaaagcaatcaatttatcaaacgactgcatgtcactaa

SEQ ID NO: 417953 - DNA, 1287 bp, Staphylococcus aureus
atgttagacattagattattcagaaatgagcctgacacagttaagagcaaaattgaattacgtggagatgatccaaaagttgtagatgaaattttagaattggatgagcaacgacgtaaattaattagtgcaacagaagaaatgaaagcacgtcgtaataaagtaagcgaagaaatcgcattaaaaaaacgtaataaagaaaatgctgatgatgtgattgctgaaatgcgcacattaggtgacgatattaaagaaaaagatagtcaattaaatgaaattgataataaaatgacaggtatcctttgtcgtattccaaatttaataagtgatgatgtacctcaaggtgaatctgatgaagataacgttgaagttaaaaagtggggtacaccacgtgagttttcatttgaaccaaaagcacattgggatattgtagaagaattgaaaatggctgattttgatcgtgcagcaaaagtttcaggtgcgcgttttgtatatttaacaaatgaaggtgcgcaattagagcgtgctttaatgaactatatgattacaaaacatacaacacaacatggttatacagaaatgatggtaccacagcttgtgaacgcagatacaatgtatggtacaggtcaattacctaaatttgaagaagatttatttaaagtagaaaaagaaggattatatacaattccaactgctgaagtaccattaacgaatttctaccgtaatgaaattattcaaccaggtgtacttcctgaaaaattcactggtcaatctgcatgtttccgtagtgaagcaggatcagcaggtagagatacaagaggattaattcgtttacatcaattcgataaagtggaaatggtacgttttgaacaacctgaagattcatggaatgctttagaagaaatgacaacaaacgcagaagcaattctagaagagttaggtttaccatatcgtcgtgttattttatgtacaggtgatattggatttagtgcaagcaaaacatatgatttagaagtttggttaccaagctacaatgattataaagaaattagttcatgctcaaactgtacggatttccaagcgcgtcgtgctaacatccgcttcaagcgtgacaaagcagctaaaccagaattagcacatacattaaatggtagtggtttagcagttggacgtacatttgctgctattgttgaaaattaccaaaatgaagatggaacagtaacaattccagaagcattagtaccatttatgggtggtaaaacacaaatttcaaaaccagttaaataa

SEQ ID NO: 417954 - DNA, 696 bp, Staphylococcus aureus
atgacaacacatttaagttttagacaaggcgtgcgagagtgtgtcccaacattattgggttatgccggtgttggtatttcatttggtattgtggcttcgtctcaaaactttagtattttagaaattgtcttgttatgtcttgttatatatgccggtgctgcgcaatttattatgtgcgcgttgtttatagcaggtacaccgatatcagcgattgtactaactgtattcatcgtaaattcaagaatgttccttttaagtatgtcgcttgcaccaaacttcaagacatatgggttttggaaccgtgttggattaggttcattagtaactgacgaaacgtttggcgtcgccattacaccttatttaaaaggagaagctatcaatgatcgttggatgcatggtcttaatatcacagcatatttattttgggcaatttcatgtgtagctggggctttatttggcgaatatatctcaaatccgcaaacgctagggttagattttgctatcacggctatgtttatctttttggccattgcgcaatttgaatcaattactaaatcgcgattaagaatttacatagtactcattattgccgtcatagtaatgatgttatcgctaagtatgtttatgccttcatatctagcaatattaattgcagccacaatttcagcagcgttaggagtgatgatggaacaatga

SEQ ID NO: 417955 - DNA, 330 bp, Staphylococcus aureus; identical to SEQ ID NO: 405554

SEQ ID NO: 417956 - DNA, 969 bp, Staphylococcus aureus
atgacaaattacacagtagatactttaaatttagggaaatttattacagaatctggggaagtcatagataacttgcgtttgagatatgagcatgtcggttatcatggacaaccattagttgtagtttgtcatgcattaactggcaatcatttaacatatggaacagatgattatccgggttggtggcgagaaattattgatgggggatatatacccattcacgattatcaatttttaacatttgatgttattggtagtcctttcggttcaagttcacctttaaacgaccctcattttcctaaaaaattaacattaagagatatagtcagagcgaatgaacgaggtatacaagcccttggttatgataagattaatattttaatagggggaagtcttggaggtatgcaagcaatggaactactttacaatcaacagtttgaagtagataaagccattatccttgctgcaacaagtcgaacatcatcttatagtagagctttcaatgaaattgcaaggcaagccattcatcttggtggtaaggaaggtctaagtattgcacgccaattaggttttttgacatatcgatcatcaaaaagttatgatgaacgtttcacgccggatgaagtagtcgcataccaacaacatcaaggtaataaatttaaagaacattttgatttgaattgttatctgacactgctagatgtattggatagtcacaacattgaccgaggtcgcacagacgtaacgcatgtttttaaaaatttagaaacgaaagtcttaacaatgggttttatagatgatttgctatatccggatgatcaagttcgtgcattaggtgaacgttttaaatatcatcgtcatttcttcgtgcctgataatgttgggcatgatggattcctactaaactttagtacctgggcacctaacttatatcatttcttaaatttaaagcattttaagcgtaagtaa

SEQ ID NO: 417957 - DNA, 924 bp, Staphylococcus aureus
gtgttttcaaaaatacaacctaaagcaacaataattgcaacgattgcgttggtatttgtcgctttagctttatatctagtgcctggtttaggactaatatttgcattatttgcaaccataccaggtatcgttttatggaataaatcaatacaatctttcgggattagtgcacttattacagtaattataacaactgttttaggtaatactttcgttttaagtgccatcatattagtcttaattgcaagtttaattattggtcaattgctcaaagaaagaacgtctaaagaaagaatattatacgtaacaacagtagcgatgagcttaatttcattaatcgcttttatgttactacaaacattcggaagaattccaccatcagcgagcatagtaaaacctttcaagcaaacattacatgaagcgattacgatgagcggtgccgatgcgaatatgacccaaatattagaagaagggtttagacaagcgaccgttcaattaccaggtttcatcattatcattacatttttaatcgtcttaattaacttaatcgttacatttccgattttacgaaaatttaaaatcgctacacctgtatttaagccacttttcgcgtggcaaatgagcggtattttattatggatatacattattgttatcatatgtttattatttacaggtcaaccgagtgtgttccagagcattcttttaaacttccaacttgtgttatcattagtaatgtatattcaaggtttaagtgttattcatttctttggtaaagcgaaaggtttgccgaatgcagtaacgattttactattgattatcggtacaatactgacacctacgacacatattgtaggactacttggtgttatcgatttaagtttgaatttgaagagaatcatgaaaaataattctaaaaagtga

SEQ ID NO: 417958 - DNA, 1968 bp, Staphylococcus aureus
atgaatcggcagtccactaagaaagctttactaataccatttgtcatcatgatcatcacagcaattgttttaatgggtgtatggtttatctttaatagtcttatagcattaattgcatctatcgttcttgtcgtgatgattattgttagcatcattttattcagacaagctttaatgaaaatggatagttatgtagatggtttgagtgctcaaatttcaacaacaaataataaagcaatcaaacatttaccaattggtatcattgttttagatgaaaatgatcacatcgaatgggttaaccaatttatgacagatcatatggaagcaaatgtcatttctgaatctgtaaatgaagtatttccaaacattttaaagcaattagatagagtgaaatccgttgaaatagaatataatcagtatcatttccaagtacgttattctgagaatgatcactgcctctatttctttgatataactgaacaagtacaaacaaatgaactatatgaaaattctaaaccaatcattgcgacattatttttagataactacgatgagattactcaaaatatgaatgatacgcagcgttcggaaatcaattcaatggtaacgcgtgtcattagtcgatgggcaactgagtataatatattctttaaaaggtatagttccgatcaattcgtagcctatttaaatcaaaaaatattagctgacttagaagaatctaaatttgatatcttgagtcaattacgtgaaaaaagtgttggttatcgtgcccaattaacattaagtattggtgttggtgaaggtactgaaaatttaatcgacttaggtgaattatcacaatcaggcctagacttagcattaggacgcggtggcgaccaagttgcaattaaaagtattaatggtaatgtgcgtttctatggcggtaagactgacccgatggagaaacgtactcgtgtaagagcacgtgtgatctcacatgcgttaaaagatatccttgcagagggtgacaaagtcattatcatgggacataaacgtcctgacttagatgcaattggtgcagcaatcggtgtgtctagatttgcaatgatgaataatttagaagcatacatcgtattaaatgagactgacattgatccaacattacgacgcgtgatgaacgaaatagataaaaagccagagttaagagagcgatttattacatcagatgatgcttgggatatgatgacatctaagacaaccgtagtgattgttgatacgcataaaccggaactggttttagatgaaaatgtcttaaataaagcaaaccgtaaagttgttatcgatcatcatagacgtggtgaaagcttcatctctaatccattgttgatatatatggaaccatacgcaagttcgacagctgaattggtaacagagttactggaatatcaaccaacagaacaacgtttaacacgtcttgaatcaacagtgatgtatgcaggtattattgtagatacaagaaactttacattacgaacaggatcaagaacattcgatgcagcgagttatttacgtgcacatggtgcagatacgattttaacgcaacatttcttaaaagatgatgtggatacttacattaatcgatctgaattaattcgaactgtaaaagttgaagataatggcatagccattgcgcatggttcagacgataaaatttatcatccagtaacagttgcacaagcagcagatgaactgttaagtttagaaggtattgaagcatcatatgttgttgcgagacgtgaagataatctgattggtatatctgcgcgttcactcggttcagtaaatgtccagttaacaatggaagcacttggtggcggtggacatttaaccaatgcggcaacacaacttaaaggtgtgacagtcgaagaggcgatagcacaattacaacaagcaattacagaacaattaagtaggagtgaagatgcatga

SEQ ID NO: 417959 - DNA, 447 bp, Staphylococcus aureus
atgaaagtaatttttacacaagatgttaaaggtaaaggtaaaaaaggtgaagttaaagaagtaccagtaggttatgcaaataacttcttattgaaaaagaattatgctgtagaagcaacaccaggtaaccttaaacaattagagttacagaaaaaacgtgtaaaacaagaacgccaacaagaaattgaagatgctaaagtattaaaagaaacgttatcaaacattgaagttgaagtatcagcaaaaactggtgaaggtggtaaattgtttggatcagtaagtacaaaacaaattgccgaagcactaaaagcacaacatgatattaaaattgataaacgtaaaatggatttaccaaatggaattcattccctaggatatacgaatgtacctgttaaattagataaagaagttgaaggtacaattcgcgtacacacagttgaacaataa

SEQ ID NO: 417960 - DNA, 1401 bp, Staphylococcus aureus; identical to SEQ ID NO: 417917

SEQ ID NO: 417961 - DNA, 228 bp, Staphylococcus aureus; identical to SEQ ID NO: 409217

SEQ ID NO: 417962 - DNA, 765 bp, Staphylococcus aureus; identical to SEQ ID NO: 409344

SEQ ID NO: 417963 - DNA, 474 bp, Staphylococcus aureus
atgtctaaaatcaggtcttttacaatattaagtctacttatttacttagctatgatgtgctatacagtagtgacctattcaaaattaccaaccaaagtacctattcattataatttagcaggggatgctgataattttgctgataaatgggtgctgcttttgattaatagcgcatttatagtgatttggcttatatttttcattgcaggtagatactatgaacgatttgccaaatggtcacattataatcatacaccacgtgaaattcgagcgattaaattatttttaagtacgttaaatttagagattatgagctatatgtctatcttcacagtattagaaatttggcaaatacaacaccatcatcaattcaatttactatggtttaatatgatatttatcattatcattggtttgacgcttgtcatattttgtttacttcctacaattcataaaatgagagattctcaataa

SEQ ID NO: 417964 - DNA, 1593 bp, Staphylococcus aureus
atgacactacttactgtaaatccattcgataatgtcggattatcagccttagttgcagcagtacctattattttatttttattatgcttaaccgtttttaaaatgaaaggcatttatgcagcattgacaactttggttgttacattgattgtggctttatttgtatttgaattaccagcgcgtgtatcagcaggtgcgattacagaaggcgttgttgccggtatttttccaataggatatatcgttttaatggcagtttggttatataaagtttctattaaaacaggacaattttctattattcaagatagtattgctagtatttcagaggaccaaagaatccaactattattaattggattttgtttcaacgcatttttagaaggtgcagcaggatttggtgtgccaattgcgatttgtgcagtattattaattcaacttggatttgaaccattaaaagcagcgatgttatgtttaattgctaatggtgcggcgggtgcctttggtgcaattggtttaccagttagtattattgatacgtttaacttaagtggaggcgttacaacattagatgttgcgagatactcagcattaacacttccaattttaaactttattattccatttgttttagtattcattgtagatggtatgaaaggtattaaagaaattttacctgtcattttaacagtgagtggtacatatactggattacaattattattaacaatattccatggtccagaactagcagacattattccatcactagcaacaatggtggtgttagcatttgtttgtcgtaaatttaaaccgaaaaacattttcagattggaagcgtctgaacataaaattcaaaaacgaacgcctaaagaaattgtctttgcttggagtccgttcgtaattttaactgcctttgtattagtatggagtgcaccattcttcaaaaaattattccaacctggaggtgcgcttgaaagtttagtattaaaaatgccaattccgaatactgtgagtgatttatcgcctaaaggaattgcgttgcgtctcgatttaattggtgcaacagggacagcgattttattaacagtaattattacaattataattacgaagttaaaatggaaaagtgcaggtgctttattggtcgaagcaattaaagaattatggttaccgatccttacaatttcagcgattctagctattgctaaagttatgacatacggtggtttgactgtagcaattggacaaggtattgctaaagctggagcaattttcccattattctctccagtattaggttggattggtgtgtttatgactggttcagttgtaaataacaatactttattcgcacctattcaagcgacagtggcacaacaaatttcaacaagcggttcattacttgtggcagctaacactgcaggtggtgtagcagcgaaacttatttcaccacaatcaattgccattgcgactgcagctgttaaaaaagttggtgaagaatctgcattattaaaaatgacgttaaaatacagtattatatttgttgcctttatttgtgtttggacgtttatactaacgttaatattctaa

SEQ ID NO: 417965 - DNA, 186 bp, Staphylococcus aureus
atgatcaaacctggtcaagaacttgttgttgataagaagcaaccagcaaaccatgcagatgctaacaaagctcaagcattaccagaaactggtgaagaaaatccattcatcggtacaactgtatttggtggattatcattagcgttaggtgcagcgttattagctggacgtcgtcgtgaactataa

SEQ ID NO: 417966 - DNA, 930 bp, Staphylococcus aureus; identical to SEQ ID NO: 405426

SEQ ID NO: 417967 - DNA, 1380 bp, Staphylococcus aureus; identical to SEQ ID NO: 417655

SEQ ID NO: 417968 - DNA, 1206 bp, Staphylococcus aureus; identical to SEQ ID NO: 417656

SEQ ID NO: 417969 - DNA, 1332 bp, Staphylococcus aureus; identical to SEQ ID NO: 417657

SEQ ID NO: 417970 - DNA, 1323 bp, Staphylococcus aureus
atgtcaaatggtaaagaattacaaaaaaatataggtttcttctcagcgtttgctattgttatggggacagttattggttcaggagtattctttaaaatatcaaacgtaacagaagtaacaggaacagcaggaatggccttgtttgtatggttcctaggcggcatcattaccatttgtgcggggttaacagcagcagaacttgctgctgcaatccctgaaacaggtggcttaacgaagtatatagaatatacatacggtgatttctggggcttcctatcaggttgggcgcaatcatttatttattttccagctaacgtagcagcattgtctatcgtatttgcgacacagctaattaatttattccatttatctataggttcgttaataccaatagcaatcgcatctgcgttatctattgtgttgataaatttcctaggttcaaaagcaggcggaattttacaatcagttactttagtaattaaactgattccaatcatcgttattgtaatttttggtatttttcaatctggagatatcactttttcattaattccaactacaggtaattcaggaaatggtttctttacagcaattggtagtggtttattagcaactatgtttgcatatgatggttggattcatgtaggaaatgttgcgggggaacttaaaaatcctaaacgcgatttacctttagcgatttcagttggtatcggttgtattatggctgtgtatttattaattaacgctacattcttattaacgttgccaatagaactacttgctggtaatttaaatgcagcttcagatacatcaaaaatattatttggtgaaaatggcggtaagattattacaatcggtatattaatttctgtttatggtacgattaatggctatactatgactggtatgcgcgtaccatatgcaatggctgaaagaaaattattgccatttagccacttattcgcaaaattaacaaaatctggcgcaccatggtttggcgcaattatacaacttataatcgctatcatcatgatgtcaatgggagcatttgatacgattacaaatatgttaatctttgttatttggttgttctattgtatgtcatttgttgcggtaataattttaagaaaacgtgaaccaaatatggaacgaccatataaagtaccattatatccgatcatacctttaattgctattttggcaggatcatttgtattaattaatacactgtttacacaatttatattagcaatcattggaattctaataacagcacttggtataccagtttattactataaaaagaaacaaaaagcagcataa

SEQ ID NO: 417971 - DNA, 159 bp, Staphylococcus aureus; identical to SEQ ID NO: 411834

SEQ ID NO: 417972 - DNA, 1392 bp, Staphylococcus aureus
atggaaaagccgtcaagagaggcatttgaaggcaataataagttgttaataggaattgttctaagtgtaataacgttttggctatttgcacaatcattggttaatgttgtaccaatacttgaagatagtttcaatacagatattggaacggttaatatcgccgttagtataactgctttattttcaggaatgtttgtagtaggagcaggtggtcttgctgataaatatggcagaattaaactcacgaacattggtattatcttaaatatattaggttcattattaatcattatttcaaatattcctttattacttattataggaagattaattcaaggactttcagcagcatgtattatgcctgcaactttgtctattattaagtcatattacattgggaaagatagacaacgcgctttaagttattggtcaattggctcatggggcggctctggtgtttgttcattttttggaggtgcagttgcaacgcttttaggttggcgttggattttcatcctatcaattataatttcattaattgcactgtttcttattaaaggcacacctgaaactaaatctaaatcgatttctctaaataaatttgacattaaaggtctggttcttttagtcattatgctcctcagtttaaatattttaattactaaaggatcagaattaggtgtaacctcacttctttttatcactttattagcaattgcaattggatcttttagtttatttatagttcttgaaaagcgtgctacaaatcctttaatcgattttaaattatttaaaaataaagcttacacaggtgcaacagcttcaaactttttgttaaatggtgttgcaggaacattaatagtagccaacacatttgttcaaagaggtttaggatattcttcattgcaagcaggaagtttatcaatcacttatttagtaatggtactaattatgattcgtgttggtgaaaagttacttcaaacactcggatgcaagaaaccaatgttaattggaacaggagttcttattgtcggagaatgtctcatttcattaactttcttgccagaaatattgtatgtcatttgttgtattataggttatttattctttggtttaggactagggatatatgctacaccatcaacagatacagcaattgcaaatgcaccgttagaaaaagtaggcgttgctgcaggtatctataaaatggcttctgcattaggtggagcatttggcgtcgcattgagtggtgcagtatatgcaatcgtatcaaatatgacaaacatttatacaggtgcaatgattgcattatggttaaatgcaggtatgggaatattatcattcgttatcattttgttacttgtgcctaaacaaaacgacactcaattatga

SEQ ID NO: 417973 - DNA, 141 bp, Staphylococcus aureus; identical to SEQ ID NO: 409390

SEQ ID NO: 417974 - DNA, 2196 bp, Staphylococcus aureus
atgagagataagaaaggaccggtaaataaaagagtagattttctatcaaataaattgaataaatattcaataagaaaatttacagttggaacagcatctattttaattggctcactaatgtatttgggaactcaacaagaggcagaagcagctgaaaacaatattgagaatccaactacattaaaagataatgtccaatcaaaagaagtgaagattgaagaagtaacaaacaaagacactgcaccacagggtgtagaagctaaatctgaagtaacttcaaacaaagacacaatcgaacatgaaccatcagtaaaagctgaagatatatcaaaaaaggaggatacaccaaaagaagtagctgatgttgctgaagttcagccgaaatcgtcagtcactcataacgcagagacacctaaggttagaaaagctcgttctgttgatgaaggctcttttgatattacaagagattctaaaaatgtagttgaatctaccccaattacaattcaaggtaaagaacattttgaaggttacggaagtgttgatatacaaagcaatccagaggatctaaaggtatctgaagtcactcgtttcaataataaaagtattggaaaaaacgaattgacaggagcattacaattaaagaataaagtttcttttaaaaatgactttgagtttaacattagagtagctaataatcatcaatcggtaacaactggcgctgatggatgggggttcttatttagtaaaggtgacggtaacgaatatttacaaaagggaggtatattaggtcccaaaggaatggaaaattcagcaggatttaaaattgatacagggtataattttaaagatcccatggataaagaagagaaacaggcaggacaaggatttaaagggtatggtacgtttgtaaaaacaggtgctgatggaactacagcaaaggttggaacaaacataccaacaagaggtaaagcggataattcattccaatatgcagataattctattgatacaacagatggaaaattccatggtcaattacttaataatttaaaattagcgtacaatgaaaaatcggggataatgagagccgaatatgctggtaaaatttgggaagctaatatatcagatttgggattggataaatctgaagcatataactttttaattacttctagtcaaagacagggaacatctcaaggtgtatatgcaaatggttggatgagaacagatttaaataactcaacatttaaactaacgcctaatctagttaataaaacagaaacaaaaacagtagagataccgttcgagacaaaacgtgaatttaatccgaagttacaacctggtgaagagcgagtgaaacaagaaggacaaccaggaagtaagacaatcacaacaccaatcacagtgaacccattaacgggtgaaaaagttggcgaaggtcaaccaacagaagagatcacaaaacaaccagtagataagattgtagaattcggtggcgagaaaataccgcaaggtcataaagatatctttgatccaaacttaccaacagatcaaacggaaaaagtaccaggtaaaccaggaattaagaatccagacacaggaaaagtgatcgaagagccagtggatgatgtgattaaacacggaccaaaaacgggtacaccagaaacaaaaacagtagagataccgtttgaaacaaaacgtgaatttaatccaaaattacaacctggtgaagagcgagtgaaacaagaaggacaaccaggaagtaagacaatcacaacaccaatcacagtgaacccattaacaggtgaaaaagttggtgagggtcaaccaacagaagagatcacaaaacaaccagtagataagattgtagagtttggtggcgagaaaccaaaagatccaaaaggacctgaaaacccagagaagccgagcagaccaactcatccaagtggcccagtaaatcctgacaatccaggattatcgaaagacagagcaaaaccaaatgaaccagttcattcaatggataaaaatgataaagttaaaaaatctaaaattgctaaaaaatcagtagctaatcaagagaaaaaacgagcagaattaccaaaaacaggtgcagaaagcacacaaaaaggattgatctttagtagtataattggaattgctggattaatgttattggcacgtagaagaaaaaattaa

SEQ ID NO: 417975 - DNA, 1011 bp, Staphylococcus aureus
atgaatagagagatgttgtatttaaatagatcagatattgaacaagcgggaggtaatcattcacaagtttatgtggacgcattaacagaagcattaacagcccatgcgcacaatgattttgtacaaccgcttaagccgtatttaagacaggatcctgaaaatggacacatcgcagatcgaataattgcaatgccaagtcatatcggtggtgaacacgcaatttcaggtattaagtggataggtagtaagcacgacaatccatcgaaacgtaatatggagcgtgcaagtggtgtcattattttgaatgatccagaaacgaattatccaattgcagttatggaagcaagtttaattagtagtatgcgtactgcagcagtttcagtgattgcagctaagcatttggctaaaaaaggatttaaagacttaacaatcattggatgcgggctaatcggagacaagcaattacaaagtatgttagagcaattcgatcatattgaacgcgtgtttgtttacgatcaattctctgaagcatgtgcacgctttgttgatagatggcaacaacagcgtccggaaattaattttattgcgacagaaaatgctaaagaagcagtatcaaatggtgaagtagtcattacatgtaccgtaacggatcaaccatacattgaatatgattggttacaaaagggtgcatttattagcaacatttctatcatggatgtgcataaagaagtctttattaaagctgacaaagtcgtagtagacgactggtcacaatgtaatcgagaaaagaaaactattaaccaattggtgttagaaggtaaattcagcaaagaagcacttcatgctgaactagggcaacttgtgacaggtgacataccaggacgtgaagacgatgatgagatcatattacttaatccgatgggtatggctatcgaagatatttcaagtgcttattttatttatcaacaggcacaacaacaaaatattgggacaacattgaacctatattaa

SEQ ID NO: 417976 - DNA, 981 bp, Staphylococcus aureus
ttgattgaaaaaagtcaagcatgtcacgattcattgttagattctgtagggcaaacacctatggttcaacttcatcaactatttccgaaacatgaagtgtttgcaaagttagagtatatgaatcctggaggcagcatgaaagatcgacctgccaagtacatcattgaacatggtattaaacatggtttaatcactgagaatacacatttaattgaaagtacttctggtaatttaggcattgcgttggcaatgatagctaaaatcaagggattaaaactcacgtgtgttgttgatcctaaaatatcaccaacaaatttgaaaattattaaaagttatggtgccaatgtagaaatggttgaagaacctgatgcacatgggggttatttaatgactcgtattgcaaaggtgcaagaactgttagccactattgacgatgcatattggattaatcaatatgcgaatgagttaaattggcaatcccattatcatggtgcaggcacagagattgttgaaacaattaagcaacctatagattattttgtcgcgccagtcagcacgacaggtagcattatgggtatgagtagaaaaataaaagaagtgcatccaaacgcacaaattgttgctgttgatgcgaaagggtcagtcatttttggtgacaaacctattaatagagaattacctggtatcggtgctagtcgtgtacccgaaatattgaatagatcagaaattaatcaagtgatccatgtagatgattatcaatctgctttgggctgtcgaaaactgattgattatgaaggtatatttgccggaggttcaacaggttcgattattgcagcgattgagcagttgataacgtcaattgaagaaggtgcaacaattgtcacgattttaccagatcgaggcgatcgttacttagatttagtttattcagatacatggttagaaaaaatgaaatcaagacaaggagttaaatcagaatga

SEQ ID NO: 417977 - DNA, 993 bp, Staphylococcus aureus
atgaataaagtaattaaaatgcttgttgttacgcttgctttcctacttgttttagcaggatgtagtgggaattcaaataaacaatcatctgataacaaagataaggaaacaacttcaattaaacatgcaatgggtacaactgaaattaaagggaaaccaaagcgtgttgttacgctatatcaaggtgccactgacgtcgctgtatctttaggtgttaaacctgtaggtgctgtagaatcatggacacaaaaaccgaaattcgaatacataaaaaatgatttaaaagatactaagattgtaggtcaagaacctgcacctaacttagaggaaatctctaaattaaaaccggacttaattgtcgcgtcaaaagttagaaacgaaaaagtttacgatcaattatctaaaattgcaccaacagtttctactgatacagttttcaaattcaaagatacaactaagttaatggggaaagctttagggaaagaaaaagaagctgaagatttacttaaaaagtacgatgataaagtagctgcattccaaaaagatgcaaaagcaaagtataaagatgcatggccattgaaagcttcagttgttaacttccgtgctgatcatacaagaatttatgctggtggatatgctggtgaaatcttaaatgatttaggattcaaacgtaataaagacttacaaaaacaagttgataatagtaaagatattatccaacttacatctaaagaaagcattccattaatgaacgctgatcatatttttgtagtaaaatcagatccaaatgcgaaagatgctgcattagttaaaaagactgaaagcgaatggacttcaagtaaagagtggaaaaatttagacgcagttaaaaacaaccaagtatctgatgatttagatgaaatcacttggaacttagctggcggatataaatcatcattaaaattgattgacgatttatatgaaaagttaaatattgaaaaacaatcaaaataa

SEQ ID NO: 417978 - DNA, 996 bp, Staphylococcus aureus
atgctacttaaaccaaaataccaaatcgttattgctggtttatgtcttgcaatagtagctatcttaagtttaatgattggaaatacgcttgtgtcaccaggtacggtgatacaggcgttattcaactttgatagtgaaaacgatttacatgatgttgtcactggtgcacgggcgtcgagaacaatcattgcgttattgactggtgctgcccttgctgtctcaggtttgttgatgcaagcacttacacgaaacccaatagcctcaccagggcttttcggtgtcaatgcaggcgcagtattttttgtcatttttagtattacatttatccaaattcaatcttttaaaatgattgtagttattgcatttttaggtgccattgttgttactatattagttgttgcgctaggtatgtttagacaaacactattctcacctcaccgtgtcattttggcaggtgctgcgattgcgatgctatttacagcctttactcaaggcatacttattatgaacgaaacagacttacaaggcctattattttggttaagtggctccgtttcattacgtaatatttgggatatcccatggattattccgcttgtattgatacttattttaattgcatttagcatggctgcacacatcaacatcttgatgacaagtgacgacattgcaaccggcctcggtcaaaacataaaattaatcaaatggatgattattatgctcatcagtatgttagccggtatttcggtagccgtagctggatcaatcatctttgtgggtcttatcgtaccgaatattagcaaacgattattaccaccaaactataagtatttaattccttttactgcattagctggagcaatcctaatgatcatttcagacattgttgctcgtataataattaagccattagagttgcctatcggtgtcgttaccgctgtcattggcgctattgtcttaatctatattatgaagaaaggacgtcaacgcttatga

SEQ ID NO: 417979 - DNA, 492 bp, Staphylococcus aureus
atgaaaagaggtgctaaagccgcatgggaaagtatgagtcaaaaacagttacgcgaatttttgaaaaatcctaaaaatttaaaaaatatatgtttggatgaagttaaggattttctaggcaaaaacaaactaggaaaatttttgaaaagtatgagatatgctggtaagcttttagggccactaggagcagtagcagcagtagcaaacaatgttgtaaatgagaaatcaggacagaaaaaaattgttggatctattgttgatttaggggcaattggtggatccactgcaactggagcagcaattggagcagcaattggaggtcctgtaggtgcagttgtaggcggaatagctggaattgtagtaggtgccgcgtctgattttaaattagtaggtggcaagtcattaacggatattgctaaagataaacttaataatacggttagttctattagaagtaatggttttggtaaaactttatgtaatgtattttaa

SEQ ID NO: 417980 - DNA, 450 bp, Staphylococcus aureus
atgacagcattattcccttatatcgcttttgaaaattcaaaagaagcccttgcatattacgaagaagtatttggtgcaactgacgttaaacgtttagaagttggcgaagaacaagcgtcacattttggtatgactaaggaagaagcgcaagaagcaactatgcatgctgaatttgaagtgcttggcgtaaaagtgctatgttctgattcttttggtcgcgctgacaaaattaataatggcatatcattattaattgattatgatgttaacaataaggaagatgctgataaagttgaagcattctatgagcaaattaaagatcattcttcaattgaaatagaattaccgtttgctgaccaattctggggtggcaaaatgggcgtctttacagataaatacggtgttcgttggatgttacatggtcaagactatactgcaatccaacaataa

SEQ ID NO: 417981 - DNA, 723 bp, Staphylococcus aureus; identical to SEQ ID NO: 413380

SEQ ID NO: 417982 - DNA, 276 bp, Staphylococcus aureus
atgactaaagaaacagataataaaaaaacagtagcgacttctgacaacaaagacacacagcaacaaaatcaacctgaagaagatgaacgtcaaggtttgaatggttatcgtaaaacagatcttgatttagaaatcgagcaagagctacgtgaaatgatgaaaacaggagaaaatgaaacgaaaaatgactacaaaaagtttaaagtgttttcacttatttcaacacttgtcattgtcattttagcaattataagatttgttcataaaatgatgtaa

SEQ ID NO: 417983 - DNA, 267 bp, Staphylococcus aureus
ttggcaggtggtactggtttaccaggttcagctggtacctctggcgttggtggtgttggtgtttccggctcactcggcacttctggtgtcggtggtgttggtgtttccggctcacttggtacctctggtgttggcggtgttggtgtttccggctcactcggtacttctggtgtcggtggtgttggtgtttccggctcacttggtacttctggtgttggtggtgttggtggtgttggcggcgttgtatcttcttcaatcgtttgttga

SEQ ID NO: 417984 - DNA, 1623 bp, Staphylococcus aureus
atgaatatttctaaagtaaaatacttattattaagttttatttttgtattgatattgtctggttgtagcaaagaaggtatatactctgataaaggacaagtttttaggaaagtaataccacaagatatgagcaccttagatacagctttaataacagatgcagtttcaggtgatatatcaaatcaagtattcgaagggctttttacacttgatgaaaacgataaagcaaaattagcgttagccaaagaactgcctaaaaaaagtaatggtggtaaaactttaacttttaaattaagaaatgacgctaaatggtctaacggagacccagtgacagcaaatgattttgtatatgcatggagaaaattagttgatccaaaaacaggttctgaatatgcttacataatgtctgatattgaaaatgcagatagtataaacgctggtaagttaccagttgaaaagttaggtattaaagcattaagtaaatatgaacttgaaataaagttgaaaagacctataccatacataaatgaattgttggctttaagtaatttttatccacaaaatgaaaaagttgcgaaaaagtttggagaaaagtatggtttgaaacctcaaaatgcagtttataatgggccgtttaaggtagatacttggagagcagaagataagatacttttgtctaagaataatttctattgggataaaaagaacgtaaaattagataaagttaattataaaatattgaaagataaacaagctggtgcttcattatttgaaacaggatctgttgatgatacattaattttagccgatcaagtaaaaaaatatgagaattcaaaggctttacaaaaacgcttaacttcaggtaattttttcattaaattcaatcaaaaaaaggttaaagaatttaaaaatagaaatttacgcattgcaattgcattagcaattgataaaaaaggatatgttgaagcagttaagaatgatggttctacatttagtgacacattcacagctaaaggcgtggcaaaacttagcaatggtgatgattatgcttcaagtgtaaattcaccattaaagtatgataagaaaaaagcgttggaatattgggaaaaagcaaagaaagagttgaatataaaaaaattcacattttcaatgaatactgaagatacaccagattcaaaaatatcagcagaatatataaaggcccaaatagaaaaaaatttacctggtgtaaaaatgaaaattagacaactacctttcaaacagagattgagtgaagaatttaaaatgacatatgaatcttcattaactggatgggctgctgattatcctgatccaacaacctatttgtcaacaatgacaaaagataatcctcaaaataatactgactggggaaataaaaaatatgatgattatttaggagaaataaatggaaagttattaggggacgttagcgaaagagatagtaaaatgaaagaagatgaagagttattgttaaaagaggcacctctagctccaatttatcaaaagggagaagctcatttaaccaatcccaaagtaaaaggacttcaatatcatgtggttgggcctgatacaacattaaaatatgtatatatagaaaaatga

SEQ ID NO: 417985 - DNA, 396 bp, Staphylococcus aureus
atgttaggaaaatactggattcaattattgatagcaacagttattataagtttaatatcaattaaagcttttccattggcaattggggcattatatttacctgttattttcaaagtaataaaattacaactcaatttatcaaaaggattaatcgatgatgttaatgcgcaaacattcattaaaagtaatcaatcaggtattgtaataagtgtaatttgttgtttattaataacaggaatattgtattatacacttgatgggttttatgcgagtttaacaggagttttaggtacgcttgttgctctaaatccatatacgacaattgttagtgctgtattatatatacttacagctattgctacggttgaagctactaaaacaaagtatcgtaattaa

SEQ ID NO: 417986 - DNA, 984 bp, Staphylococcus aureus; identical to SEQ ID NO: 417714

SEQ ID NO: 417987 - DNA, 435 bp, Staphylococcus aureus
gtggcagagggaacggttaaatcaataggacttcgttcaacacgaatcaatacaatttcaggagaattaacaattttaccaaatagtagtatgggtgaaataacgaactactcaattacaaatggtacagctatcgttaaaattccagtgtctgtcgaagaaaacattgataatgttgataaaaaactaaacaaactatttacttctttacgtagtaaatattacttatttgttagtgatccggttgttattggtattgatgctattgaagatacaagagtaatattgagaatatctgcagaaacaattccaggtgaaggatttgctggagctcgaattattcgcaaagaagtacaaaaaatgtttttacaagaaggtattaaaacacctcaaccaattatgactgcttataatcatagtgaaaacggtgtttag

SEQ ID NO: 417988 - DNA, 204 bp, Staphylococcus aureus; identical to SEQ ID NO: 412067

SEQ ID NO: 417989 - DNA, 744 bp, Staphylococcus aureus; identical to SEQ ID NO: 413989

SEQ ID NO: 417990 - DNA, 498 bp, Staphylococcus aureus
atgattattaaccttgaaacacaacaaatacattttgatttagaacatgaaattccctattttcaatcacctgagaaaaataggatacgcttagatattgatgttctcaataaaaagcaaatttctaatattattaatgttatatttaataaccaatcaaagacgaaatgtacatttttgtctgaatacttatatcctgttaaatttagagaaaaaacaagaattggtcgtttttttaatattactaactggtacgaagaaatccattctaccgatgagaagtatgttattgcaactattaaaaatataaaaaacaaagacttaattgattattctttatatattaaaaaaggtttagtggagccatttattgtattctataatcaagaaaatatattctacattagcaatgctgttatagatatcatcagtgtatccaaagatactcttgattatataaagtcagaattcaatgatcactgtgcttcgccatactga

SEQ ID NO: 417991 - DNA, 279 bp, Staphylococcus aureus; identical to SEQ ID NO: 416206

SEQ ID NO: 417992 - DNA, 513 bp, Staphylococcus aureus
atgacgaatacaaagtcgctttgcccttgggtcatgcgttggttcaattcttgggccaatccttcggaagatagcatctttccttgtatttctaatgtaatgactgtggattgtggtttgattttggctagtattcgttggccttctttttcttttacttgctcgatttctttgtcgctcatattttctggtgctttttcgtctggaacttctatgatgtctatcttggtgtatgggcctaaacgtttttcatattctgctatggcttgcttccaatatttctcttttagtttccctacagctaaaatggtgattttcatgtcgtttggtcctccaaattgttatcaactttccagttatccacaagttattaacttgttcacactgttccctcttattataccaagtttttttgtagtttttgatatttttctgacattcatgcccaattttcagtgtataacttgtgtatttgtggataactctgtgggcattgtgggtatttctctttaa

SEQ ID NO: 417993 - DNA, 249 bp, Staphylococcus aureus
atgatgatgaccaaacgagcaaagttaacttcgtgtcgctcgctaccttttccgaagaagcgttgcttaatgtcgattgaaatacaagcagatatagaatttaaactagatgaaatggtagactgtgcagcggcgaaaatggctgcaataagtaatcctgctacaaatggtggcatctcagtcaaaatgaaatatggcactacagatgatgtattgaagccttttggtaaaacagcttcatgtgtataa

SEQ ID NO: 417994 - DNA, 318 bp, Staphylococcus aureus; identical to SEQ ID NO: 413647

SEQ ID NO: 417995 - DNA, 288 bp, Staphylococcus aureus
atggaaaaggggattttcaattacgataatgcgaatgtattaaaattagatactaatcagttaaatgaaaacataaaagtcattgacgatatatttaaaaattatgagcagatagagccaactatagaagtcgaaaatggaaatacaaaattaaaattaaatggacattttattgcgtcaattataagcccattaaatttaaataaacttaataatttatatgttgaagaagaattttatcatacatataacgaattaattgttaaatatactgaggtaaaggaataa

SEQ ID NO: 417996 - DNA, 240 bp, Staphylococcus aureus
ttgaaagaagagaaaattaaaaaggaagagaagaaaataattttagaatacatggctgtaaaaaaagctgttataagatttttgaaatctgatgaagaaaagttggaaaataattccattagtacattaatatctgaaacatttaatttgtcagaaatgaattgtttatcagagaatactaaatatgccattgctatatcggcttattgcgatattttagaggagattgcatatgaataa

SEQ ID NO: 417997 - DNA, 222 bp, Staphylococcus aureus
atgccaaatgaaaaagttggtttagctacaggattatataaaatgagtggcacactaggtggcgcctttggtatagcaataagtactacagttttcagtatgttacaactaaactatacgcctagtgtagctgcaaccgtaacatttatagtcagcattgtattgatgatccttggctcattgtctgcatacatgatcattccaaaaacagttaaatcttaa

SEQ ID NO: 417998 - DNA, 570 bp, Staphylococcus aureus
atgaatacaaaatttttaggtaaaacattagtagcaagtgctttagtattaacaacattaggaacagttttacattcttcatacttaggattaaatacaaataaagttgttaaaacagcaaaagcagaagaaaatatgacaaatggtcaattgtggaaaaaagttaaagattcattaattgattcaaatattattagtggtaacgagtatgaatctgtaaaagtgtcttatgttcgtacagacggtcaatctagtaatgtagaatctactgctaatcatgatgatgtaaccagcactccaagtaatttttcaaaattaactcaaattgatatatctaagcaaaacattgatggtagcgatttcaatacaaagttagatgcaaatgctacttggaaaagtttaacaaaaaaattagaagaacaaggattgttaaaaactggtgataaagtgacgattcatagtaaggattctaatgatccaaaaatcactggtacagttggtcaagactttactgatcataaaggttttaacttaaataaaagagacatcaacaaaatcacaattgaataa

SEQ ID NO: 417999 - DNA, 498 bp, Staphylococcus aureus
atgcccgaacgaaatcataagacggatgcaggttatgacatattctcagctgaaactgtcgtacttgagccacaagaaaaggcagtgattaaaacagatgtagctgtaagcataccagagggctatgtcgggctattaactagccgtagtggtgtaagtagtaaaacacatttagtgattgaaacaggcaagatagacgccggatatcacggcaatttagggattaatattaagaatgatgaagaacgtgatggaataccctttttatatgatgatatagacgctgaattagaagatggattaataagcattttagatataaaaggtaactatgtacaagatggaagaggcataagaagaatttaccaaatcaacaaaggcgacaaactagcacaactggttatcgtgcctatatggacacctgaactaaagcaagtggaggaattcgagagtgtttcagaacgtggagcaaaaggcttcggaagtagcggagtgtaa

SEQ ID NO: 418000 - DNA, 192 bp, Staphylococcus aureus; identical to SEQ ID NO: 417725

SEQ ID NO: 418001 - DNA, 492 bp, Staphylococcus aureus
atgattcgatgtgctaaaaaagaagatttaaacgctatattagcgatatacaacgatgccattattaatacaacagctgtttatacttataaaccgcaaaccatagacgaacgtatcgcatggtttgaaacgaaacaacgtaatcatgagcctatctttgtatttgaggaaaatggaagtgtattaggatttgcgacgttcggttcgtttagaccttggccagcatatcaatatactatcgagcattctatttatgtcgatgcttcagctagaggaaaaggtatcgctagtcaattattacagcgtttaattgtagaggcaaaagctaaaggttatcgtacacttgttgctggtattgatgcttctaatgaagcgagtattaaattacatcaaaagtttgctttcaagcatgccggcacactgaccaatgtaggttttaaatttaatcaatggttagatttagcattttacgaattagatttacaagactag

SEQ ID NO: 418002 - DNA, 306 bp, Staphylococcus aureus
atgttaacaattacagacattatgaattatttatttgaaatcattgatccttacagtgtgaatcaacaaggaaatgatattggacaaaagtatcgaacgggtttatatagttgtgtagatgaccacttaattgaagcgcgtcagttcattgaacgacgtaaagacagagatcaaattgcagtggaagtcttaccgctgtctaactacattaaaagtgctgaagaacatcagcaacatttagaaaaatatccagaagatatgcatatgtgtcatatttcaaaagatttgctaaataaatacaagtga

SEQ ID NO: 418003 - DNA, 306 bp, Staphylococcus aureus
atgttaacaattacagacatcatgaattatttatttgaaattattgatccatacagtgtgaatcgacaaggaaatgatattggagaaaagtatcgaacgggtttatatagttgtgtagatgaccacttaattgaagctcgtcagttcattgaacgacgtaaagacagaaatcaaattgcagtggaagtcttaccgctgtctaattacattaaaagtgctgaagaacatcagcaacatttagaaaaatatccagaagatatgcatatgtgtcatatttcaaaagatttgctaaataaatacaagtga

SEQ ID NO: 418004 - DNA, 195 bp, Staphylococcus aureus; identical to SEQ ID NO: 410129

SEQ ID NO: 418005 - DNA, 195 bp, Staphylococcus aureus
atgttatttgtcattttagttttatatgtcattggcattgcatttattctactaagtgtttttggttctaagacggaaggtttatctacgaaacatactttatatacaattggtagtgccattataacgattgctattttcatttcaattggctatgctattcaatacttaactgcagcgctttatggtttgtaa

SEQ ID NO: 418006 - DNA, 378 bp, Staphylococcus aureus
atgattcaatcaatgtggtttaatttgcatgtgcaagatttagaaaagagcgcacagttttataaagcgttaggatttaaaataaatagaaacccacaaatgttagataaaatggtcggcattcaaataggtcaaacaaccgtaattttaatagaaaacaagcattttcaaaatgtaagtcagcaaagccttaatactgaaccaaatgaagtgatgatttctctaggtgtgaacacaaatgaagaagttgaccagttggtgaataaagtgaaagaagcgggtggcgcagtcgttcaagaaccaacagtaagccaagggttttatggtgcaatgttcaaagatcttgatggacaccattttaattttttagtctgctaa

SEQ ID NO: 418007 - DNA, 180 bp, Staphylococcus aureus
atgactccgctgggacgtttaggtaaaccagaagaagtaggcaagctcgttgtctttttagcatctgatgacagttcatttattactggtgaaacaattcgcattgacggtggtgttatggcttacacatggcctggcgagatgttgagtgatgattcgtggaagcggacattggaataa

SEQ ID NO: 418008 - DNA, 180 bp, Staphylococcus aureus
atgactccgctgggacgtttaggtaaaccagaagaagttgctaaattagtagtcttcttagcatctgacgacagttcattcataactggagagacgattcgaattgatggtggtgtgatggcttacacatggcctggcgagatgttaagtgatgattcgtggaagcagacattggaataa

SEQ ID NO: 418009 - DNA, 192 bp, Staphylococcus aureus; identical to SEQ ID NO: 417725

SEQ ID NO: 418010 - DNA, 504 bp, Staphylococcus aureus; identical to SEQ ID NO: 408628

SEQ ID NO: 418011 - DNA, 735 bp, Staphylococcus aureus; identical to SEQ ID NO: 408719

SEQ ID NO: 418012 - DNA, 774 bp, Staphylococcus aureus; identical to SEQ ID NO: 408605

SEQ ID NO: 418013 - DNA, 252 bp, Staphylococcus aureus
atgtgtataagagacagacttaaaggtaaacaggtattagtttattcaggattatttaaagaggctaaaaagaaattgaaaaatggggatttagattatttaaaagaaattgatccaaccgaatatatctatcaaattttttatatttggaaacaaaaagagtatttaactagtgaactttatgacttaacagaacaagaaaaaagagaaattaatcacaaaatgatagacgaaatcgaggaagaacaataa

SEQ ID NO: 418014 - DNA, 306 bp, Staphylococcus aureus
atgaaatatacagacaaaatctatcataaagtatctgacttttcttattcaaagttaaaaaaagataacacttataaaattctaggccaagattacaaagtcatcgaaaaacgcgacgacacccaaaatggattgagagcatatgttttcgctccagtaatcaaaggaaaagttgataccagtcaacttttaataggttatgctggcactgacccatttagtcttaatgatattcgtactgatttacaacttcccattcatcataacacaaataatctaaaaattaataatcattataaaaattaa

SEQ ID NO: 418015 - DNA, 276 bp, Staphylococcus aureus
ttgaaccatgacgaaatcgtaaaagcgagtgaattaacaaaagcggctggggcggacttcgttaaaacttcaacaggttttgcaggtggcggtgcgactgcagaagacgttaaattaatgaaagatacagtaggtgcagatgtagaagtaaaagcatcaggtggcgtacgtaatttagaagatttcaataaaatggttgaagcaggtgcgacacgtattggtgcgagcgcaggcgttcaaattatgcaaggtttagaagcagattcagattactaa

SEQ ID NO: 418016 - DNA, 459 bp, Staphylococcus aureus; identical to SEQ ID NO: 416962

SEQ ID NO: 418017 - DNA, 315 bp, Staphylococcus aureus; identical to SEQ ID NO: 416965

SEQ ID NO: 418018 - DNA, 576 bp, Staphylococcus aureus
atgttgggtattgatataaacacaaaaacgagaactaaacttatacaaaatattttaaatcaatttaatttaaaattagttgataaagaaattacagcggatgttaaaaatgagagttttgctcagtctaaacataatttaattcaaggcatattgaaaatttatgaccttactttaactactaaatctaacgttacaaacatattctatgaagaagtatttgaattcttatatgaccaagaaataagaggtttagcacaagtttctgtttctggagaatcaggtttaaaatattctattgattatattgtttctgaaacaaaatcacaaccagaaaaactagttaactttacaaacaacttaaatttcaacaaaataactaatgaagcttatatttaccgtgatatcaaaccaaacagaccatccagaaacaaattagaacctatcatgttgataattgtaaatgatgtagatcatccgataaatgaaagagcacaaactgtagcagaacatgaaaaccttgagatattaaaatggtctaataaatcaaaaatcattgaaactttaacctcataa

SEQ ID NO: 418019 - DNA, 426 bp, Staphylococcus aureus
gtgggaaaggtatatacaattgcttatgtagatgatgaaggtggagaggtcgtttttaattatactaaaccaggtagcgatgaattgaattattacacatatatccctagagagtataatgtctctgaaaaagtattttatgatttgtggacggatttatatagattgtttaagaagttaagaaatgcatttaaagaagaaggacttgacccatggacatcatgtgaatttgattttacaagcgaaggtaaattatacgtatctttcgactatatagattggattaaattaggttttggcccatcaggaaaggaaaactattatatgtataaaaagtttggtgttttaccagaaatggaatacgaaatggaagaaattaaagaaatcgagcaatatattaaagagcaagatgaagctgaactatag

SEQ ID NO: 418020 - DNA, 357 bp, Staphylococcus aureus
atgagcgacaatattgtagctatttatggagatgtgcctgaattggttgaaaaacaaagtgcagaaatcatatcacaatttttgaaaagtgatagagatgactttaactttgtgaaatataatttatacgaaacagagattgcaccaattgttgaagaaacattaacattgcctttcttttcagataaaaaagcaattttggttaaaaatgcatatatatttacaggtgaaaaatcaccaaaagatatggctcacaatgtagatcaattaatagaatttattgaaaaatatgatggcgaaaatttgattgtctttgagatatatcaaaataaacttgatgaaagaaaaaagaattga

SEQ ID NO: 418021 - DNA, 519 bp, Staphylococcus aureus
ttgaactttaatcaagccacagaaaaaacccaaaaaagatttattagcgttgcaaaacactatgtggaacgtattaataacgataatttaaaacaagattttcaatcagcaatccaacaagaattagaagatgtgaaatcacaaacacaaaatctagttaaagagtttcaaaatcatcaatcagacctacaaaaagcacatgatgactataaaaaaacgcttgatgagcgcatcgcaacgaacgaaacgtcaataaaacaatatgatcaagcgttcaatcgtttaactaaagggattacagcgatgtttttcatcgttgccttagtaatgattacttttgtagtcttaagtccattaggcgacttattaggcgtacaacatttttatgactggattaaccacgtcttaaaaacaggtcattcaccatggcgatatctgatcgtgatgttttattttgtgccttacatcttatttagtttactcatatatgccatttttaaggcgtatgagcgactttaa

SEQ ID NO: 418022 - DNA, 1008 bp, Staphylococcus aureus
atggcaacaactaaattaagtgcgacgaaatcaacgtcacgtgccatcaattacgctgaaaagcgggctgaagaaaaaagtggcttaaactgcgacatagactatgccaaaagtagttttaaagccacacgtgaactctatggtaaaacagggggtaatgaaggccatgtcattattcagtcattcaaaccaggcgaagtaaccccagaacaatgtaatcaactaggcttagcattagctgaaaaattcgcaaccaatcatcaagtggctgtttatacgcattgtgatactgatcacatacataatcatattgtgattaatgccgttaatcttgaaacaggtaaaaagttcaataacaacaagcaagccttacatgatttaagaaactttaatgacgacgtatgtcgtgaacatggcttaagcgtgccagaaaaagatacagcacgcttacgttatacacaaacagaaaaagcgattgctgaccctaatacaaaatcaaccgctcaatattcatggaaagatgacatacgtgaagcaatcgaccaatcaacagctacaaatatggacgaatttaaagaccatttaagtcaatatggcattgaaattgcacgagttacacctaagagcattacctatcgacatctagctgaagataaaaaagtccgtggccgtcgattaggtgaagattataacaaagggggcatagaagatggctttgaaagacaaatacaacgacaacagcaagcacgagaagatgacaacgacatccagccaaaacgaccaacttcaaaccgtgatgaaccaactcaacgagatacaggcgtcactcaatcagattgggataaattcgcccaagacacaaatgagcttgagcgtcgccgacaagctgcagagtcagcaagacttgctgatgaaaaggctcgaagagatcgagaagagagagaacgagcggaacaagcgtcacgaacaattattgacaacgatagagactatggccttgaactttaa

SEQ ID NO: 418023 - DNA, 384 bp, Staphylococcus aureus
atgagcgaacaaaatcattttgtggctagcgacgaaactgttgggcaaaaccataaacccaaccgtaaggagccgaaacaaattagttttcgtgtgagcgaatccgaatatttaaagttaaagcagtcggctgaaactttaaatatgagtgtgcctgctttcgttaagaaaaaggcacaaggcagtcgattggtcgcacctaaatttgataaagaaacgcgacaatcgattgcgaaagatttaagtcgattaggggcgaatgctaatcaaattgcgaaatattgtcatcaacatcaatatgacgcaccaaattatagcgcattagaacgtaatatcagtgaattacgtgaaaggttggatgacatatggcaacaactaaattaa

SEQ ID NO: 418024 - DNA, 543 bp, Staphylococcus aureus
atgaaatacggttatattagacccgttacaataaacgacgatttaaatgaacaaaaaaagaaaatagaaactcatacaaatgaaattgttgaagaaattcatgctaataataagaagaggaatatattagatgttcttttaaatgaaaaattagtttctggagatatgttatacgttacggatttatgtattcttgcagattctacgaaacatttagtagatatattagattatctttctcaggaggatatatctttatatgttattaatttaaatcgttatatttataaagacatcaaaggtgaatttatagaaatattacatgatatcacagacttccaaagtgacattgtcaaatttagaactcgtttaggtttagaaaattatgcaaaagaaggaaaaaacttaggaagacccaaaagaaacgacaaaaatcttagtgatgctattgaaatgtatatgagtaaaaaatacactttagatgagataaaagaacagacaaatataagtagagcaactttgtatcgtcatctagataaataa

SEQ ID NO: 418025 - DNA, 1452 bp, Staphylococcus aureus
atggttgaaaaattaaaaaatgaatggcttaaccagccaggcaaaaatatacttgcaggtattgtagttgccttagctttaatccctgaagctatcgcattctccatcattgctggtgtagatcctatggttggtttatatacttcgttcattattgctgtcgtcactgctattgtaggtggtagagcggcgatgatatcaggtgcaacaggggctattgccttattaattgtgccacttgtgaaagattacggtgtagagtatcttctagctgctactatactgatggggttaattcaattaattttaggacttcttaaagtaggtcgtctaatgaaatttatacctcgttctgtcatgataggttttgtgaatgctctaggaatcatgatttttatgtctcaaatagaacatatctttgggatatcaatttcaacttatatatatgtaattgtaacgttactcatcgtatatataattccaagattttttaaagctatacctgcaccattaatagctattatcgtattgactgccctttatatgtatacaggttctgacgttagaactgtgggagatttaggtaatatcaaacaagctttccctcactttttaatccctaatgttccctttaatttagaaactcttcaaattattttcccttactctttatctatggctattgtaggtttagttgagagcttacttacagctaaaattgtagacgatgctacagacacttatagtagtaaaaatagagagtcctgtggtcaaggtatcgctaacatgattaccggattattcggtggcatgggaggttgtgccatgattggtcaatccgtcatcaatgttaaatcaggtgcaaacagtagattgtctacatttacagcgggtattgtacttatatttatgattattgtacttggaggacttgtagttcaagttccaatgccaattttagcaggtattatggttatggtttctgttggtacatttgattggaattcctttaaatatattaagaaagcaccaaaaacggatgcagtcgttatgcttattacagtgattattgttttaatgacgcataatttagctttaggtgttgttgcaggcgttgttttcagtgctttattctttgctactaaaatttcaaaagtagaagttatttctgaagagttcggtaaaataaaccgattatcttttaaaggacaaatcttttttgtttctattgattctatgatggagcaaataaactttgagattgaaaatagtaccatagaattaaacttcaataatgcacacttatgggatgattctgcagtagatgcaattgacacgatagtacgaaaattcgaagaaaaaaataatattgttcgtgtagaaaaattaaattcagatagtcgtaaagttgtttcagagttaagccaactaaatgaaaatcatttaaactaa

SEQ ID NO: 418026 - DNA, 414 bp, Staphylococcus aureus
atgtataaatcaattttattagcagcagatggatcagagaatagtttgcgttcagcaaaagaggttttaaattttatagatgataatacgattgttactattcttacagttgtagatgttgaggaatcgaaaacagatgttttacatggtaaacaaagttccagtttgacgaatgaaagagaagacaaactctctcatatcactgagttatttgtagagcataatgtaaaatatgaaatgaaaattgcacatggtgttcctgcggacacagttgtttcagttgccaatagtggagaatttcaagctattgttttaggaacacgtggattaaatagtttgcaagaaatggtgttaggtagcgtcagtcacaaagtagcaaaacgttcagaaattcccgttgttattgtaaaatag

SEQ ID NO: 418027 - DNA, 444 bp, Staphylococcus aureus
atgaaaaccaaaaatttctattatggttgggttattgtatttattgctggtttgacagttttcttctctggtcctggccaaacttattcaaacgcagcatttattgatgaatatattcaaacatttggatggagccgtacagaagtttcctcaatatattctttagctattctatttggaatcatatggggaattgcgaacggtctagaaagaattggaaccaatattgtttgggctaactactttggacgtaagcatgtagggagtataaatggaattgaatcaactatgctagtgattggttcctctttaggagcattaccattaggcctaggtcatgatattttccaatcctattcattaactatttatatgatgattattttccccattattggtttagtttgtgcattattggctaaaaagccagttaaaaattattaa

SEQ ID NO: 418028 - DNA, 165 bp, Staphylococcus aureus
atgaagttttgcaaaggaatatgtattctaatattattggttttttgtgatttgttgatttttaaacggtcgaaagtatggggagtagagcatgaatcgagtaataatcaaattcgaataataaaagaagaagactatacagatatggttattaaccaatactaa

SEQ ID NO: 418029 - DNA, 438 bp, Staphylococcus aureus
atgtttaggttattaaaacaatataaacacacaggatatttcaaaattcaaattgaggattttagagaacgattagatattcctaatagctaccgtatgacgcatatcaatcaaaaagttttagcccctatcattaaagagttaggctttatttttaataatctacatatcaataaaatcaaagcgaaaaaaggacgtaaaatagaatggttagagtttacttttgatgctgaaaaacgcattcatagtaagcgacaacctaaaatggcaaatgtagcccaacctaaacaatatatcagtcgtgagaaaacgccaaaatggctacatgaacgaaatcaaagtaatacaactagagaaatgaccgaagaagaaaaagcactattaaaagaacaacaacaagcatttagacaacaattagaactagattgggaagattag

SEQ ID NO: 418030 - DNA, 738 bp, Staphylococcus aureus
atgaagagcgttaaagaaataagtgaagaattggaagttagtaaacagactgtatttaataatataaaaagattgaatatagaaacagtaaaacaggataatacttcattcattaaaaatgatgttgatgtagaaaaaatcattcaaagagtaatcagaaataaaaagaaatatggctttgaaagtactaatataagttcagagaaagttaaaacagataataaaaaaaacgaatctaaatatgatgttcaaataattgaactactcgaaaagcaaatagatactttaaataaacaacttgaaaaacaagaaaaacgtcatgaaacgacaatagaattttatagaaaagaattacaagaaaggtcgaaattacttgaaaaccaacaagtattagcattagaaagtaataaaaagattcaaaaactagaaagccaattagaagaagaaagacagcttaattattcttttgatacagcgacgaataatagacaaaatattgatccgcaagaagcaacttttactgaagaatcacaaaatatcaatcaacaacaaacaaagtgtcaaccaacagaagtaaattacaaggatatagccgaagagaaagagaatgacagtacaaatgaaggtgaattaataaaagaagataagttcgttgaagaaacgaagagtgatcctgacgataataaggaggtagaaccacctaaaaaaggattttggagtcgattcttcggtaattaa

SEQ ID NO: 418031 - DNA, 957 bp, Staphylococcus aureus
atgtctcgtaaaaatattaaaaatcaagcaagtcaaaacttttatatgctacataaagcattatttgttaatgaaaaatataaaaaattaagtgatagtgccaaagttacttatgcaattctcaacgatagagttagcttgtcgattaaaaataattgggtcgatgataatggggatatatatttcatttttacaaatgaaagtctccagaatatattagacaaaagcaagaatacaattactaaaataaaaaaagaacttcaagcagtagggttacttgaacaaatacgtacaggatttaataaacctaataaattatatttgcatgatatagaaactaatattagtgtagaaaaaagtattcaatcctcatctataacctacaatgacaaggagtcccaaaatttgggactccagaatcccgaaatttgggactccagaaactcaaaatttgggactccagaatcccaaattttagaccctaatgatactgattataatgatactgattatattaagactgagagtaatgatacggatgatttgaatgataagaaattaacatatcctaataatcatacaaatcattcaaatcacgacaattcaaactttaataatgaggctttaaaattccaattactcgaagaactaccgcaaagtattcaaaactatctaagtaactttgaagtaactgaaattgaaattattaaaactgtattattaaaagccaaaacatctttcaacaatacgattgatagttattacttgttagaagatatggaaatcgaaatacttcatgttcttaaacgtttcaaagctatacttattcaaaaaaatgaaaccgttgaagccatgcaaggatacttaatgaaatctcttaaatctgaattcgctgaaatgcatacgcttaataaacgacgtgatcatttaccaatcacttctttatttaatcaataa

SEQ ID NO: 418032 - DNA, 351 bp, Staphylococcus aureus
atgaactataaaatcgaaattttagatgattgtaatgtgatctatgttagaaataaaggtaagtatggtagtaataagaattatgaaatgatgaagaattttaaagagtggattaaagaaaattgttattggagatatgttgaaactaacggaatattaggtgtagcattagatgatccgcaaattgtcgaagaagaatcatgtagatatgatttagttttaaaaatagacgaagatgtaaagataaatgattttataaattctcgaagttttacgggaggaaaatatgttgtttttgcattaccacatacaacaaaagacgtgaaagacttcggttctgttgcaaagtaa

SEQ ID NO: 418033 - DNA, 456 bp, Staphylococcus aureus
atgaacatcagattatcaaacaaagaaattgaagcaatacttaataaatttttagaatatgtagtaccttttgaactacctagtccgcaaaaacttcagaaagtatttaagaaagttaaaaaaataaaaatacctcaatttgaagaatatgatttgaaggtaagttcatttgtaggatggaatgaacttgcatcaaatcggaaatatataatatattacgatgaaaaaaaacaattaaaaggactttatggagaaatttctaatcaggttgtaaaggggttctgcacaatttgtaataaagaatctaatgtttcattattcatgaaaaagtcaaaaaccaattcggatggtcaatatgtaaaaaaaggtgactatatatgtcgagatagcattcattgtaataaacaattaacagatattaatcagttttataattttattgataaactagattaa

SEQ ID NO: 418034 - DNA, 1014 bp, Staphylococcus aureus
ttgaatcaaaataaattaatattaaaagcttatgaagaagttgaaaatagattgggacacatgccgttactaatggattttatacaacaacattctatagatccaagcgttatattttctaaatttagtaattattacgagtttttagtaaggtataaaaaaatagatgctttattgacggaaaatgaatctaaaaatctggttttcttttcaaggcaaatagcacctggattgaaaagaatcgatagtttagttttagaagaacttttaaaaaatgaattaacatatgatgaattaaaaaataaaatgctgaacgaagttaaggatataacagaaaatgatatagatacttcattaagaattttagatttctcattttacaacgcaggaattgaaaaaatctatggaagtcccattatagaacgtaatgaaagaatgataagactaagcgatgcatttactaatgctctaagtaatcaaacatttaaaatatttttagaagatcttattgaattatcaaagtataacaatgaaaaataccaaaaaggtaaaaatggactgattttatataataaatattcaagagaagattttagcaaaatatttaattggaataaaaatggttcgtctgtaatcatgggatacatgataagaagccaagaaatgccaatatttatcacttatgataagcatgaagatataagtgatagcacaaaatatgaagatgaatttttaagtcaagatgaattaaaatggtttactaaatctaatagaacgctaaaaacaaaagaagttcagaaaattttgtcccatagagcaaaaggaattaaaatgtatatttttgtacagaaaaaagatgatgatggtatatatttttattatttaggaactgctggatatatagaaggttcagagaagcaagataaaatgctgaatggttcaaacgtagtaacgatggatttagcactcgataaagctgtaagagatgatatatatcgctatctaacaaattaa

SEQ ID NO: 418035 - DNA, 204 bp, Staphylococcus aureus
atgaatcagctgagaattttattacatgacggtagtagtttgatattacatgaagatgaattatttaacgaaatagtatttgttttggatgattttagaaatgatgatgactatttaacgatagaaaaagattatggcagagaacttgtattgaacaaaggttatatagttgggattaatgttgaggaggcagacgatgactaa

SEQ ID NO: 418036 - DNA, 783 bp, Staphylococcus aureus
ttgagcaaagactttaaagagaaaatagataaagatgtcatttcttacatcgaaaagaatgaaagtagatttaaaggtgcgaaaggtgataaaggcgaaccgggacaacctggtgcaaaaggtgaagcaggtaaaaaaggagaacaaggcgtacccggtaaaaacggtactgtagtatcaatcaatcctgacactaaaatgtggcaaattgatggtaaagatacaaatatcaaagcagaacctgagttattggacaaaatcaatatcgcaaatgttgaagggttagaagataaattgcaagaagttgaaaaaaacaaagaggcaactctcaaagactctaaaacgtatacagattcaaaaattgctgaactagttgatagcgcgcctgaatctatgaatacactaagagaattagcagaagcaatacaaaacaactctatttcagaaagtgtattgcaacagattggctcaaaagttagtacagaagattttgagaggttcaaacaaacattaaacagtttgtatgcagataaaaatcatagtcatacaatcaaacagattgaaggattagaaaatgctttatcaagaaaatcagacataaatcataatcatgacgagaggtatgttttgtcgtctcaagcttttactaaacaacaagcggataatttatatcaactaaaaggcgcatctcaaccgacggttaaaatttggacaggaacagaaaatgaatataactatatatatcaaaaagacccgaatacgttatatttaattaaagggtga

SEQ ID NO: 418037 - DNA, 294 bp, Staphylococcus aureus
atgattcattcaaaaaggttaaaattgtgtctatgcctgataatactatctgtttttataggcgcttgcggaatgaaaaaagaagaaagtagtaaagataaacaaattaaagaaaacttcaacaaaacgttgagcctgtatccaactaaaaatcttgaagacttttatgataaggaaggctttcgagatcaagagtttgaaaagggcgacaaaggcaattggattgttgattctgagatggtaattgagctgaaggataaaaaatggaatctagaagtatggtgctctatataa

SEQ ID NO: 418038 - DNA, 366 bp, Staphylococcus aureus; identical to SEQ ID NO: 417038

SEQ ID NO: 418039 - DNA, 555 bp, Staphylococcus aureus
ttgattgttgacttagcaaataactggctaacattactccttccaatgatgaattggttaatcccaaaaaaatacgtaaagattagtaaggaagaatttgatgtcttaaacattgttaaacctactaaaaatagagctttttggccagctgcaggtggctcaattttatttggagttacgttcagaaagtatactcatttgctcgatatccaactagaaaaaagtttagttattaccatatgttttataacattcttaagtattttaatcttttttatgaaattaaatcaaaaattaaaattaaaagtttttaataaaaataaagaacataaagaaaaaattatgctactacctactttcaaacatttttgttttgtactattttcttatttattttcgggatttttttcaataatgagtctatgcatgttaataactttagattcccagaatataatagtatttattgcttggattataatgacaatgcttttctttctagtgaatatggcttcgataggtaacaaaaatgttcatgtcatatttaaaaaataa

SEQ ID NO: 418040 - DNA, 555 bp, Staphylococcus aureus; identical to SEQ ID NO: 414649

SEQ ID NO: 418041 - DNA, 900 bp, Staphylococcus aureus; identical to SEQ ID NO: 406993

SEQ ID NO: 418042 - DNA, 126 bp, Staphylococcus aureus
atgcaatttcataatcaaagagagcgaaaaagtagaacgaatgatgatattgaccatgagcgaacacgtgaaaattatgatttgaaaaatgataaaaatattgattacaacgaacgtgtcaaataa

SEQ ID NO: 418043 - DNA, 1335 bp, Staphylococcus aureus; identical to SEQ ID NO: 408108

SEQ ID NO: 418044 - DNA, 1173 bp, Staphylococcus aureus
atgaaaatagcaactctgaacaaaggcaaagaaacaaaatattttaatggatatcctttaattgaagaagaggatatctattcacaagatcatttaaaagaaggagatatttttcaaattgtgactgataaatcacaatatgttgcaacggcttatgttggtcgccaacataaaggattaggttgggttctaacatacgataaagctcaagaaatcaacacagctttctttgtgaaattgtttaatactgcattagcagaacgtgaatattattttaatatagatggaacaaatgcttttagattatttaatgctgaaggtgatggtgttgggggattaacaatcgacaattatgatggtcatttgttgattcaatggtactcaaaaggtatttataaatttaaatatgccattcttgaagcggttagaaaagtatttgattataaatctatttacgaaaaagtaagatttaaagacagcgaatatagtggtggttttgttgaaggagatgcacctgagtttccaattgttatcgaagaaaacttcacattttataatgtagaccttgaagatggtttgatgacaggtatctttttagatcaaaaagaagtgcgcaagaaattaagggatcaatatgccaaagaacgccatgttttaaacttatttagttatacaggtgctttttctgtaatagcagcaagtgaggcatcttcaacaacaagtgtagatttggctaatcgttctcgtagtttaactgaagaaaattttggattaaatgctattgatcctaaatcccaatatatttatgtcatggacacttttgatttctataaatatgctgcacgacatggacatagttatgacacgatcgtgattgatccacctagctttgcacgcaacaaaaaacgtacattttcagtgcaaaaagattatgacaaattaattaatggcgccttaaatattttatcatctgaaggaacattattgttatgtacaaacgcaagtgtatatccattaaagcaatttaaaaatactattaaaaagacgcttgaagagagtggcgttgattatgaattaactgaagttatgggattaccaaaagattttaaaacgcatccacattataagccatctaaatatttaaaagctgtttttgtaaatattagacattaa

SEQ ID NO: 418045 - DNA, 501 bp, Staphylococcus aureus
atgactttcgaagaaaaactaagtcaaaagtacaacgagattgcgaataagattagcagcatgataccggtagagtgggaaaaggtatatgcaatggcatatatagatgatggaggaggagaagtgttctactattacacagaacctggaagtaatgaattatactactatactagtgtattaaataaatatgatatatcggaatcggaatttatggattcagtgtatgagttgtataaacaatttcaagatttaaggaatttatttaaagaagaaggacatgaaccatggacatcatgcgaatttgactttacaagagaaggtgaattaaaagtttcatttgattatattgattggataaattcagaatttggtcaagtaggtcgacaaaattactataagtatagaaaatttggaattttaccagaaacggaatatgaaattaataaagttaaagaaatcgagcaatatattaaagagcaagatgaagctgaaatatag

SEQ ID NO: 418046 - DNA, 264 bp, Staphylococcus aureus
atgagagatacagaaagaaatatattgaatatttttaagacattattcgacgaatatactttgtcaaaccaacgagcattattggaaattgaacgtaatcatcacggatacttatcgattaatttcttgcactatcacgacagttacaaaacaaacaataagcttgtgcagatacatgaaatcaatccagacagccatgaacgaataaaaaatttaattatcgaggtgctaagaggtcatcggaagattaaaaaaggagcatga

SEQ ID NO: 418047 - DNA, 1944 bp, Staphylococcus aureus
atgaaaataaataagttaactatatcgaactttgctggaatcaaagaagaaaaatttaactttgacggtaaagatgcaaaaatatacggcaataatgcgactggcaagactacaacagcaaccgcattacaatggctgcttttcgataagggtttagacggttcaaccaaatcatttaaccctgtacctttaaacgaaaaaaacgaagaaaattatgagttaattccgactgttttcgcagaatttgaaatcgacggaaaaattacgacttttaaaaaagagtcacatcctaaatacacaataaatcaaaaaacgaatcgcaaggaatactcacgaagtcgaacgaagaaacaatatatcaatgatgaatcaataaaagtaaaggattataaagctcgtattgatgaactgattgatgaagatgtattcaagttaattacgaaccctcaagcatttaacttactagattggaagaaacgaagaagtttgttgtttgaaatcgctaaaccaatcaatgatgaggatgtcattaaaacaaatgatgattttaaagaactaaataatattcttggagatcacgaaattgaaacaaagaaaaagattcttacagacaagataaaacagattaacaaagatatcaaagatattccgatacgtattaaccaaacgcaacaaaataagcaggatgtaccggaattcgataatgatagacacacaatcataaaacaagaaattgagcaacttgaaaatgagcgtatagatattcaaaacggtgcagaagaaattaatttgcgtaaccaattagctgataaacaatcagaattgaagcgcatagaagctaataatagcgccagtaatgagaacaaaatacatgctttaacaaatgagctacacgttgaaaatggaacggttgcgaatcttaaaacaagattaaagcaaaacaaacaacaaattacacatgaagaaaatcgacgtaatcaattattagaaaatcataaaggattaaaaagtgatttagaaaaagctaaaaatcaaaaatttgaatatcttgatgacaatgtatgtagttgttgtggtcaacagttaccagctgaacaagtgagtgaggtaagagaaaaagcattgcagaaattcaatgcaaacaaatcgaaagaattagaaacaatacaaacatctatcaatcacattatttcagagggcaagaaaataaagccaattatcgagaaattagaggatgacaacaataatttacaaattaaaatcaacgaagcagaagagcgttcagcaagaatacaaaacaaaattaataagttgaaaacaactcacgttgacgttacgcaaactgacgaatacaaagcagtaatgttagagataaatgagattaatcaaaaacgctctaacatcaggaaaactattcaagataaagtttcaggaatagatgacaaaataagcgaacttactcaagaaaaatcagaaattgaagtgtcaatatcaatcgaaaaatcaaataaacatctagatgatgttatttctgaattaagaaatgaagaagacagattattggatgaaaaagaaaagtattcacatgacctttatatcttaaaagaatttacaacaacaaaagtcaaaatgcttactgaaaacatcaataacgaatttgatattgctgaatttaagctattcaataccttagttaacggcgaattagaagaaacatgttcaacaacggttaatggtgtcgagtatgacagcggtttaaataacgcctcaagaattaatgttggcttagatatcatcaacacactatcaaaacattttaaagttacagcgccaatatttattgataatgctgaatcagtaacagagcttatcaaaacagaatcacaacaaattcaattgatagtaaatgaacaagataaaaaattaagaatggagactatataa

SEQ ID NO: 418048 - DNA, 921 bp, Staphylococcus aureus; identical to SEQ ID NO: 407746

SEQ ID NO: 418049 - DNA, 243 bp, Staphylococcus aureus
atgaatcgaattgaaaaacatgccaaaaacacttttattattctgatgctcattatgttattttggatttttatgagttttattttccagaaattattatttccaccttcgaaaaataatttaactacatatgaagcattaaaatattatacacatttaaagggatattacggtttggatcataatatcaaaaggaatagcatacattgcctgtgtgttaattccattcaatttcttttttag

SEQ ID NO: 418050 - DNA, 576 bp, Staphylococcus aureus; identical to SEQ ID NO: 416974

SEQ ID NO: 418051 - DNA, 816 bp, Staphylococcus aureus; identical to SEQ ID NO: 409381

SEQ ID NO: 418052 - DNA, 816 bp, Staphylococcus aureus; identical to SEQ ID NO: 409381

SEQ ID NO: 418053 - DNA, 1269 bp, Staphylococcus aureus; identical to SEQ ID NO: 416952

SEQ ID NO: 418054 - DNA, 348 bp, Staphylococcus aureus
atgagttatgaaaatgcttgtgatgtgatctgtgtacatgaggataaagttaacaatgctttaagttttttagaagatgataaatctaagaaattacttaacattttagaaaaaatttgtgatgagaagaaattgaaaatcatattatctttgattaaagaagatgagttgtgtgtttgtgatatttctttgatattgaaaataagtgttgcttcaacttcacatcatttaagacttttatataaaaatgatgtacttgatttttataaaaagggaaagatggcatattattttattaaagacgatgaaataaaagaatttttctctaaaaatcaggagggtttttga

SEQ ID NO: 418055 - DNA, 618 bp, Staphylococcus aureus
atgattcagactattgtaactgctgctattctttatattgcgacagcagtagatttattagtgattttattaatattttttgctagagcaaagactaagaaagaatatcgagatatttatattggtcaatatgtaggatctgtggcattgattgtcgtaagtttattctttgcctttgtcttaaattatgttcctgaaaaatggatattaggattattagggttaataccgatttatttaggaattaaagtagctatttatgatgattgtgaaggagaaaagagagctaaaaaagaattgaatgaaaaaggattgtctaaattagttggtacggttgcaattgttacgatagcaagttgtggtgctgataatattggtttatttgttccgtattttgtgacattaagtgttactaatttattaattactctgtttgtctttttaattttaattttcttcttggtatttactgcacaaaaattatctaatattccaggagttggagaaattgttgagaaatttagtcgttggattatggctgttatttatatagctttaggtttatttattattattgaaaatgatactattcaaacaattttaggatttatattttaa

SEQ ID NO: 418056 - DNA, 702 bp, Staphylococcus aureus
atgtcaataccaattaatttgcctacaaacagtactatgattaatgaattatgtacattacaaagtagaactataaacataaaaggagaagtgctaataactgaaatatatgatgattactttttaaaaaatgatgaatggcacatttcagcttttaacaagttcgagcaatttcaagatagtatcaagaactataaagacaaaagaaaaaatattttctttaggattaaaagtgaaaatttgaatttagaatttaaatacctttttttgaaacttatagttaaagaggattggtctttatctaatgtatttaatactggagcagtgaaacttaacaagattgctgagttctttaatgaagtttatccaaatttaaattctttactagattgtgatattaatatgttagaaaagtactggtttagttggttgactaaaaataatatacctataaaaagaaaatcatcaacaatagtttttggtgattatgaacataaaagtggactagcttcttttttaaagaatatgtatattaatctaaataaatttattgataagcgagaagaatgggaaaaagataaatgggatattagaaatttagaaaaatatggattgagttataataaaacactaactggtaattatttgaactttgaaaaaattgagtcaattaaaatgcgagaattagcaaaaaatatttaa

SEQ ID NO: 418057 - DNA, 252 bp, Staphylococcus aureus
gtgggctcggagatgtgtataagagacagaaataaaacaacggcattatcaaattgttctaatacattaatagaatcttcattaattaacgatgcaccttcaattttatcaattaaatcttgtatcgttaatgcgccagtattttctctaattgatccaaaaatttcacataagaatacacgatctgctttacttaaactttctgcaaattcatttaaaaatgcttgtgttctagagaaagtgtgtggttga

SEQ ID NO: 418058 - DNA, 717 bp, Staphylococcus aureus
gtgtataagagacaggatattgataatgcagataatatcggttttttaattgagcatcctaaattatatgataataaatcaggattgtataacttgaaattatttgcacaagtattaggtaagggttttgataaagcatacacagacaaaattatagatgcatttggtatgagaccttatattaaaaagaaagttaagaaatattcaatggggatgaagcaaaaattagcaattgcagtatctttaatgaataaacctaaatttttaatcttggatgagcctacaaatggtatggatccagatggctcaattgatgtgctgactacaattaagtctttagtaaatgaacttgatatgagaattctaatatcaagtcataagttagaagatattgaattaatttgtgatagagctgtatttttaagagacggacattttgttcaagatgtaaacatggaggaaggtgttgcatctgacacaacgatagttactgttgatcataaagactttgatagaactgaaaaatatcttgcagagcatttccaattacaaaatatcgacaaagcagacggacatttaatgatcaatgcacaaaaaaattatcaagttatactaaaagcattatctgaattagatatttatccgaaatatattgaaacacgtaaaagttcattgcgtgatacgtacttcaatataaatcaaagaggtgataaataa

SEQ ID NO: 418059 - DNA, 198 bp, Staphylococcus aureus
atgataattaaaattttaacaattctattactactttgtatattgagctatttggttacaaatagaaagaagccttttctgttcttaaagacactctttatgggtgtggtatttatctttataggatatatttcactggcaatatctgccgtaattatttatggtattattcaatttatcacaattgattttggttag

SEQ ID NO: 418060 - DNA, 216 bp, Staphylococcus aureus
atggaaaatcaagaaaattacaatgcttctagttttgatgatttaattagccaaattaatgagacagcacaagatgttcaaagagagcgaggaacactttttgaaagattagtattagcctatttaaaaaacgaacctacgtataaaaatctttataaaaatgtatggttactaaaggatgtaccttcagaatttaatatttcaaaaaagatttag

SEQ ID NO: 418061 - DNA, 1347 bp, Staphylococcus aureus
atgaaaaaagaaattttaaaaaagcaatgggtaatatggacaatcttagtaacatctttctttagtataggcacaccaggtatagcaataatcccgttcagtttatcaatatatgcattatctaaattaatacttgttaataaatttgtagaacccgatttagtaacacttcaaaacttgaaagaaaaaaataaaagtatcaacattgaaaatcaaaaaatcaagcgtgaaatacaagaattgaagaatctaaaaaatgatttaatatctagtatagaagaaggtactaaagaacttgaacacattactagttatttaaatgatgaattatttaaatatgatatagaattaacttatcccttcgatttagttgaagtagactcatctcaaattaatacatatattaaaaaattacaaatgaaagaaaaagaattactaaatcttgaagaagtgaaaatatttaatgtttctacagagaataagagacatcaaaatgcacaggccaagcaaataatacgattatttaatgctgaaacttctcaattaattaataaagtaaatagcaaaaatatcgaaagcatgcagaacaaaatatttaaaagttatgaagggataaataaaatatttgaaacggataatgtacgtattcctgaaactttacttgacataaaacttgagatgttagatttaatgcacaaatatcaagttaagatagaagatgaaaaaatcataagaagagaagaacgagctagactgaaagaaatagaacaagcagaaaaagaaatggagaaaaaactaaaagagcttgataaagacattagacaccacaataatgaaatcaaaaagctgacaatgtatttaaataacacagatttacaagtcgaaaaagaattatatattgaaaagattagagaattagatcaatcactcaaggatttaaattctgaaagagaaaatgtagaggacagaaaagataatgctcaatcagggttcgtttatataatatcaaatatcggttcatttggagaaaatgtttataagattggtgtaacccgtagattagaaccaatggatagaattaatgaattaagtagcgcatctgttccctttgaattcgatgtgcacgctttaattttctctgaaaatgcttttgagcttgaaagcaaattacacgaatactttaaaaaatataaagttaataaagttaacggaagaaaagaattctttaaagttaatattaatgaaattaaagataaagttttatcagaacacaatagcacagttcaattcattgatgaaccaaaagctatacaatacagagaaactttaagattaacttcactctaa

SEQ ID NO: 418062 - DNA, 567 bp, Staphylococcus aureus
atgatcgatttagtaagtacctggttaactttatttcttccaatgatgaattggttaatccctaaaaaatacgtgaagattagtaaagaagaatttgaaaatttaaagattgtaaaacctgttaaaaataatgctttttggccagctgcaggtggctcagttttatttggagttacattcaggaaatatactcaatttcttaatattcaattagaaaaaaacttggttattgccatatgttgcatgatatttctagctgtttttacattatttttatatttaaataaaaaactaaagctgcatatgtttgaggacaataaaaatgataacgataaaatcatattaatccctacatttaaaaatatttgcttatccctaattgcctatgtgtttttcggtggcttttcaataatgcttttaagtatgttgatgaccttaaatccacaaaatataataggattcttagctttgtttggtatgattgctgctttctttatagcaaacaggtcttcaattatcgataaaaatgtatacgcaatactaaggtcaaaagaggttgagaagtga

SEQ ID NO: 418063 - DNA, 300 bp, Staphylococcus aureus
atgaaaagctataagtgtaaaggatcattcttaatagatagtatggctggatttttgctaattggattgattacattactattgataccaatgatgaatcaaatgcaagcgagtataaaccataaactacaatcaattgatgcttctaaagtaattttgacgactgtatctaaaattaataaagaagaacttaagaagggggtaactatagggaaatatgatattaagcaaagtgaccaacaaatttgtgctatttcaaaaaataccacttcttatcaaaagacatgtatacagtattaa

SEQ ID NO: 418064 - DNA, 267 bp, Staphylococcus aureus; identical to SEQ ID NO: 409319

SEQ ID NO: 418065 - DNA, 1149 bp, Staphylococcus aureus; identical to SEQ ID NO: 412618

SEQ ID NO: 418066 - DNA, 186 bp, Staphylococcus aureus
  misc_feature (38)..(45): n is a, c, g, or t
atgagaaaatataattttgataaattcttcttatatannnnnnnnacactatcctcttcgtcggcagcgtcagatgtgtataagagacaggcggtactgtcattaccaatagtcatattttttccattaatgttaagcatcccaatcatcttttttattttttcaataagaaagaaggaagattaa

SEQ ID NO: 418067 - DNA, 255 bp, Staphylococcus aureus
atgtatgctttagtatattgttttaaattagatgaatttgaatttaatttaaaaagtaagtataaaaaatacaagctcgttatatcaaggtattcaagagttttgtatgcaatatatatgtgtgttccaaataataaaaaacccattatacataaagttaacaacaatcttaactttttattaactcggttttttttattgcttttaaaaaccgaacaatatagaattgcatttattgagttaaaaaataaatga

SEQ ID NO: 418068 - DNA, 1206 bp, Staphylococcus aureus
ttgtttgaatatgcagctaataaacatttgcaaagtactaagaattttgtgagagaagaattaaaaacaattagaaggttcttaaacgatattataactcaaaactatgctatagcaccgtaccaagatatacgatttttaatttatcctcaagacttacctaaacacgaaaagaaaaatagtagccaaattgattatatcccagattttgtattggaacagctttttgagcatataaatgatttgcataaagatttaatacctgtagtttggatagcttttaaaacaggattaagaatttctgatgtattgacattacaaaataattgccttgcaaaagttaatggaaagtattcaataatcacagatattgctaaaacttttgttaaaggacatagaataccaattgataataaattagctgatataatagcagttttaatagccgattctaaaagtaaaagtacaaaagataataatcctaataattatatttttgctatttataaaggaaaaagaaagggaatgccctttacacaacatatggtcagagcacacttaaatcatttatcaaagactaaaaatattattgatgaacaaggagaaatcttccatttcaaaactcatcaatttagacatacctatgcagtaaaattgttaaatggtggagcagatatattaacgatacaagaattattagcacactcctcaccagaaatgactctaagatatgctaagttacttgatgatacaaagagaaaggcttttgaatcagttattgatcaaggagcttttagttttgatgttgacggtaaaattaaaaatatacagcatagtagtgaactatctgaaaaagcattgaattctttatggcaagaacataaattaaacgcaatggacaatccttatggcacttgtcatgctagattgagtggtgattgtccatacatggaagctccgccatgcctgacttgtaattctgggaaaccatgtaaggatttagctattggattttctgatttagatgttgaaaaatatgaattacatatcaaatcaacggtcaaatctatagaattagctaaaaataataatagacaagatatggttgaaaagcatataaatatattaaataaatatgaagaaatactaggtaatataaaagatggaaacattatattcgggagaagtaatagaataaaagtatag

SEQ ID NO: 418069 - DNA, 1023 bp, Staphylococcus aureus
gtgtataaaatcttaaatagtgattattataaaaaacagaactctgacaagttgagtaaagctgcaattgatggcatggtcaaagaattaaaagatccttattctgaatatttaacaaaagaacaaactaaatcctttaatgaaggtgtttcaggtgattttgtaggtattggtgcagaaatgcaaaagaaaaatgatcaaattatggttactagccctatgaagggttctccagcagaacgtgctggcattcgtcctaaagatgtcattactaaagtaaatggaaaatcaattaaaggaaaagcattagacgaagttgtcaaagacgttcgcggtaaagaaaacactgaagtaactttaactgttcaaagaggcagtgaagaaaaagacgttaagattaaacgtgaaaaaattcatgttaaaagcgttgagtataagaaaaaaggtaaggttggagttattactattaataaattccagaatgatacatcaggtgaattgaaagatgcagttcttaaagctcacaaagatggtttgaaaaagattgttttagatttaagaaataatccaggtggactactagatgaagctgttaaaatggcaaatatttttatcgataaaggaaaaactgttgttaaactagaaaaaggtaaagatactgaagcaattcaaacttctaatgatgcgttaaaagaagcgaaagacatggatatatccatcttagtgaatgaaggttcagctagtgcttctgaagtgtttactggtgcgctaaaggactataataaagctaaagtttatgggtcaaaaacattcggtaaaggtgtcgtacaaactacaagagagtttaaagatggttcgttgttaaaatatactgaaatgaaatggttaacgccagatggtcattatattcacggtaaaggcattaaaccagacgttactattgacacacctaaatatcaatctttaaatgtcattcctgtctcttatacacatctgacgctgccgacgaagaggatagtgtag

SEQ ID NO: 418070 - DNA, 345 bp, Staphylococcus aureus
atgagtgaatttgaagtaaaagaaaagacgtacaacttaccgaatgaacaccgccaagtactcaatgtgataagaaatacgtctaataaatatattactaaaacaaagctgcttaatcaattgggatatgaagtgaataaggctaacaatagatggttaacacaagtcattacaaacttaatcattaattatcattatcctatcggatatagctataaaaaagatactagaggctattacatcattaaaacacaagctgataagatagaagctatcaaaagtattaagggcttaattgagggcagtcagaaccgtttgaaagccctagaagaaattgaagtgtaa

SEQ ID NO: 418071 - DNA, 198 bp, Staphylococcus aureus
atggacaataaaattgaaaagattctagaagatattaataaattacaaggctataaagtaacatatcaatatgctactgctataaatataaaagataataacatgaacccttggtttgaaaaaattgaggaaattctattgaatgtaaaaggagttatacgcattttatctcctgacaacccccccggtaaattatga

SEQ ID NO: 418072 - DNA, 210 bp, Staphylococcus aureus; identical to SEQ ID NO: 407536

SEQ ID NO: 418073 - DNA, 201 bp, Staphylococcus aureus; identical to SEQ ID NO: 417398

SEQ ID NO: 418074 - DNA, 1140 bp, Staphylococcus aureus; identical to SEQ ID NO: 407582

SEQ ID NO: 418075 - DNA, 594 bp, Staphylococcus aureus
atggaactattttaccaagaaggtcctcaattaattaatgagataaaagaaagaggccatgatgtatttttagatttaaaactgcatgatattcctaatacagttggtaaggcgatggaaggactagctaaattgaatgttgatctggtaaatgttcatgctgctggtggcgtaaaaatgatgtctgaggccattaaaggattaagaaaacataatcaacatacaaaaattattgcagtaacacagcttacgtcaacaacagaagacatgttacgacacgaacaaaatatacaaacatcgattgaagaggccgttttaaattatgccaagttagcaaatgcagctggtttagatggcgtagtttgttcacctcttgaaagtcgtatgttgactgaaaagttaggtacatcatttttaaaagtaactccaggcattagacctaaaggtgcatctcaagatgaccaacaccgtattacgacaccggaagaagcaagacagcttggttcgacgcatattgtagttggtagaccgattacacaaagtgccaatccagtcgaaagttatcataaaattaaagaaagttggttagtataa

SEQ ID NO: 418076 - DNA, 879 bp, Staphylococcus aureus; identical to SEQ ID NO: 408785

SEQ ID NO: 418077 - DNA, 603 bp, Staphylococcus aureus
atgttaattagtctcgtaatcccagtttttgctttgttagttattggtggtattatttgggtgattatagaaggtatagtacatatttcaaaaaagaataaagcaattgataacttttttaacaaagtcaataaagtaagtgagacatataaattcgctactacttttttatttctaatcttggctactgctggtatttctcaattttatctatattatatagtatcagcatttcttttttggcttgtcatatttacctttggtattgcaggtatcatttttttaatgccatatggcttatgtttcctaccactttatacgcaaaaaaagaaaaaacagacatttaaaaaatacatggtttacactacgattggtttgtcaatttgtctaggtttatctctagttttggtttacactacgaaaatttatatggacgaaggtggcgtaagatactattacggtagttttgtaatgaaacaagcgggcggttatgcttatttagctttagcagtactttcaacgttgttaattgttgcgaaaaaagctacaaataaaaataaagaaatcgaaaccgtcgacaatacaaatataacggaaagataa

SEQ ID NO: 418078 - DNA, 987 bp, Staphylococcus aureus; identical to SEQ ID NO: 407499

SEQ ID NO: 418079 - DNA, 147 bp, Staphylococcus aureus
atgtctctaacgcctttaatggtattgaacgcaattgggaaaaaagcagcgataaaaataatcgcaatcgctggcaaactaccaataccaaaccatagaacaacaaatggtgcccaagctatcggagatatcggcctaatcaattga

SEQ ID NO: 418080 - DNA, 921 bp, Staphylococcus aureus
atggattttgtagcgatcgatgtcgaaacagctaacgaacaacgcagttctatttgttcaatagcactattaaaatttcaagacaacaaaatgcgtgatgctatttatactcacataaatcctgaaacttatttttcttctataaacacttctatacatggaatatccgaagaagacgtaatggattcccctaaaatgtatcaaatgcatgaagctattattagattcttagataaccatataatagtagcccataatacatctttcgatatgtatgctctatgtgattctttcaaaaaatacaatctacctttacctagcaatcaatatttttgtacttatcgattaagtaaagatttatataatttaccttcatatagactccaagatttagctgaacattttgacattaaaaacgaagaatatcacaatgctttttatgatgctaaagtgtgtgccaaaattgcatataacatattaaaagaccaagatgcaaacttgaacgatttagtcgaaaaccaaaattttaagtacggtgtgtttggtcagaatggattcataaaaaaatcggctaataagaaaatagagctagtatacaatgaagagttaaacgataaaaatcatatattatatggtaaacatgtttgttttaccggagcgttaaaaggtttcacacggaacgaaatagcccaaactgtaactaatattggttctgtttacgattcctctgtaaaaaagtcaactaactacctcgttgtcggtaatttagaaaacctagaaaaaactcataactataccaagtcaagtaagattaaaaaagcagaaaaattatcaagtgaaggacaagacattgaaattttaagtgaaatggatttcttaaaattattaactaccttcacttctgtagaaacgaaaacgtga

SEQ ID NO: 418081 - DNA, 699 bp, Staphylococcus aureus
ttgtatgatcaagcacaatcagatactgctaattatatgaccgatttaaatgatgccatgttagctatcgttggaaatattgaaatagatggtgatgaagctaagaagtttcgacaagctaatatggttcatgtcaaaccaagtatcaatgtcaatggttcagaaggtaatgcagatgttaagtacatttataaacaatatgatgttaatggctcagaagcatataaaactagattacaaaaagatattcacaaatatacgaatacgcctgatttaagtgatgagaatttcagtggagttcaatctggtgaatcaatgaaatataaattgtttggtttagagcaagtgagagctattaaagaacgtctgtttaaaaaaggtttaatgaaacgttataaactattattccatattcttaatttaactggtgtacataagtatgattattcaaccattgatattacttttactcctaatttacctaagtctttaaatgaatcaattgaagcttttaattcattaaatggtggagtatctgaacaaaccagattgaaattgctaccaattattgataatccatttgaagaaatcaagaaaatggaagatgaacagaataaggtaaaaaaaattagtgataattcatcatttaaggcaccatttagccacgaaaatgaaatgactgatataaatgtcagataa

SEQ ID NO: 418082 - DNA, 225 bp, Staphylococcus aureus
atgaccaaaacacttgaattaagttttaaatcttcattagacaaacctgtcaaattgcaattaccacaattaaacaacatcataaccgagcaagttgcacgtgatagtatgaatgcattagtagatttaaatattttaaagtctaatagtggcgctatcaccaaagtacattctgctcaaattattgataaaacgacgaccgttttatttgaagataagaaatag

SEQ ID NO: 418083 - DNA, 447 bp, Staphylococcus aureus
  misc_feature (396)..(404): n is a, c, g, or t
atgagtcaacaattatcgagagaagaacaggaacgtaaatatcctgaatatacatgggacttaacaacaattttcaaagatgatgaagcttttgaggctgcatttaaagaagttgaaaatgagttaggcaaagaagaacaatttaaagggcacattggtgatagtgctgagacattatacaatgcgttagaattagaagatacattaggtactaaattagaaaaagtatatgtatacgcgcatctaaaacaagaccaagatacaacgaacgacaagtatactggtatggagtcaagagcacatcaattaattattaaatttagctcggcatggagtttcttagtgccagagattttacaaattgatgaagataaaattcaatcatttgtaaattcnnnnnnnnngtcggcagcgtcagatgtgtataagagacagattcgcatttga

SEQ ID NO: 418084 - DNA, 1692 bp, Staphylococcus aureus
ttgtgtccttttcatgatgaaaagacaccttcatttacagtttctgaagataaacaaatttgtcattgttttggttgtaaaaaaggtggcaatgtttttcaatttactcaagaaattaaagacatatcatttgttgaagcggttaaagaattaggtgatagagttaatgttgctgtagatattgaggcaacacaatctaactcaaatgttcaaattgcttctgatgatttacaaatgatcgaaatgcatgagttaatacaagaattttactattacgctttaacaaagacagtcgaaggcgaaaaagcattaacatacttactagaacgtggttttacagatgcgcttattaaagagcgaggcattggctttgcacccgatagctcacatttttgtcatgattttcttcaaaaaaagggttacgatattgaattagcatatgaagccggattattatcacgtaatgaagaaaacttcagttattacgatagatttcgaaatcgtattatgtttcctttgaaaaatgcgcaaggaagaattgttggatattcaggccgaacatataccggtcaagaaccaaaatacctaaatagtcctgaaacacctatttttcaaaaaagaaagttgttatacaacttagataaagcgcgtaaatcaattagaaaattagatgaaattgtattactagaaggttttatggatgttataaaatctgatactgctggcttgaaaaacgttgttgcaacaatgggtacacagttgtcagatgaacatattacctttatacgaaagttaacatcaaatataacattaatgtttgatggggattttgcgggtagtgaagcaacacttaaaacaggtcaacatttgttacagcaagggctaaatgtatttgttatacaattgccatctggcatggatcctgatgaatacattggtaagtatggcaacgacgcatttactgcttttgtaaaaaatgacaaaaagtcatttgcacattataaagtgagtatattaaaagatgaaattgcacataatgacctttcatatgaacgttatttgaaagaactgagtcatgacatttcatttatgaagtcatcaattctacaacaaaaggctataaatgatgttgcgccatttttcaatgttagtcctgagcaattagctaacgaaatacaattcaatcaagcaccagccaattattatccagaagatgagtatggcggttatattgaacctgagccaattggtatggcacaatttgacaatttgagccgtcaagaaaaagcagagcgagcatttttaaaacatttaatgagagataaagatacatttttaaattattatgaaagtgttgataaggataacttcacaaatcagcattttaaatatgtattcgaagtcttacatgatttttatgcggaaaatgatcaatataatatcagtgatgctgtacagtatgttaattcaaatgagttgagagaaacattaattagcctagaacaatatagtttgaatgacgaaccatatgaaaatgaaattgatgattatgtcaatgttattaatgaaaacggacaagaaaccattgagtcattgaatcataaattaagggaagctacaaggattggcgatgtagaattacagaaatactatttacagcaaattgttgctaagaataaagaacgcatgtag

SEQ ID NO: 418085 - DNA, 300 bp, Staphylococcus aureus
atggggattattttaattttgatttcaagtatattccaattatttatagttagattactgtttcgaaaaaagaatgtcgatttgacagaggttgtcgttttagaacatttaattcaatggttcttagtttactttgcgatatatcaagcagtaaatgaaaaaatggatattaatgatattaatatcgacaatttccaatctgtattttttgacgtatctaatttgaacttagttatactgccaacgttgattattagctgggttacaatatttaactatagaatgagaagttacaaataa

SEQ ID NO: 418086 - DNA, 189 bp, Staphylococcus aureus; identical to SEQ ID NO: 413154

SEQ ID NO: 418087 - DNA, 363 bp, Staphylococcus aureus; identical to SEQ ID NO: 413126

SEQ ID NO: 418088 - DNA, 369 bp, Staphylococcus aureus; identical to SEQ ID NO: 405650

SEQ ID NO: 418089 - DNA, 1206 bp, Staphylococcus aureus
gtgggctcggagatgtgtataagaaacaactatgtaacagatcaacaaaaagctttttatcaagtattacacctaaaaggtatcacagaagaacaacgtaaccaatacatcaaaacattgcgtgaacacccagaacgtgctcaagaagtattctctgaatcactaaaagacagtaagaaccctgatcgtcgtgttgcacaacaaaacgctttttacaatgttcttaaaaatgataacttaactgaacaagaaaaaaataattacattgcacaaattaaagaaaaccctgatagaagccaacaagtttgggtagaatcagtacaatcttctaaagctaaagaacgtcaaaatattgaaaatgcggataaagcaattaaagatttccaagataacaaagcaccacacgataaatcagcagcatatgaagctaactcaaaattacctaaagatttacgtgataaaaataaccgctttgtagaaaaagtttcaattgaaaaagcaatcgttcgtcatgatgagcgtgtgaaatcagcaaatgatgcaatctcaaaattaaatgaaaaagattcaattgaaaacagacgtttagcacaacgtgaagttaacaaagcacctatggatgtaaaagagcacttacagaaacaactagacgcattagtagctcaaaaagatgctgaaaagaaagtggcgccaaaagttgaggctcctcaaattcaatcaccacaaattgaaaaacctaaagcagaatcaccgaaagttgaagtccctcaaattcaatcaccaaaagttgaggttcctcaatctaaattattaggttactaccaatcattaaaagattcatttaactatggttacaagtatttaacagatacttataaaagctataaagaaaaatatgatacagcaaagtactactataataaatattaccaatataaaggtttgattgataaaacagttttaacaactatcggtagtggctatggttcatacattaaacctcttgaagtaagcaaagaaagcgggaatttagctaaatcatatgcacaagtaagaaactatgtaactgagtcaatcaacactggtaaagtgttatacgcattttaccaaaaaccagaattagtaaaaacagcaattaaagctcaagaaacagcaacaactttcaaaaacgctttaacaggcatattcaaatcattctggaaataa

SEQ ID NO: 418090 - DNA, 402 bp, Staphylococcus aureus
atgaaagctcaaaattatccggtaaatgagaaaaaaatagttttgccaccgttttttatggcgactggtgcattgatgtacgtcgttccatattttaggctaacaggatcggaaatgctagaagcctttataattggtttgcttttttctacagttctaatttggacttctcgatttgaagtcaaaggtacagaaatttatatgaaacgatctaaagcatttccagttattttgatttcattacttgtcattcgtactgtgatgaaaatattcattagtaatgaaatagatcctggagaattaggcggcatgttctttttattagcattctgtatgattgttccttggagagcagcaatgctatataaatacaaaaaactaaagaaaacattaatcaattaa

SEQ ID NO: 418091 - DNA, 861 bp, Staphylococcus aureus
ttggagcagtatgaacaaattgggaatagcatttatcaaaagttattagtttatatgaagtttcaagctggacttgatgtatctacacaacaagtcgcacagagcggtcgatatagttaccatttcaataaaatatattttttgagaatatcaactttaccattgtcacttggccaagaaagttgtgtgatcagaattgtacctcaattttttcaacaacagaaatcaacttataaattcaatgattttaaacacctcatgaataagaaacaaggattactattgtttagtggaccaactggttcaggaaagagtacattaatgtatcaaatggtctcatacgcgaataaagccttgaatttaaatgtaatttctatagaggatcctgtagagatgcaaattcctggtattgtccaaattaatgtgaatgataaagctggcattaactatgtaaattcgtttaaagctattttaagatgtgatcctgatgttattttaataggtgaaatcagagataaagatgttgccaagtgtgttatacaggctagtttaagtggtcaccttgttctgactacattgcatgcaactgattgtaaaggtgctattttaaggctattagaaatgggcatttctgtacaagaattgatacaggcaactaacttaattataaaccaacgacttgtaactactattaagcaacagcgacaattagtatgtgaaattctatctcagcaacaactccgatatttcttttcccataatcattcattaccatcatcatttaagaacttagaagataaacttgatgatatgacaaaagcaggtgtcatttgtgaaactacaatggataaatacatttaa

SEQ ID NO: 418092 - DNA, 864 bp, Staphylococcus aureus
ttggatacgccgaagaaacaacaatttgcctttaacaatatacaaatgaacatgtcgaagtcagatgttgagaaaacattgaataaaccaaaaagagttacatttaatgaatatggcacgaagtggtatacgtattatgatggtgattacaataattttataatggtaagttacattaaagataaagtaaatgcgttatatacaaatcaaaatatcatcacttcaaaatcaaaaattaaatacaatacaccgaaatcggttgtaaggcaaagattaggcgaaccagaaacagagattgttaaaggtagagtgcgttacgaacaaaataataaagaatatgatgttttccataaaaatcacatttatacgacggtattttatgataagcatcgacgtaataatgtaacagctgttttacaagtaagtgatgctatggaaaatagattaaaagaacaatatggagcaccttcgaaatcgcttgcagatagttttgaactacaaaattttgatttagttaatgctgaaagaaaacaacatcaattatctacattgaagtattctaaacagaattctgaaactgctcgtaagcatagtaaagatatggccaaaaatcattattttgatcatacaaatttaaaaggtcaatcaccatttgatcgattgaaaaaagatggtattacatttaactcagccggagagaatttagcatatggtcaagttagtagtatctatgcacatcaaggattaatgaattctattggtcacagaaaaaatattttaaatgatacgtttaaaatattaggtgttggtgttgattttaatgatgaaaaacaacctttttggacagaaaattatactggttaa

SEQ ID NO: 418093 - DNA, 210 bp, Staphylococcus aureus
atgggtatagccttagctgctacaatggcttgtgcagttgcaataaatgtaaatgctgggactataacctcatctccgggatttacaccaactgatatgagtgctagatgtaaactggaagttccacttgcagtagacaatgcatattcagctccaacatattttttgtattttttttcaaattcatcgattatacttgaaggtgtctga

SEQ ID NO: 418094 - DNA, 702 bp, Staphylococcus aureus
atgatttttcaagaacctatgactgctttaaatccggtatttaccataaaaaatcaactagtggaatctataaaatcccataaaaaaatttctaaaaaagaagcaaataacttagcaaaagatttactaaaaaaagttggaattgcaagacaagatgaaatattaaatagctatcctcatcaattatctggtggtatgaggcaaagagtaatgattgcaatggccatttcatgttctcctaaattattaattgctgatgaacctacaactgcattggatgttacgattcaagcgcaaatattagatttattaaaagaattgcaaaaggaaacgcaaatggcaattatgatgattacacatgatttgagtgtagttgctgagttttgcgataaagtcttggttatgtatgcaggtcaaattgtagaatttggagatataaaagaaatactacacaatccgaaacatccttatacccaaaaattattatctacaattccaaaacttaaagaagaacagaaacgacttgaaacaatagaaggaattgtgccatcaatccaagcatttcacgttaataagtgcagatttgcaaatagatgtaacaaaaaactggatatttgtaataatcaatctcctaaaatgcatgtttgtgaagacgtcattgtacggtgtcatttataccaaaatgaatataaggagatataa

SEQ ID NO: 418095 - DNA, 129 bp, Staphylococcus aureus
atgataccgacactatcttttgctgcagaatgttctcttttttttgaaatagttagttttaatttagtaagtccaaagtatcctaatgtaagagcattatatccacttggttctccaattatgacatga

SEQ ID NO: 418096 - DNA, 261 bp, Staphylococcus aureus
gtgggctcggagatgtgtataagagacagtcatattactgatccaatgatgagtttaaaacaaatttatcctaatactttagcgctgacgaatgaaacttttaattacaatgaagaaaataatgctatagaaataagtgaaaaagatgacatgtcaatcatcgaaatgttttataaacatataactgatgaagaattatcggatatccaatctaaaaagataaaaaatattttagaaaacgaattgagaaaggaggattaa

SEQ ID NO: 418097 - DNA, 750 bp, Staphylococcus aureus
atggttgacatattaggattaaattgtgaagaacttcttgaaaactcaattcgtttcggcgatgcagatataagcccaggaacaagacttcaatttatacaagttccaagtgagcaattagaagaatctcactttgtgggtattggattacgtacaccaaccgactcaggtttagaggagtatgcggaaatattatcgagtaaggatattccatttacaacagttaaagaattaaatggcaataaatatttcagtctcgaagataacaatggtcatattttctcaatatattcaaacgagaataattatggtgttggtttaggtatgccttctttcgaaagtgcggtcaatccgttacatcaagttcaaggtttagggccagtgattcttaaagtgaatcatgtagatattacaggtcaaattttaacaaacatattcggacttgaaatatttgcagaataccaacccttcgacaatgctgactatcatgtccaagtattcaaaattggaacgggtggtctaggtggcgaaatacatttaatgcctgtagaaaccgaaatgacaatgccggaatatggcgcagtcgatcaagttgagtttgaaacgaaagatgtagatttctttaatcaagcgaaatcgcgcttagatgaagtggaaataccatatcaaacacttgaacaagacgatattgaatcaattagaattactgaaaacagtggattatcttttatattcactttacaaaaataa

SEQ ID NO: 418098 - DNA, 303 bp, Staphylococcus aureus
atgtatttaggtcatatagttgaaatcgcatctgataaagaaatttatgaaaatcccaaacatccatatacaaaagcattaatttcatcaataccacaaattgataaacataataacaatagaattatattaaaaggagaattaccttcgccaagtaatccgccgcaaggttgtcctttccatactagatgtccaattgctcaagataaatgtaaagaaaatataccacaattaaaagacataggtgatgaacatcaagttgcttgtttctacttagataaagtaggtgatttaaatgattaa

SEQ ID NO: 418099 - DNA, 624 bp, Staphylococcus aureus
atgagagaattaacaaaacgacaaagcgaaatatataactatattaaacaagttgttcaaatgaaaggttatccgcctagtgttcgagaaattggagaagcagttggcttagcatccagttcaactgttcatggtcacctttcacgtcttgaagaaaaaggctatataagaagagatccaacgaaaccacgcgctatagaaattgtaagtgatcaaacaaatgataatattaatatggaagaaacgattcatgtgccagttattggtaaagtcacagcaggtgttcctattaccgcagtagaaaatattgaagaatattttccattacctgaacacttaacatcgacacacaatagcgacatattcatattaaacgtcgtaggcgacagtatgattgaggctggtatattagacggagacaaagtaattgttcgcagtcaaaccatagcagaaaatggagacattattgttgctatgactgaggaagatgaggcaactgtcaaacgcttctataaagaaaaaaatcgttatcgattacaacctgaaaatagtacaatggagccaatttacctcgacaatgttgctgtaattgggaaagtaattggtttgtaccgcgaaatgtaa

SEQ ID NO: 418100 - DNA, 678 bp, Staphylococcus aureus
gtgggctcggagatgtgtataagagacagatatatacgtatcagacatatattaaatccttcgttaaaagtattaacgaaatgccaagctcaaagtacatccaactttgataacatcgccctagcttataaagcagctgagttacaaggtcgtgtacgtgcggaacgatttatacatttaatgcaaaatgaaatcatacctaaaagagatattattacagaatcaatgatttgtgactgtattcaaaatgcaggtattgatttagaagtatttaaagacgacttacaaaaaagcaaactaaccgaaagcttgaaaattgatttgcatattgcaagagaaatggaaatcgaacaagccccttctctcgttttctttagtgaagatgttcatgaagaaggtttaaaagtcgaaggattatacccatatcatatctatacttatataattaatgaattgatgggtaaacctatcgaaaagaatcttcctcctaaactagaaacttatatacagcaacaacaacttgtaacgatggaagaattacttactatttatgaatggccagaaaaacttttaaacaaagagttaaagaagttagctattcaacaaaaaattgaaaaacttaaatatccagatggcgatttctggaaatctaaaatgcctaaaatcaaatcaaaataa

SEQ ID NO: 418101 - DNA, 327 bp, Staphylococcus aureus
atgacaaaagaaagaagaacatttagttcagagtttaagttacaagtggttagattatatgaaaatggtaagcttaagaatgaaattatacgcgagtatgatttaaaaccctcaattttctcaaattcgataaaacaacaccaaaatactgaatccttcaatcatcaagataatttaaaaagtgatgaaaaagagttaataaaattacgcaaagaagttcaacatttaaaaatggaacatgtatctgctttaaatcatttacttcatcgtaataaaatacaatcacatatatatgatatttttataattgcagtactttttgattaa

SEQ ID NO: 418102 - DNA, 567 bp, Staphylococcus aureus
atgacggtttatagtttgataagttttagtttaatggcgtttccaatagatattattaatgaaaaacaaaatggatggcgtcaaaaattaatggcgacaccattaacacctgctagttactatatttctaaaatagttaaaacaatggcacaatttgcaattgcaattatagtgatttttatgataggacatttttataaaggtgttacactaagtataagtcaatggatagaatcaggtgtattgttatggctaggtgcatcattattgataacttttggtgtattattttcgttgattaatgatattcagaaagcaagtgctttaggtaatatcgtgacaatcggattagcggtgctgggcggattatggtttccagttaatacatttccaaattggcttcaacatattgctcatgttttaccaagttatcatttgcgcaagttaggtttagacattgtttcaaatcatcatattgatttaagatcatttggcatactaattttatatgctgtaggtagtttaatagtggtatattgtattagacattttaaaagggcggaataa

SEQ ID NO: 418103 - DNA, 507 bp, Staphylococcus aureus
atgaaaaatatcacacatatcatttccgctataaatattgtaagaaaaaaagtaaaggatgttaagttgcacatatacggtaccggtacgcaaaaagaaaattacacaaaacttattaaaaaacttaaattgcaagataatgtgttcatccatgattacgcatttgacatacgtggtctttatacaaaagcctctctaagtgtactgacatcagattatgaaggtctccctatgagtttactagaggccatgagttacggtgttccagtaatttcatatcctattaattatggccctaaatctataatccaaaataatataaatggaataataacaaaaaagaaggataatattaatgaattggcaaaaaaaataattcatgtattaaaaaaagaaacattgatatctcagttttctgaaaatgccagaacaacaataaaaacaaacttttcttacgaagcggtatccaaaaaatggattgaattaatcgatgaaaaaagcaaatag

SEQ ID NO: 418104 - DNA, 354 bp, Staphylococcus aureus
ttgttattcttagataaaggtatgatatatggtttgaaatttcatgaatttccattcgagaaaatcaattctgtttcgtataaaaaaggacttctttttggcgaaataattatacatcacggttcatcaagtatcgctataggaagcatatcaaaaaacactgtatctagaatggcggaaacaatacaagaacaaatctctattcgagaaagttctatgaaaccatccaattctgaaaaaatgagtttttctgttgctgatgaattaataaaatataaagaattattagatgtcggagtaatttctcaggaagagttcgataagaaaaaacaacaattattggatattgattaa

SEQ ID NO: 418105 - DNA, 345 bp, Staphylococcus aureus
atgcttacaaggtcatttatcacaagctatttaatactttcagaagaaaatggagaactcaattctaaacttggagatgcagcagaaaagttaaacgatacgggacaacttaaggtggaaaagccaaaacctgatgaaataatggataaatctaaattgatgctagaagctagtgaaaataaatctcaataccaaattgtagaagagattttgcgccaatcgtttcatattcaagatcaaaaagcaaaagaaaaaattcatgaaatggttaatgtattgttaccggggagtgtggattttgaaaaaatttataaggtaattaacaaaaatattgatatggtatag

SEQ ID NO: 418106 - DNA, 315 bp, Staphylococcus aureus
atgaaaatatctgagattaataaaatagaagtggaaagtgtaatccctattttaaaagataaaaatgttgtttttacaggtaattttgacactgaaaaacaagatttaatgatattaactagaaagaaaggagcttatatcagaagtgacgtaactgcaaaaacagatattttagtcgaaggtgttcaagatgataaatataaagatgtgaacggactagtttcaaaacaacgaaaagctcgagaatatgttggaaatggtgcaaaaattcaatttttaaatgaagaagacttaataaatttaataaaggaataa

SEQ ID NO: 418107 - DNA, 351 bp, Staphylococcus aureus
atgaatgatgtagtcgaatcactaatttatgaagttagcaatatgcaacaaaattttgaaaatgtgaaatcacaacaacaagatcatgatttttatcaaactgtaaagccatatactgaacatattgatagcttgctcaatgaaatcaaattacatcgtgaatttattatagaagtaccttatatgaattcaaggaaatttgagctactgattgctaacattgaacaactttctgtcgaatgtcattttaagcgaacaagtcgaaagttatttattgaaaagcttaaaagcgttcaatatgatttacaaaatatattagatggcataactaaagagggtacttatggttaa

SEQ ID NO: 418108 - DNA, 267 bp, Staphylococcus aureus; identical to SEQ ID NO: 417358

SEQ ID NO: 418109 - DNA, 231 bp, Staphylococcus aureus
atggcaaaaaatacattactaattgagtctacaattcctctggatattgctgatgctaataaaataattggacaaaacagcagcaaaagtgatattaaaaataatgctaatacaaataatccaactatagatactggtataaggatgacaaaaatagatagaatgcctaaacttaatgaagcagcaacagctcttgaaatattttcaaatgttggtttagattcagcataa

SEQ ID NO: 418110 - DNA, 282 bp, Staphylococcus aureus
atggatgaaaattatcctggaatttcattcgacacaatttatagaaacctgcacttatttaaagatttagggattattgaaaatacagaacttgatggtgaaatgaagtttagaatcgcttgtacaaaccatcatcatcatcattttatctgtgaaaagtgtggagatacaaaggtaatagattattgtccaatagatcagataaaattatcactacctggtgttaatattcacaaacacaaacttgaagtttatggtgtatgtgagtcttgccaagattaa

SEQ ID NO: 418111 - DNA, 183 bp, Staphylococcus aureus
gtgattactgagacgattttttcatataacggtatcggtaaattatttttagaatcggtaataggtcaagactatccattaatgatggcattaacgttatttttctcatttttaggtttactgggtaatttgatttctgatattacttatggatttatagatccaagaattagaagtaactag

SEQ ID NO: 418112 - DNA, 624 bp, Staphylococcus aureus
gtgactccgactcagacagcgactcagattcagacagcgactccgactcagatagcgactcagattcagatagtgactcagattcagacagcgactccgactcagatagcgactcagattcagacagcgattccgattcagatagtgactcagattcagacagcgactcagactcagatagtgactccgactcagatagcgattccgactcagatagcgactcagattcagacagtgattcagactcagacagtgactccgactcagatagtgattcagattcagatagcgattcagattcagatagcgattcagactcagatagcgactcagactcagatagcgactcagactcagatagtgattcagattcagatagcgattcggactcagatagcgattcagactcagatagcgactcagactcagacagcgattcagattcagatagtgactcagactcagacagtgactcagactcagatagtgattccgactcagatagcgactcagattcagatagcgattcagactcagatagcgactcagattcagacagcgattcagacagtgactcagatagcgactcagatgcaggtaaacatataccggctaaaccaatga

SEQ ID NO: 418113 - DNA, 930 bp, Staphylococcus aureus
atgaaagaaaaagaattactaaatcttgaagaagtgaaaatatttaatgtttctacagagaataagagacatcaaaatgcacaggccaagcaaataatacgattatttaatgctgaaacttctcaattaattaataaagtaaatagcaaaaatatcgaaagcatgcagaacaaaatatttaaaagttatgaagggataaataaaatatttgaaacggataatgtacgtattcctgaaactttacttgacataaaacttgagatgttagatttaatgcacaaatatcaagttaagatagaagatgaaaaaatcataagaagagaagaacgagctagactgaaagaaatagaacaagcagaaaaagaaatggagaaaaaactaaaagagcttgataaagacattagacaccacaataatgaaatcaaaaagctgacaatgtatttaaataacacagatttacaagtcgaaaaagaattatatattgaaaagattagagaattagatcaatcactcaaggatttaaattctgaaagagaaaatgtagaggacagaaaagataatgctcaatcagggttcgtttatataatatcaaatatcggttcatttggagaaaatgtttataagattggtgtaacccgtagattagaaccaatggatagaattaatgaattaagtagcgcatctgttccctttgaattcgatgtgcacgctttaattttctctgaaaatgcttttgagcttgaaagcaaattacacgaatactttaaaaaatataaagttaataaagttaacggaagaaaagaattctttaaagttaatattaatgaaattaaagataaagttttatcagaacacaatagcacagttcaattcattgatgaaccaaaagctatacaatacagagaaactttaagattaacttcactctaa

SEQ ID NO: 418114 - DNA, 735 bp, Staphylococcus aureus
atgttggaaactcatataagaaatattattttagaagtatatatgttagaaattgagtataataacaagccttcgacactgttctatttagataaagatttatattttgagaaagttaatgatgagtataaatattctgccaaaaagctaaaagagttcaataggttacaaaatgttttttggagagctatagaaaaaaagaaaagtaacgataacgttaaacataatattaaaaaatacaatattataccagcttgggttttattccaaaattttagttttggagatttgtctactttttatagaactacattaccaacttatagaaataaagtaagtaagcgaattgaaaatttaatagaaaaaaatactggtataagcataaaacttccagaaaagttattgtgtgcatggttgaatagtatcaggtttttgagaaatagaatagctcacacagatataatttatggaattaattttacaaacacctgtgcaaaacatcatagtgatgaggaaatgtatgtaaatatagaaaagtataaatatcagcaaaggttagttacatttttattagctatgaagaaaatatttatgagtatgccagaaaataatattattgaatggaatgagactctaactaagatagagaataaatgttcagaacataactttattaaactttctaggttaggagttattgaaaataacctttcttactttaaaataactaaataa

SEQ ID NO: 418115 - DNA, 1998 bp, Staphylococcus aureus
atggcaatgtaccattttcaaaataagtttgtatcaaaagcaaatggacaaagtgcaactgcaaaaagtgcctataatagcgctagtaggattaaagattttaaggaaaacgaatttaaagattactcaaataagcaatgtgattatagtgaaattttattacctaataatgctgatgataagtttaaagatagagaatatttgtggaataaagttcatgatgttgagaacagaaaaaatagtcaagttgcacgagaaattataattggtttgccgaatgaatttgatccaaatagtaatattgaattagcaaaagaatttgctgaatccttatctaatgaaggaatgattgttgatctaaatattcataaaataaatgaagaaaatcctcacgcacatttattatgtacattacgtggtttagataaaaataatgaatttgaacctaagcgaaagggcaatgattatattagagattggaatacaaaagaaaaacataatgaatggcgaaaacggtgggaaaatgttcaaaataaacacctagaaaagaatggtttttctgttagagtttctgctgattcatataaaaatcaaaatatagatttagagccaacaaaaaaagaaggttggaaagcacgaaaatttgaagatgaaacaggaaaaaaatcttcaatatcgaaacataatgaaagtattaaaaagagaaatcagcaaaaaattgataagatgtttaatgaagtagatgatatgaaatctcacaaattaaatgcttttagttatatgaataaatcagattctactacattaaaaaatatggccaaagatttaaaaatttatgtaacacctataaatatgtataaggaaaatgaaagactatatgatttaaaacaaaaaacttcattaatcactgatgatgaagatagattaaataaaattgaggatatagaggatagacagaaaaaacttgaatctataaatgaggtatttgaaaaacaagctggaattttctttgataaaaattatcccgatcaatcattaaactatagtgatgatgaaaaaatctttatcacacgcactatattaaatgatagagatgttttaccagctaataatgaactagaggatatagttaaagagaaacgcataaaagaggctcaaataagccttaatacagttttaggtaacagagatataagtttagaatctattgaaaaagaatcgaatttctttgccgataaactttcaaatattctcgaaaaaaataacttgtcttttgatgatgtgttagagaataaacatgaaggtatggaagatagtttgaaaatagattattatactaacaaattagaagtttttagaaatgctgaaaatatactagaagattattatgatgtacaaataaaggaattatttacagatgatgaagattataaagcttttaatgaagtaactgacattaaagaaaaacaacaattaattgattttaaaacttatcatggtacagaaaacacaattgaaatgttagaaacaggtaattttattcctaaatacagtgatgaagatagaaaatatataactgaacaagttaagttgttacaagaaaaagaatttaaacctaataaaaatcagcatgataaatttgtatttggggctattcaaaagaaattattgagtgaatatgactttgattatagtgataacaatgatttaaaacatttatatcaagaatccaatgaagtaggggacgaaataagcaaagataacattgaagagttttatgaaggtaatgatattctagtagataaagaaacttacaataattacaatagaaaacaacaagcctatggtttaataaatgctggactagattcaatgatatttaattttaatgagatatttagagaacgtatgccgaagtatataaatcatcagtacaaaggtaagaatcacagtaaacagcgccatgagttgaaaaataaaagaggtatgcacttataa

SEQ ID NO: 418116 - DNA, 777 bp, Staphylococcus aureus
atgaatgaaaaacaatatcctgattttaaaaacaaaaatttaagattggctatcgcgcaagcaatagataaaaaaggatacgttgattcagtgaaaaacaatggctcaattccttccgatacattaacagccaaaggcattgcgaaagcgcctaatggcaaagattatgcgagtaccatgaattcgcctttaaaatataatcctaaagaagcaagagcacactgggacaaagctaaaaaagagttaggtaaaaatgaattgacattttcaatgaacacagaagatacaccagatgcaaaaatatctgctgaatatatcaaatcgcaagttgagaaaaatttaccaggagttactttgaaaattaagcaattaccgtttaaacaaagagtatcactagaactgagtaacaattttgaagcatcacttagtggttggtctgcagattaccctgatcctatggcttatttagaaacaatgaccacaggtagcgcacaaaataatacagactggggtaataaagaatatgatcaattacttaaagtagcaagaaccaaattggcacttcaaccgaacgaacgatatgaaaacttgaaaaaagcagaagaaatgttcctaggagatgcaccggtagcaccaatttatcaaaaaggtgttgcacatttaacaaatcctcaagtaaaaggattaatttaccataaatttggtccaaataactcacttaaacatgtatatattgataaatcgatagataaagaaacaggtaagaagaaaaaataa

SEQ ID NO: 418117 - DNA, 891 bp, Staphylococcus aureus
atgaataatgtattgttagaggttaaagatttagaaacatcattaaaaataaataatgaatggttagcaactgttgaaaatatttcttttgaattatctaaaggagaagttttgggtatagtaggggaatctggttgcggtaagtccatattaagtaagtcaattattaaattattaccagaaaagatatctaaactaagtaatggagaagttatatttgatggtaaacgaatcgatacgctcaatgagaagcaattgctagatattcgaggaaatgatattgctatgatttttcaagaacctatgactgctttaaatcctgtatttaccataaaaaatcaacttgtggaatctataaaatcacataaaaaaatttctaaaaaagaagcaaataacttagcaaaagatttactaaaaaaagttggaattgctagacaagatgaaatattaaatagctatcctcatcaattatctggtggtatgagacaaagagtaatgattgcaatggccatttcatgttctcctaaattattaattgctgatgaacctacaacagcattggatgtcacgattcaagcgcaaatattagacttattaaaagaattgcaaaaggaaacgcaaatggcaattatgatgattacacatgatttgagtgtagttgctgagttttgcgataaagttttagttatgtatgcaggtcaaattgtagaatttggaggcataaaagaaatactacacaatccgaaacatctttatacccaaaaattattatcaacaattccaaaacttaaagaagagcagaaacgacttgaaacgatagaaggaattgtgccatcaatccaagcatttcacgttaataagtgcagatttgcaaatagatgtaacaaataa

SEQ ID NO: 418118 - DNA, 555 bp, Staphylococcus aureus; identical to SEQ ID NO: 407865

SEQ ID NO: 418119 - DNA, 432 bp, Staphylococcus aureus; identical to SEQ ID NO: 407983

SEQ ID NO: 418120 - DNA, 1698 bp, Staphylococcus aureus
atgtgtataagagacagtctagaatctttaaatgatgacaattatgaactgcttaatgataaagaacttgttagtgattcaaatgaattaaaattaattagtaaagtttatatacgtaaaaaagacaaaaaactattagattggcaattattaataaagaatgtatacctagatactgaagaagatgacaatttattttcagaatccggtcatcattttgatgcaatattatttctcaaagaagatacaacattacaaaataatgtatatattataccttttggacaagcatatcatgatataaataatttgattgattatgacttcggaattgattttgcagaaagagcaatcaaaaatgaagacatagttaataaaaatgttaatttttttcaacaaaacaggcttaaagagattgttaattatagaaggaatagtgtagattacgttagaccttcagaatcttatatatcagtccaaggacatccacagaatcctcaaatttttggaaaaacaatgacttgtggtacaagtatttcattgcgtgtaccgaatagaaagcagcaattcatagataaaattagtgtgataatcaaagaaataaacgctattattaatcttcctcaaaaaattagtgaatttcctagaatagtaactttaaaagacttgaataaaatagaagtattagatactttattgctaaaaaaactatcgaattcttcaactacagaaaatatatctatagatatatcaagatttttagaactaagtaatatgatactcttgttagatgatatgctcgacgtcaatatatatataaattcttttaaaaataatacattagagacatttgatgcgactgatcctgaagttgattacatcactgaaataggagattacttattaaaatatgacgttaattctataaatgatgtcagaattgaagtgatagataatttggggcattcaaataatatgctactaaaaacgatactacatgcagaagttgaaatggaagatggaaagaaatatttattacaaaatgggaaatggggttattttaatagagaattttttgaccttttgaatgatcatttgaatgagatagaaattaggtataacacactaactcccacaggtttagtatttaaagaaggagaagaaggatatataaaagaaatagtaggaagattgccagaagaatatttaatgttacataaaaaattcataaaaccaataaataagaattttatagtaaaaggaaatggaatagagttggcagacttatacaatattaaaaacaaagagcttttcacgattaaaagaggaattaatacatctttatctctttatagtctagaacagaatataatagcaattaacgccttaaaatatccagaatcatataattttgaagaattaatagaagctattcctgataactcggaaaatatatttaatgatatacaacggagtacaaattttagtatagtatggattttaccgatatcatctattgataatatgcccataaaagatatggttcatactagtaacgtaataaataaaaactttcaattaactaatttaggttcagtattacttaaaaataaattagtagagtggtctctctatttaaaagatcaaagaattaatccaattatttatatggaaacgccaactgaagatagaaattaa

SEQ ID NO: 418121 - DNA, 186 bp, Staphylococcus aureus
atgcttgaagttgattcgttaattgcactttcaaaggctgggaatatgaatcctaaaataattgttaaagttattagagcaaagccaattaatataaaagagatagaaagtttagtaataccaaataataaagtcattggtaataacaaaagagtttggcaaataactaaacataaaaattcttga

SEQ ID NO: 418122 - DNA, 132 bp, Staphylococcus aureus
atgaaagagattattaattttaatcaaattattggaaaagtacatatcgataatgtgtatattgaaaccagaaaaggaaaagtgcattattcgaagacaggtgctcttatagtaccttatattgataagtag

SEQ ID NO: 418123 - DNA, 1065 bp, Staphylococcus aureus
gtgattacacgtttaccattagggaattcaatcatttcatttctaaaaccattgggaccattaccgcgtcctttatctccaactgtagcgaatgtatcacgtgcaatcttaccgtttttaactaaccttgtagtagtatgtgtgtgctctgtaccagtgtgtaacttcggtattttgtccatacccaacttaccacctacccagtttaaaccttcaatcagtttattaagaccctttttaatagcacttaccatgccgccgatatggtctttgattttaccaatgatagattttaaaccgtcacgcatatttccaaagatactacgtactttgtcccacaaacgaccagctatacctactgtattatctttgatagaattccagatgtttgtcatccaatttcttaattttgtaaatatatctttcgtcgcattccataaacttgtgaatttagatctcacaccagtaaataaagaatgtgctttatcaactgtattactcttgatattattccatgtgttagatagccaatttttcatatttgtaaaaattgatttaacactattgtataagaaaccaaaaatactttttgttgcattccaaattgccgataatgatttcttgaaaacgcctattatagcaacccatataatagttattaaacctttaagtaatccaccaaagtatctcactacacctagaattttacctacaaaccacagttgtattaaattccaaattaactgcacagtacctttcagtatcattacaatgccgtcccaaacgcctcgccagtttcctgtgaaaagactagagaacactttgataatacccaaaataatattaatagccccttgtattacacctttgatattttcccaagtgctgacaatcaaagctttaaccgccggccaaataaattgcatcacttgccaaatcgcaaacatgattggtttaataataaagttaaaaataaattcaaaggttgctttaatgaaaccagctatattttgcaaagcttgtgttatttctgagccgttctctttccagaaagaggctaattga

SEQ ID NO: 418124 - DNA, 1209 bp, Staphylococcus aureus
atgaacaatataaacgatagagatttaactgagttaagtggttattgggtttaccaagatattaaagatggtagtaaatttagagttaacgataaaaaattcaaacaagtcgaagagataacgaaagtagctaataaaaataatagttcagatataaaagtttatgaactattggatgaaaatgaaacacctacaggcaaacaagtattattatttcaaggtacagataaccaaaagagtgatgtgaaaagcaatccttttcgtgggaaggttgctgatgattggattgaaaatataaagttaatgaatgataaaaataagtcaacttctttattagaacaaaataatgcttatattaaatcgtatgaacagaaactaaaagatgcagatacacttaaaagctctgattttttaaggaaatataagcaaaatccgtctacgtataaaaacaaaactattaagtctgatggaggcaattctcaagggggagcaagtgctaaccaccaagggttgattaacccgaataaaaatatagtttctacaaaccctgccatgttaccaaagtcaatatgggaaaatttcaaatctcaaaactttgaaaatatgattaattatcatagtaagtttgatattttatcttggctgcaggatccatttgccactccgacactaggaaaacgagtgaatttagaaactggtgtgccaacgatggatggattagtaaatagtcatttaggttataaaagaaaattaaatccaagatataatacttataaagatttagcagtttataaaattaaatcagttaaagatactatgattaaaaatggtaaaaaagtcaaaaaaactattgaaatcgatataaatatggatgatagaattccaattaatgtgtggacaggagattcaatagcgagaacgggtaaagggactcctataaaattaaatctagaaaatcttagtgcattaagtaatttggtaactggtgaaacaagtaatatgttaaccgattgtgtaaattatttgaatgagagctataatatttcacaggttgaaaattctaattttggagaaagaaaacataaacttaaacaagattttaaaaagattgtcgaagttgatatccttgaaggaatgagtagggaattaacttcttttaaacaggatgtatttagcgcaattgatgatgtcaaaaaaatcttgttgtaa

SEQ ID NO: 418125 - DNA, 966 bp, Staphylococcus aureus; identical to SEQ ID NO: 412984

SEQ ID NO: 418126 - DNA, 972 bp, Staphylococcus aureus
atgctatttgcgcatttgaaaaactttagcaaatcaccacctagtggcacgatggtaaagcccggcgatgttgttggtttaactggtaataccggatttagtacaggaccacacttacattttgaaatgaggagaaacggacgccattttgaccctgaaccatatttaagaaatgcaaagaaaaaaggtaggttatcaattggtggcggtgatgctacttctggaagtggtgcaacttatgccagccgagtaatccgacaagcgcaaagtattttaggaggacgttataaaggtaagtggattcatgaccagatgatgcgagttgcaaagcgtgaaagcaactatcaatcaaatgcagtgaataattgggatattaatgctcaaagaggagacccgtctagaggattattccaaattatcggctcaacttttagagctaacgctaaacgagggtacactaattataataatccagtacatcaaggtatctcagcaatgcagtacattgttagacgatatggttggggtggttttaaacgtgctggtgattacgcatatgctacaggtggaaaagtttttgatggttggtataacttaggtgaagacggtcatccagaatggattattccaacagatccagctcgtagaaatgatgcaatgaagattttgcattatgcagcagcagaagtaagagggaaaaaagcgagtaaaaataagcgtcctagccaattatcagacttaaacgggtttgatgatcctagcttattattgaaaatgattgaacaacagcaacaacaaatagctttattactgaaaatagcacaatctaacgatgtgattgcagataaagattatcagccgattattgacgaatacgcttttgataaaaaggtgaacgcgtctatagaaaagcgagaaaggcaagaatcaacaaaagtaaagtttagaaaaggaggaattgctattcaatga

SEQ ID NO: 418127 - DNA, 255 bp, Staphylococcus aureus
atggaaacaattgctattataaatgaatatcaaaaagatatatcttatttaaaaaatataattaataaaatgaatgaaaatagagcttataatcatattgatagttttatcacttcagagtaccgacgaaaaataaacgattataatctttatcttgataaatttgaagaacagtttagtcaaaagtttaaaataaacagaacttcgataaaagaaagaattattattaatttaaacaagaggagatttaaatga

SEQ ID NO: 418128 - DNA, 171 bp, Staphylococcus aureus; identical to SEQ ID NO: 410802

SEQ ID NO: 418129 - DNA, 171 bp, Staphylococcus aureus; identical to SEQ ID NO: 410802

SEQ ID NO: 418130 - DNA, 567 bp, Staphylococcus aureus
gtgattaaacacggaccaaaaacgggtacaccagaaacaaaaacagtagagataccgtttgaaacaaaacgtgagtttaatccaaaattacaacctggtgaagagcgagtgaaacaagaaggacaaccaggaagtaagacaatcacaacaccaatcacagtgaacccattaacaggtgaaaaagttggcgagggtcaaccaacagaagagatcacaaaacaaccagtagataagattgtagagttcggtggagagaaaccaaaagatccaaaaggacctgaaaacccagagaagccgagcagaccaactcatccaagtggcccagtaaatcctaacaatccaggattatcgaaagacagagcaaaaccaaatggcccagttcattcaatggataaaaatgataaagttaaaaaatctaaaattgctaaagaatcagtagctaatcaagagaaaaaacgagcagaattaccaaaaacaggtttagaaagcacgcaaaaaggtttgatctttagtagtataattggaattgctggattaatgttattggctcgtagaagaaagaattaa

SEQ ID NO: 418131 - DNA, 255 bp, Staphylococcus aureus
gtgtcatataacccagaagtaccaatatattctgcgcagtatcaactgaaaaacagcgattataatgttgaacaattaaggaagcgatacaatataccgacgaaaaaagcgcctaaattattattgaaagggtcaggtaatttaaaaggttcatcagtcggatataaaaatattgaatttacctttgttgaaaataaggaagaaaatatttacttcacagatagtgtctactttaatccaagcgaggataaataa

SEQ ID NO: 418132 - DNA, 456 bp, Staphylococcus aureus
atgttactaaatttaaatattgctaatatgattaaaggtaagcagcactttaaaacaattcgttttattaatacagtttgtaaaagtattctcttagtactaatagctagtgtaatgatagaaaatactagtgttattaaagatttgaataaaataaaggaaactgagaaatattggaatgtattagatgattattacacgattgaatttgcaccttatcacgaaacgaaacaaagtttgattgataatatgctgcgatcagaacaattagtaaaggctagtgaagcagaaaataatgcgattttattcaaaccaaagggtgactccgttgacaatgacaacttttcgcctgatgaggggaatgtaatattagtaaataatcagttctggtcgatttattacaagcagtttcaacctgatattccgataaaaaatcaaaaaataatgtcgaagtaa

SEQ ID NO: 418133 - DNA, 231 bp, Staphylococcus aureus
atgatattgaaatttgatcacatcattcattatatagatcagttagatcggtttagttttccaggagatgttataaaattacattcaggtgggtatcatcataaatatggaacattcaataaattaggttatatcaatgaaaattatattgagctactggatgtagaaaataatgaaaagttgaaaaagatggcaaaaacgatagaaggtggagtcgcttttgctacttaa

SEQ ID NO: 418134 - DNA, 1239 bp, Staphylococcus aureus
atgagtaatacacaaaagaaaaatgtgccagagttgagattcccaggatttgaaggcgaatgggaagagaagcagttaggggatcttactaccaaaataggtagtggaaagactcccaaaggtggaagtgaaaactatacaaacaaaggcataccatttttaaggagtcaaaatattagaaatggtaaattaaatcttaatgacttagtttatattagtaaagatatagatgatgagatgaaaaatagtagaacgtactatggtgatgttcttttaaatattacaggagtatcaataggtagaacagccattaattcgatagttgaaacgcatgctaatttaaatcaacatgtatgtattattagattgaaaaaagagtattattatattttttttggacagtatctattatcaagaaaaggaaaaaggaaaattttccttgcacaaagtggaggtagtcgagaaggtctaaacttcaaagaaattgctaatttaaaaatcttcaccccaactatatttgaagaacagcaaaaaataggcaagttcttcagcaaacttgaccgacaaattgaattagaagaacaaaaacttgaattacttcaacaacagaaaaaaggctatttgcagaaaatcttctcacaggaattgcgatttaaggatgagaatggaaatgattatccagagtggagatttgctagatttaaggactttatgtataaaccaataaacatacgacctgcaataaatattagtaagtcagaattgctaactgtaaaattacattgtaaagggatagagaaagctaatataaatcgagtattaaaactaggagctacgaattattataagagatttgaaggtcaatttatttatgggaaacaaaactttttcaatggagcatttgacatagtgccaaaaaaatttgatggactttattcatcaagtgatgtgccagcgtttgaaataaataccgaaaagattgaacctaactattttatcagctatatctctagaccaagcttttataaaagtaaggaaaaatattctactggtacaggtagtaaaagaatacatgaaaatacggtgttaaatttctctttacatttaccttgtttaaacgaacaattaaaaattgcttctttcgtttgttttctcaatagaaaaattgaattactagaaagaaaaatctatctaataaagaaacaaaagcaagctttgcttcaacaaatgtttatttaa

SEQ ID NO: 418135 - DNA, 441 bp, Staphylococcus aureus; identical to SEQ ID NO: 409818

SEQ ID NO: 418136 - DNA, 690 bp, Staphylococcus aureus
atgagggattcaaaaagagtagtattgtacataagcattatggtgttgagtatttttataattggttgtaatagttcaagcgagaatgcaaaaaaatcaaaagaagactcaaaagaagaccaaattaaaaagagctttgcgaaaacattagatatttacccaatcaaaaatcttgaagatttatatgacaaagaaggatatcgagatggcgaatttgaaaaaggtgataaggggacgtggacgatatatacagattttgccaaaagtaataaagcgggtgaattggatagtgaaggtatggtattacatttgaatagaaatacgcggacggctaaaggagaagatgaaaaactcaaacataaaatagaaaattttaaattttttgggcaatatgcagattttaaagacttgaaaaattatcaaaacgggaaaatatcgagcaatgaaaatgttccatattatgaagcagagtacaaaatagaaaatagtgatagaaatgtaaaaaaacttagaaatgtttatccaattacaaccagtgaatcgccaactttaaaatttcatatagatggggatataaaaggtagctcgataggatataaaaaagtggaatatatcttttcaaagcaaaaagataaccaaatttctgtcagtgattttttaaattttaacccatcaaaagataatcagtag

SEQ ID NO: 418137 - DNA, 1224 bp, Staphylococcus aureus
atgacaacttttagtgaaaaagaaaaaattcaattactagcagatattgttgaactacaaactgaaaataataatgaaatagacgtttgtaattatttaacagatttattcgacaagtatgatattaaatctgaaattttgaaagttaatgaacaccgcgccaatatcgttgcagaaatcggtaacggctcacctatactcgcattgagtggtcatatggatgttgttgatgcaggaaatcaagataattggacttatcccccttttcaactcacagaaaaagctggcaaattatacggtcgaggcacaacggatatgaaaggcggtctgatggctttggtcatcacactcattgaattaaaagaacaaaatcaattgcctcaaggaacgataagattactagctactgctggcgaagagaaagaacaagaaggtgccaaattattggctgataaaggctatttagacgatgtagatggcttaattattgctgaaccaactggatctggaatttattatgcacataaagggtctatgtcatgtaaagtaactgcaactggcaaagctgtccatagctcagttccatttattggtgacaatgcaattgatacactgcttgaattttataatcaatttaaagaaaaatattcagagcttaaaaaacatgatactaaacatgaattagatgttgcacccatgttcaaatcattgataggaaaagaaatttctgaagaggatgcaaattatgcatctggtcttacagctgtatgttcgattataaatggcggcaaacaatttaactctgtaccagatgaagcttcacttgaatttaacgtaagaccagttcctgagtatgataacgactttatagaatcgtttttccaaaatatcattaatgatgtggatagcaataagctttcactcgatattccaagcaatcaccgacctgtaacaagcgataaaaatagcaaattaattactacgattaaagatgtagcttctagttatgtagaacaagacgatatatttgtttcggcgcttgtaggtgcaacagatgcctctagtttcttaggtgataataaggacaatgttgatttagccatttttggaccaggtaatccattaatggcacatcaaatcgatgaatatattgaaaaagatatgtatctgaaatatattgatatttttaaagaagcttccattcaatatttaaaagagaaataa

SEQ ID NO: 418138 - DNA, 414 bp, Staphylococcus aureus
atgaggtctataaaaaggatcagattgtgcataatcctattgattctaatcatttttgtaacatcttgcggtggtggtaataagattactggagattcgaaagaaacacaaatcaaaaagagttttgcgaaaacattagaaatgtacccaattaagaatctcgaggatttatacgataaagaaggatgccgtgatggtgaatttaaaaagggggacaaaggtacatggacaatatcaacagattttgctaaaagcaacaaacaaggtgaaatgaatagcgaaggtatggtactacattttaatagaaatacgaggacagcaagaggatattatactgtaagaacaacttatgatgaagtggataagttggcacgcgaaaaaaataccgtgttgaatttaaaaacaataagatag

SEQ ID NO: 418139 - DNA, 420 bp, Staphylococcus aureus
gtggaattacaattagcaattgatttattaaacaaagaagacgcggctgagttagcaaataaagtaaaagattatgtagatatcgtagaaatcggtacgccaatcatttacaacgaaggtttaccagcagttaaacatatggcagacaacattagtaatgtaaaagtattagcagacatgaaaattatggatgcagctgattatgaagttagccaagcaattaaatttggcgcggatgtaattacaatactaggtgttgcagaagatgcatcaattaaagcagctattgaagaagctcataaaaataataaacaattactagttgatatgattgctgttcaagatttagaaaaacgtgcaaaagaactagatgaaatgggtgctgattatattgcagtacacactggttatgatttataa

SEQ ID NO: 418140 - DNA, 276 bp, Staphylococcus aureus
atgacacatttccgttcaaatccaccgcaagagattcaaggactgaaagtgaaagcaattgaagattatttaactagcgaggtttatcatttggataaagatacaacgtcacagattaattcttctaaatcaaatgttattcgtgtcttatttgacgaaggatttatcgctttacgtccttctggtactgaacctaaaattaaattatatgtgtcgttaaaatgtccggattttgatgatgtagctcaaaaaattaatgcgatgatttttagctaa

SEQ ID NO: 418141 - DNA, 237 bp, Staphylococcus aureus; identical to SEQ ID NO: 409168

SEQ ID NO: 418142 - DNA, 1014 bp, Staphylococcus aureus; identical to SEQ ID NO: 418034

SEQ ID NO: 418143 - DNA, 279 bp, Staphylococcus aureus
atggcagagttcattttaagtgcacaaaaaataatttcacgtacaatcgatccagttaaacaagctgtcctttcatttggaatgattcaagcaggtaccacagatagcgttattcctgatcaagcattttgtaaaggtacagttagaacattcgattcagatatacagaatcatgtaatggacaaaatggataagctactacaaggtttagcaatagcaaatgatattaactacgatttgaattatattaaagggtatttgcctgtccataacaactag

SEQ ID NO: 418144 - DNA, 699 bp, Staphylococcus aureus
atgaaagatgtcaaagcactcaagttaatgacattaaatgatgttttaagtcaaatcaatggtgacatgacgctgggaattggtacaggaagtacaatggaattactcttacctcaaatggcgcaactaattaaagaacgtggttacaatattacaggtgtatgcacttctaataaaattgcatttttagcaaaagaattaggtattaaaatatgtgaaatcaatgatgttgatcatatcgacttagcaattgatggtgctgatgaagtagatccatctttaaatataattaaaggtggcggtggtgcgctgttcagagagaaagttatagatgaaatggcatcgcgttttgttgtggttgtcgatgaaacgaaaatggttcaatacttaggtgagacgtttaagttaccagtagaggtggataaatttaactggtatcacatattacgtaaaattgaatcatacgctgatataaaagtagagcgtcgtgtaaacgaagatgtcgcatttataactgataatggcaattatattttagattgtaagttaccaaaaggaattgacccatataagttccatgagtatttaattcatctgacaggtgtgtttgagacaggatacttcttagatatggcagatcaagttattgtaggcactcaagagggtgttaaaattttagaaaaacaatatatagtatag

SEQ ID NO: 418145 - DNA, 213 bp, Staphylococcus aureus
gtgaacgaagaacaaagaaaagcaagttctgtggatgttttagctgagagagataagaaagcagaaaaagattatagtaaatattttgaacatgtttatcaaccgcctaatttaaaagaagcgaaaaaagaggtaaacaagaagttcgttataatagagatttccaaattgatgaaaaatatcgcggtatggggaacgagcgtacatttttaa

SEQ ID NO: 418146 - DNA, 153 bp, Staphylococcus aureus; identical to SEQ ID NO: 411673

SEQ ID NO: 418147 - DNA, 141 bp, Staphylococcus aureus; identical to SEQ ID NO: 409390

SEQ ID NO: 418148 - DNA, 846 bp, Staphylococcus aureus; identical to SEQ ID NO: 407199

SEQ ID NO: 418149 - DNA, 243 bp, Staphylococcus aureus
atgtcgcaaaatttatggtatttcagatactttatttactatttaataaaagaaaatgtgatttcaaaaaaagaaattaatagttattgcatgagtcaaaaatatggttcaaatcagaaaggatataagagcgatttaaactggaattatattaattcaaaagataatgtggatgaattttttagtgaattattagaagaaaaagtaccactcatagatttaaattatgtaaatttaatataa

SEQ ID NO: 418150 - DNA, 1524 bp, Staphylococcus aureus; identical to SEQ ID NO: 407198

SEQ ID NO: 418151 - DNA, 846 bp, Staphylococcus aureus
gtgattgaagaaatcgaagaaaatagccacgtggatattaagagtgaattaggttacgaaggtggccaaaatagcggtaatcagtcatttgaggaagacacagaagaagataaaccgaaatatgaacaaggtggcaatatcgtagatatcgatttcgatagtgtacctcaaattcatggtcaaaataatggtaaccaatcattcgaagaagatacagagaaagacaaacctaagtatgaacaaggtggtaatatcattgatatcgacttcgacagtgtgccacatattcacggattcaataagcacactgaaattattgaagaagatacaaataaagataaaccaaattatcaattcggtggacacaatagtgttgactttgaagaagatacacttccacaagtaagtggtcataatgaaggtcaacaaacgattgaagaagatacaacacctccaatcgtgccaccaacgccaccgacaccagaagtaccaagcgagccggaaacaccaacaccaccgacaccagaagtaccaagcgagccggaaacaccaacaccgccaacgccagaggtaccaactgaacctggtaaaccaataccacctgctaaagaagaacctaaaaaaccttctaaaccagtggaacaaggtaaagtagtaacacctgttattgaaatcaatgaaaaggttaaagcagtggtaccaactaaaaaagcacaatctaagaaatctgaactacctgaaacaggtggagaagaatcaacaaacaacggcatgttgttcggcggattatttagcattttaggtttagcgttattacgcagaaataaaaagaatcacaaagcataa

SEQ ID NO: 418152 - DNA, 180 bp, Staphylococcus aureus; identical to SEQ ID NO: 408994

SEQ ID NO: 418153 - DNA, 180 bp, Staphylococcus aureus
atgttaagttatggtagattgcttaaacaaaagcataaaattttaaatttagataatgttgaagatggtaatttgattaatacaagtgatgaagataaaacgacagacgaagaagaaaaagcacattcgattacagcaatttggaatttcgaaaagcaaaattattgtttaagacattag

SEQ ID NO: 418154 - DNA, 195 bp, Staphylococcus aureus
atgaataatacgattagacaagtatcagctgcaataggtactggtatcttggtcacattgatgacaggattaggtaaaacctcttcattaagtggtagtcaaggacttattcatggtctagatattacattctatgtcgtcgcattgattgcctttataggtactatcattgcattctttattcgcaaacattaa

SEQ ID NO: 418155 - DNA, 414 bp, Staphylococcus aureus; identical to SEQ ID NO: 410173

SEQ ID NO: 418156 - DNA, 612 bp, Staphylococcus aureus
atggagttcttattattaattgtcgtagccggactgtattatattatatatttaactgctgtgatgtattctgaaaaaatagtagtattgcctataatcatctatgccattgtgtttgtaataattggtatcacttatatctttataggcgacagctatgatcaattaacaaatttcaatgtgattttgtatatggggagtttgttttatgcatggatggcttttagaaatctttggaacagaccattattattaaaatataagaatattacagatagttcaagtggaatagttaataaatctgaatacaattcagttgaaagcttacgtataaacattgaaatagctaagtataaagggattatttctttgatagtagctatagtactaacggtactaatgacattaaagtcaacacctcaaatcactgcagaaacacgtgacttaagtatctcatttttcatactcagcttatttatcattgttatatttgctgtttgggatttaattattagagttagaaaaggagcgtttacttttgttgtaataaggccaacattattcagttgttggttatttattttgaatatgattttatcaagattattataa

SEQ ID NO: 418157 - DNA, 771 bp, Staphylococcus aureus; identical to SEQ ID NO: 414176

SEQ ID NO: 418158 - DNA, 390 bp, Staphylococcus aureus; identical to SEQ ID NO: 408590

SEQ ID NO: 418159 - DNA, 639 bp, Staphylococcus aureus
ttgctttgcgacgttgaagtggttaataagaatcctaaatatagaattattaaatataatgatgaatatttgatgatcgatttagtaagtacctggctaactttatttcttcctatgatgaattggttaatccctaaaaaatacgtgaagattaataaagaagaatttgaaaatttaaacattgttaaacctactaaaaatagagctttttggccagctgcaggcggctcagttttatttggagttacattcaggaaatatactcaatttcttaatattcaattagaaaaaaacttggttattaccatatgttgcatgatatttctagctgtttttacattatttttatatttaaataaaaaattaaagttgcatatgtttgaggacaataaaaatgataacgataaaatcatattaatccctacatttaaaaatatttgtttatccctaattgcctatgtgtttttcggtggcttttcaataatgcttttaagtatgttgatgaccttaaatcctcaaaatataataggattcttagctttgtttggtatgattgcagctttctttatagcaaacaggtcttcaattatcgataaaaatgtttacgcaatactaaggtcaaaagaggttgagaagtga

SEQ ID NO: 418160 - DNA, 600 bp, Staphylococcus aureus
gtgccacaaattcatggattcaataagcataatgaaattattgaagaagatacaaacaaagataaacctaattatcaatttggtggacacaacagtgttgattttgaagaagatacacttccaaaagtaagtggtcaaaatgaaggtcaacaaacgattgaagaagatacaacgccgccaacaccgccaacaccagaggtaccaagtgagccggaaacaccaacaccaccaacaccagaagtaccgagtgagccaggcgaaccaacgccaccaaaaccggaagtaccaagtgagccggaaacaccagtaccaccaacaccagaggtaccatctgaacctggtaaaccagtaccacctgctaaagaagaacctaaaaaaccttctaaaccagtggaacaaggtaaggtagtaacacctgttattgaaatcaatgaaaaggttaaagcagtggcaccaactaaacaaaaacaatctaagaaatctgaactacctgaaacaggtggagaagaatcaacaaacaaaggtatgttgttcggcggattattcagcattctaggtttagcattattacgcagaaataaaaagaataacaaagcataa

SEQ ID NO: 418161 - DNA, 867 bp, Staphylococcus aureus; identical to SEQ ID NO: 416024

SEQ ID NO: 418162 - DNA, 744 bp, Staphylococcus aureus; identical to SEQ ID NO: 404905

SEQ ID NO: 418163 - DNA, 1335 bp, Staphylococcus aureus; identical to SEQ ID NO: 408553

SEQ ID NO: 418164 - DNA, 330 bp, Staphylococcus aureus
gtgatttcttctttcgattcacctttactaataatttctccagttaatggattttttagtgttggcgtcgttattgtcttctcacctttttgtccttctcttgttactttttctgtccctggtgctaaatcaggattaaatttacgttctttctcgaatggaatttcttctttttctacaatcgagtctccttttacaggtccatattttgttacgctatcgaccggtggtctaactacatctcctgtttctggattcttaattcctggtttacctggaacttcctctttctctcctgttggtaacttcggatcaaattcgtctcgatga

SEQ ID NO: 418165 - DNA, 1077 bp, Staphylococcus aureus; identical to SEQ ID NO: 408550

SEQ ID NO: 418166 - DNA, 309 bp, Staphylococcus aureus; identical to SEQ ID NO: 411655

SEQ ID NO: 418167 - DNA, 267 bp, Staphylococcus aureus; identical to SEQ ID NO: 410062

SEQ ID NO: 418168 - DNA, 1638 bp, Staphylococcus aureus
atggataaagaattatggatagaaagagctaatgatagtttagttaaacatttttatgagcagcaatctgacattgaacagcgagaaggttttgaaagtaaattaacatttggtactgcgggtatacgcggaaaattcggtcttggtgaaggtcgacttaataagtttactattgaaaaattggcattaggtttagcgcgttatttaaatgcccaaacaaacagtccaacaatagtcattcattatgatattagacatctttcaactgaattcgcccaaattattgctaatgtattagcaaaccatcaaataacagtttatttacctgatacatataaaacgacaccggaattatcgttcgcggttcgcaatcttaatactactgccggcattatgattacagcaagtcataatccgaaagactataacggcattaaagtatatggttctgatggcgcgcaattatcgactgatgcatctgagcttgcaagtcgttatatcgaagaagttggcgatccattacagattgatatacctatttcaaaacaaaatacatcttatatcaaaccttttccgaaatctgtaactgatgactatatgaaacacattcaaaatatgattggctatattcctaaatctgatttacaagttgtgttcactagtttgcatggtacaagtgttccaattgtacctgagttattaaaatctttgaatttcaatcaatttaatcttgtagatgcacaatgtaaacctgatccgaattttagttcagttcaaagtgctaatcctgaagatcatcgcgcttttgatcaagcagtcgaacttgcaaataaaagtcatgcagacttattaatatcaactgacccagatgcagatcgacttggtattgctgaacgtgatgcacatggtcatatcacatattttaatggcaaccaaattggtgcgctgttacttaattatcgtattcaacaaacgtctcaattacgtcaccgcttaatgattcaatctattgtaagtagtgagttaacaaagtcattagcacgctataataatgttaaatacaaagaggtactgacgggctttaaatttattgctcaggaaataagacaactggatgatcatcaaaatatgattttcgcatttgaagagagttacggttttctatcagagccttttgtacgtgataaagatgccgtacaaattgtgccactcattataaaatacgcttctgagttaaaattatatggcaaaacattgaaagatgaattagaacagatttatcaaactgttggtagacatgaggatacattattctcgcatacgctagaaggattagaaggtaagaaaaaaattgaatcaattatgacacatttccgttcaaatccaccgcaagagattcaaggactgaaagtgaaagcaattgaagattatttaactagcgaggtttatcatttggataaagatacaacgtcacagattaattcttctaaatcaaatgttattcgtgtcttatttgacgaaggatttatcgctttacgtccttctggtactgaacctaaaattaaattatatgtgtcgttaaaatgtccggattttgatgatgtagctcaaaaaattaatgcgatgatttttagctaa

SEQ ID NO: 418169 - DNA, 393 bp, Staphylococcus aureus; identical to SEQ ID NO: 408047

SEQ ID NO: 418170 - DNA, 2862 bp, Staphylococcus aureus; identical to SEQ ID NO: 408048

SEQ ID NO: 418171 - DNA, 510 bp, Staphylococcus aureus
atggaatctagaagtatggtgctctatataaatcgtaatactagaacaacgaaaggtaattttattgttagagaattgtgggaagatagtaaagggtatgcacaaagtaaagatacaaaatatccagtgaaaatggaacataatcgaattatcccaacgaaaccgatagctgatgataaattaagaaaagaaatagaaaactttaaattctttgtacaatacggtgactttaaagatattaatgattataaagatggtgacatttcatataatcctaatgttccaagttattccgcaaaatatcaattgaaaaacgatgattacaatgtgaagcaacttcgaaaaagatataatattccaaccaacaaagctccgaaactattattgaaaggtgatggtgatttaaaaggttcatcaataggatcaaaaaatctagaatttacctttgtagaaaataaagaagagaacatttatttttctgatagtattaatttcaaacctactgaatag

SEQ ID NO: 418172 - DNA, 294 bp, Staphylococcus aureus; identical to SEQ ID NO: 418037

SEQ ID NO: 418173 - DNA, 363 bp, Staphylococcus aureus
atgatgatagagtctgggacatcacaatgtcctaggctctacaatgttatattggcggggccccaacacagagaaattgggaccccaatttcaacaggcaatggaagttggcggggccccaacacagagaaattggaaccccaatttcaacaggcaatggaagttggcggggccccaacacagagaaattggaaccccaatttcaacaggcaatggaagttggggacggggcccaacacagaagctgacggaaagtcagatttcaataatgtgcgagttggggtaaacgaatttaattttgttaaaatatcatttctgtcccactccctatgcatgagtctaattatgtattcctatttttaa

SEQ ID NO: 418174 - DNA, 363 bp, Staphylococcus aureus
gtgaagtatagaaaattaataattttagtgttgagtatcttgatcatattgcctgtaagcacactggatggtcatcatattgcaaatgcagatgacgattcacctaaaaaactgaaatataaagaaaatagtgctctggcattaaattatcaccgtgtaagaaaagcgaattttctgaataatttcatttacttcttttctagtagtaaagaaattaaaaattatagtgttagtcaatcacaatttgaatctcaaataaaatggctaaaatcacatgatgctaaatttttaaccttgaaagaatttttatattacaagaaaaaaggtaagtttccaaaacgaagtgtatggattaacctttga

SEQ ID NO: 418175 - DNA, 687 bp, Staphylococcus aureus
atgcgtaatgaaatcaatcaagcatatcattcatggtttgaatttgtacaaaataaaaataataaagagaataagttatctatacagtttatcaacaaaaatgattatcgaattttttcatttgatgcacgagatagtcgccatttgtcatttatagaggcgccaatcattgtgaatgttcaggcatcagatttatcgaatgatttttattatgccatgatcagtcaaggcgggtatttattcaaaaattatgacgcgctagtaaaaaatattgaaaagtatcatcttgatggggaaatcagtggaataaccaattataaagatagcgtgatggaaatgtatcatgaaaacaatttgaaattaacagtactcaacttttcacaaatcattatcgcaatcattttaataattattattttatttgatgtgaaatattattttgaacagcatcgaaaattactcgtaatcaaaaagctatatggttattcaacattaagagccaattaccaatacttattaataaataatatagttgttgtttttattggaatattgacgaatgtaattttacattctcagtatataatgatgatatttgcaacgattcttgtcgttcaaatattattgcagatttgcagcctatactatcatggccgacgttttaatgaagttatcaaggagttttaa

SEQ ID NO: 418176 - DNA, 327 bp, Staphylococcus aureus
ttgaaaattttaaatttttttagtcagtatgccgattttaaagatttaaaaaattatcaagatggaagtataacaactaatgaaaatgtaccgagctatgaagcagaatacaaattgaataatagtgatacaaatgtaaaaaaacttagagatatttatccaattacaacgaaaaaggctccaatattaaagttacatatagatggtgatataaaaggaagttcagttggatacaaaaaaatagaatataaattttcaaaagttaaagatcaagagacaacattaagagattatttaaattttgggccgtctgatgaagatagctaa

SEQ ID NO: 418177 - DNA, 327 bp, Staphylococcus aureus; identical to SEQ ID NO: 418176

SEQ ID NO: 418178 - DNA, 144 bp, Staphylococcus aureus
atgaataaagctcatgatgaatttaatgaaaaagatcaacaaaaaaaatatcatgttgaacttaaaaataataagattgttcttttagataatgtagaagacgaaaaacttaaacaaaaaattgaaaattttaaatttttttag

SEQ ID NO: 418179 - DNA, 375 bp, Staphylococcus aureus; identical to SEQ ID NO: 413586

SEQ ID NO: 418180 - DNA, 732 bp, Staphylococcus aureus
atgttactcattggggtattcggcgggttcatatctggtctagtaggcgtaggtggtgctatcattatttatccagctattttattattaccaccattattcggagcccctgcatatagcgcatatatcgcatcaggtcttacttctagccaagtctttttcagtacattaagtggctcattaaaagctcgaaaaaaaacagagttctcgccacaattagttctttatatgggtggcggcatgattatagggagtatgttaggtgcatttctagcaaatttatttgatgctatatttgtaaatacggtatatatcattattgctttacttgcattaacattaatgtttattaaagtgaaacctagttccgaaaagtcttcatttaataaatatttattagttatcattggccttttcattggtatcatttcaggtatagtaggtgcaggtggtgccttcattattattcctatattattagttttattcaaattaccaatgaatactgtagtcgctaatagtatagtaattgcttttatatcttcaattggtgcttttgtcatcaaacttattcaaggttatatccctttatatgacgccttattccttataatagggagtattatatttgctccaatagggttaaaattaagtaaaaaagtccctaacataatacaaaaatggattatcagtattttaatcgtttttgctatagttcaactcattttataa

SEQ ID NO: 418181 - DNA, 531 bp, Staphylococcus aureus; identical to SEQ ID NO: 407478

SEQ ID NO: 418182 - DNA, 1017 bp, Staphylococcus aureus
ttgactgtttttaaaaatgagcgcttaagctggttaccatacatagctattgtcattttgttacacgttattgggtttagttttttatggattgctggaaaagactatcatatcttatttggtatggggattcttgcatatacattaggtttacgtcatgcatttgatgctgatcatatcgccgcgatagataatacggttcgcaaattattacagcaacgcaaagatccatctggtgttggtttctacttttcaattggacattcatctgttgtatttttaatggctgtttttttaggagtatctgtaaaatgggctaaagatgaattaccacatttccaagatattggtggaacgattggtacactagtatcaggtttctttttagtgcttatcggtgtgttgaatctaattattttaatctctttaattaacttgttcgctaaattacgtcgtgaacacattgaagaagctgaagtcgatgcattacttgaatctagaggatttgtttctcgatttgtaggaccttatttcaaattaatcacgcgtagttggcacgtattgccacttggctttttatttggacttggttttgatacagctagtgaaattgcgttactcgctctttcttcaggcgcgtcacaacaggccatttcatttatcggaatcttatctttaccaattttattcgcatcaggtatgagtttgttggatactttagatggtgttgtaatgaaatatgcctataattgggcattcttcaatcctattcgcaaaatctattacaatataacgattactgcgatatctgttatagctgcattagtgattgggatgattgaattgctgcaaattcttgctgataaactagaattacatggtacattttggtcattcattgcttccattgaatttgactacttaggttatattctagtcgctttatttttaattacttggcttatttcaagtttaatttggaagtttggtcgcatagaacacaaatggtctaaataa

SEQ ID NO: 418183 - DNA, 660 bp, Staphylococcus aureus
atgtgtataagagacagttctaaaagattaagcggtaccttgatttcaaagataacacttgataaaaaagattacttatgtatttctactgaaaatataccgcctcaatacagagaaaatgcatctacaagcttttatataaaaaaaatagatggtataagaaagtggcttgaatctgaattattaactaacctgttagctttagattttgaatatacaattcagtgtataagaaaagatgccgaagaaactgatttaatagttagcgctcagtcaatgaatataaacggcggagccaaagcaactttagattcaacaagctctcaagtattaatacttcctattttagacgaaattaaaaatctattagaagataattctgaactatttaaggaatcacaagaaggttataaaatacttaatgattacattgatgaattggaaaaagaatctgagttaccatgggttaccttaagttttaataaaaaaactcaagtcaagtttttatttgaagtatcaacaagaaaggattatactttattaaattattacagtggagactatataaaaagacaaggaagggaagaaatgaaaaatgttacaaaaaccatattatcaagatataatacattcagtaatctcttctcaagaggtgtctaa

SEQ ID NO: 418184 - DNA, 216 bp, Staphylococcus aureus; identical to SEQ ID NO: 405670

SEQ ID NO: 418185 - DNA, 909 bp, Staphylococcus aureus
atgttttacattttgttgattattcattattttattatttgttattttgttttcagtgtacatccaatgctaagtttgtttttcttttatagtgcttttgccgttccatttacttttaaaaataatgttaaaaaaacggcaactaatcttttcatactaacaatgattatatgtacaataataacgtacttattgtataacaactattttgttgcaatgatggtttattatgtcgttatatcgttaataatgctagataattttaaaaaaatgaaaaaccgtgaatatcaaaaagaaatagcagaaaaaaatagacatattaatacattaattgctgaacaagagcgacatagaattggtcaagacttacatgatacgttagggcatgtgtttgcaagtttatcattaaaatcagaattagcttataaactaatagatactgatgtagaaaaagtaaaagctgaattattagcaattaataaattatctcgtgaatcattgaacaaagttcgagaaattattgatgatgtaaaattaccatcatttattgaagagattgatagtatacgtaaagttttaaaagatgctgatattgattttacatttgaaaataaagaattagcgcaagtattaagtcctactaaacaatctatgttagttatgattacgcgtgaagcgataaataatgttattaaacatgcaaatgcttcaaaagttcatggtaaattaaaaactgtaaacaatcataaattactgcttatgattgaagatgatggcaaaggtatcgatagtgattgtgaggtgaaaagtatttcacagcgtgtacaacatttaaatggaactttagcagtcgactcaacaaatggaactaaaataatcattgaaatctcaacaggaggaatagcatga

SEQ ID NO: 418186 - DNA, 804 bp, Staphylococcus aureus; identical to SEQ ID NO: 415185

SEQ ID NO: 418187 - DNA, 648 bp, Staphylococcus aureus; identical to SEQ ID NO: 409262

SEQ ID NO: 418188 - DNA, 699 bp, Staphylococcus aureus
ttgcttggggttagctttttaactggcaatttattgttattgccaaaattaggtgcaacattaactgtaattgcaacagttgcgggtcaaattattatgggtgtcattattgatacatttggcttatttggcgctacaattcatgattttaatttaattaaagcaattggagtattgttactcattgtcggcatcgtcataatgaatcaatttaacaagaataatttattactaactgatcaaaagtatttactgttttggcttctcttaggatttatttttggtttctttccacctattcaaacgacaattaatagtgctttagcaagtcatactcattcaccagcctttgcatcattagtatcatttacaattgggtcaataacgctattgattttaaccgctatttttaatagttctttaaaactaaaaacaagtcatttaaaattcggtaaattaaagcctatctattttactggcggtatacttggtatggcttttgtaacagctaacattatcttaatgcctcatatgggtgcagcattaacaacacttattgggatgtttggccagattctaatgggcatattgatagatcactttggattatttggttcacctaaaatagcaatgacatccagaaaaactattggtctattatgtattttgacaggcattatacttttaagattattttaa

SEQ ID NO: 418189 - DNA, 315 bp, Staphylococcus aureus
atgatacttctaggtgttttcgcattgtttatatatataaatacaaaattgaagttacatatttttgataaaaataaaagtaataacgaaaagatcatattaatacctacatttaaaaatatttgtttatccttatttgcttatatattatttggtggattgtcaacaatggctctgagtatgttagtaactttatcccctcaaaatataatagaatttcttgctttaattggcatgactgcatgcttctttctactgaatatgtcatcggttttagataaaaatattcatgttattttaaaaacaaataagtag

SEQ ID NO: 418190 - DNA, 987 bp, Staphylococcus aureus
atgaaattcattagtaataataatattacagatccaactttaaacttagcaatggaagaatatgttttaaaaaatttaccagcagaagaaagttactttttattttacataaatagaccatctatcattgttggaaagaatcaaaatacgatagaggaagtaaatcagacatatatagatgctcataacatcgatgtagttagaagaatttctggtggtggcgctgtttatcatgatactggcaatttaaactttagttttataacagacgatgatggtaacagtttccacaatttccaaaaattcactgaaccaattgttcaagcattacaatctttaggcgtaaatgctgaattaactggtcgtaacgatattcaagttggacaagcgaaaatctcagggaatgccatggttaaagttaaaaatagaatgtttagtcatggtacgttgatgttaaatagtgatttagacgaagttcagaatgcactaaaagttaatccagctaagattaaatcaaaaggtattaaatctgttcgtaaacgagtagcaaacattcaagaatttttaaatggccctttagaaattgaagaatttaaaaaaatcatcttgaaaactatctttggagaaactgaagtagaagaatataaattaacggatgaagattgggaaaatattgaaaagttaagtaacgacaaatatagaacttgggaatggaattatgggagaaaccctaaatataactttgaacgcgaggaaaaatttgaaaagggatttgtacaaattaagtttgatgttaaacgaggtaaaatcgaacatgcaaaaattttcggtgatttctttggtgtcggagatgtcactgatcttgaaaatgcattagttggctgtctacacgactttgagcacatagaagaagcactatcagaatatgatttatatcactatttcggtgatatagatagacatgaattaattagattaatgtcataa

SEQ ID NO: 418191 - DNA, 441 bp, Staphylococcus aureus
atgttatatcgaattttacaagatcaaattagtaatcaacgttatacactggtgttttttaacaatatagaaacaatgattaaaacgttttcggtttataagcagaaaattactaaattaacatatgtccatagcgaggatgtttttcgctttgaaaaagttgaacaattaaggaatggacatttcgatgtcatttttactacgacaatattagaacgtggatttacaatggcaaatttagatgttgttgttatcgatgcacatcaatatactcaagaggctttaatacaaattgctggacgtgttggacgaaaattagaatgtcccactggaaaagtattgttttttcatgaaggagtaagtatgaatatgattctagctaaaaaagagattcaaaatatgaacaaattagcattaaaaagaggttggattgatgaataa

SEQ ID NO: 418192 - DNA, 624 bp, Staphylococcus aureus; identical to SEQ ID NO: 407583

SEQ ID NO: 418193 - DNA, 420 bp, Staphylococcus aureus; identical to SEQ ID NO: 407560

SEQ ID NO: 418194 - DNA, 423 bp, Staphylococcus aureus; identical to SEQ ID NO: 407558

SEQ ID NO: 418195 - DNA, 282 bp, Staphylococcus aureus; identical to SEQ ID NO: 408729

SEQ ID NO: 418196 - DNA, 507 bp, Staphylococcus aureus; identical to SEQ ID NO: 407446

SEQ ID NO: 418197 - DNA, 198 bp, Staphylococcus aureus; identical to SEQ ID NO: 407449

SEQ ID NO: 418198 - DNA, 1134 bp, Staphylococcus aureus; identical to SEQ ID NO: 413924

SEQ ID NO: 418199 - DNA, 141 bp, Staphylococcus aureus
atgatgtttaatcaaattaataataaaaatgaattagaagaatcatatgaatctgagaaaaaacgtatagagaatgaactgcaaaatttaaatgaacttaggcatagaactcgaaaagatggtatgtcaacaattttttag

SEQ ID NO: 418200 - DNA, 1329 bp, Staphylococcus aureus
atgagtaagagtgactataaattagatgttggcaaattaaaaaaagatactgaaccgacaagcgcaatatcatttatggcgtatgaaattgaaaatgctaataatcataatttgagtaagatggcaataaaggaacagttagacagaagcacagaaaggggcatgttcccttctaatcttgaatatgttgatagttacactgattctcttactggagtaacaacttctgcttttttaaataaagatacaggcaaagtaactctcgggatgactgggactaatttacaagacgaagcctttaaaaagttaaaagaaggtgaattttcaagacaaaatgttaccaatgctttggaaacagttaaagatggatatgcagatcttaaaatattatattctcctgcatctgatcaaaactatagatatgcgaatacacaagaatttataaataaaataaaaagtaagtatgacattgattttattactggacattcactaggtggaagagatgcggtagttctaggaatgagtaatggtattccgaacattgtggtttataatccagctcctatttctataactagtttgaatcctaattccccagatggaaaacgattgttagagttatataaaaattataaaggtaatattactaggtttgttgcagaaaatgatgcattgacagaaaatctgaagaaatataagcattatgtttttttcggtaatgataaagtctttaaaaatggtaaaggtcatgaaatgaaaggttttttaaccaaagaagaacaaaaagctataaaaaaagaacttaaaaaactacaaggttatgcagaagaaaataataagtcatttgtaaagcattcaaataatgctatctctaaattagctagtatagaattacttagagccaatatgatgactacaaatggaggaggattatcttcttcgcagcaaaaagttttagaaagtttaacagctttaacaattgcgcagtcattcagtcaactgatagacgatgaaattaatcaaatcaaaaaaatgtataatgaaaagaaaaagaaatttggaaaaaattgggaagacgctcaaaaagctggaaaagctgtaggtgaagatttgagtgtaaatggagttctcaatgctttagatgaaggtcaagtgaatgaaagtagtatggtaagagaacctgaacaaatgatatctgcaaaagaaagacaactttcaacgatagggtcttctgtatcaaattatattatgagagttagactcagtattaatgaaatcgttgataaagatcaagtgcttgcatcacaaataggtggattactatga

SEQ ID NO: 418201 - DNA, 765 bp, Staphylococcus aureus; identical to SEQ ID NO: 407805

SEQ ID NO: 418202 - DNA, 546 bp, Staphylococcus aureus; identical to SEQ ID NO: 413946

SEQ ID NO: 418203 - DNA, 918 bp, Staphylococcus aureus
ttggatgaaaaaggggaaccaactttagaacttaacgatgatggtggatatttcgacttagctccaactgatttaggtgaaaattgccgtcgtgatattgttctagaattagaggatatgggcttcgatattgaagcaagtcaccatgaagttgcaccgggtcaacatgaaatcgactttaaatatgcggatgcagttacagcatgtgataacatccaaacatttaaattggttgttaaaacaattgcgcgtaagcataatttacatgcaacattcatgcctaaaccattatttggtgtgaacggtagcggtatgcactttaatgtttcattattcaaaggtaaagaaaatgcattctttgatccgaatactgaaatgggcttaacagaaacagcttaccaattcacagctggtgtacttaaaaatgcacgtggatttacagcggtatgtaacccattagtaaactcatataaacgtttagttcctggttatgaagcaccatgttatattgcatggagcggtaaaaaccgttcaccattaatccgtgtaccatcttcaagaggattatcaactcgtattgaagtacgttcagtagatccagctgcaaacccatacatggcgttagctgcaatcttagaagctggactagatggtattaaaaataaattaaaagttccagagccagttaaccaaaatatttacgaaatgaatcgtgaagaacgtgaagcagtaggcattcaagacttaccttcaacactttacacagcattaaaagcaatgcgtgaaaatgaagttattaaaaaagcattaggaaatcatatctataatcaatttattaattctaaatcaatagaatgggattactacagaactcaagtatctgaatgggaaagagatcagtacatgaagcaatattaa

SEQ ID NO: 418204 - DNA, 915 bp, Staphylococcus aureus
gtgttagtatttatcgggaaaaggtcttacagtctatatttatggcattttgcagtaattagtttcgtacatagttactatgtagacggacagatacctgtatatgtgtactttatagatataagtttaacaattatatttgcagagctatcatatcgctttatagaaacttcatttagaaaagaaggtattaaagctttaaattggcgaccttcttatataccacaatttataagaatggcaattgtagtaaccttgttaattccatttatgttgattttagtaggtgcattcaataaatatggtaaagacattataggagaaaaagcgaatagctttgataccactattgaagataattatttaatgcggatagcaccaattgataacattcacattgatggcttagtaagtgagaagaaaaaggaatcttccgacgtatataataatattaaacctcttttaatcggtgattcagtaatggttgatatcggtgagtcatttaagtcatcagttcctaagtctagaattgatggaaaagtagggcgtcaattgtatcaaaccttacctttagttaaagcgaattattcacaatataaaaaatcatctgatcaagtcgtattagaattaggtacaaatggcgactttactgtcaaacagctcgacgatttacttaatcaatttggaaaagccaagatttatttagttaatacacgtgttccaagaatttatgaggcaaatgtaaatcgattattagctgacgcggcgaaacgaaagtccaatgtcacattaattgattggtataagcgatcacaaggacatagtgaatattttgcaccagacggtgtacatttagagtacaaaggagttctagctttaaaagatgaaatattaaaagcacttaaaaagaaataa

SEQ ID NO: 418205 - DNA, 882 bp, Staphylococcus aureus
atgtgtataagagacagatatattcatgatgaaacaatcttgaatcagcaatattatgcattagataaaacgttatttgttgctttaaataataaagcaagaatacctgaatggacaaatgggaagtttttaccaaaaagaaaagttgtaaaaattgagcaatttgaaaacgagattaagaattgggaattcccgtttgtaattaagccgggagatgatcttccgacagcaggtggctatggcgttatgatttgttatcatgatgcagatttacaaaaagcgataacgcgtattaaagaggcaactgctgaaacgaattcgcttattatcgaacagaagattgaagaaaaagcgaattattgcgttcagtttgcatactcggaatcgctaggcattcaatatcttggtgcagcaacgcaattaacggataagtacggattttataatggaaatgaaaatactactaatgtaccagagcacgttatagaagcaggtagacaaattatggaaaacggtgtgaatcaaggattctttggtgtagctggttttgacttgcttgtcgatgaagatgataacgtttatgcgattgatttaaactttagacaaaatggttcaacgagcatgttattacttgctaacgagttgaattcaggatatcaaaagttttatagttatcattcaaaaggtgataacatacatttcttcaatacgattttgaaatatgtcaaagaaggttgtttatacccgttatcttattatgatggtgattggtacggtgaagataaagttaaatcaaggtttggctgtatttggcatggagattcaaaagaaacagtactggagaatgaacgcgcatttttagctgaacttgaacgttgttag

SEQ ID NO: 418206 - DNA, 207 bp, Staphylococcus aureus
atggtagccaacttacgttccgctagagtagaacgttgccaggcaaaaatggatgcgatgagccgcattgagaccgtgaggtctctttttttatgtctaaaacgtcaaaataaaaagttaacacaaagaaaatggcttgacgaagtgaaaacgtttgaatctgacgaaacgagaaaagagcgcaacgagtttagtagagctaaatga

SEQ ID NO: 418207 - DNA, 31875 bp, Staphylococcus aureus
gtgaattatcgtgataaaattcaaaagtttagtattcgtaaatatacagttggtacattttcaactgtcattgcgacattggtatttttaggattcaatacatcacaagcacatgctgctgaaacaaatcaaccagcaagcgtggttaaacagaaacaacaaagtaataatgaacagactgagaatcgagaatctcaagtacaaaattctcaaaattcacaaaatggtcaatcattatctgctactcatgaaaatgagcaaccaaatattagtcaagctaatttagtagatcaaaaagtagcgcaatcatctactactaatgatgaacaaccagcatctcaaaatgtaaatacaaagaaagattcggcaacggctgcgacaacacaaccagataaagaacaaagtaagcataaacaaaacgaaagtcaatctgctaataaaaatggaaacgacaatagagcggctcatgtagaaaatcatgaagcaaatgtagtaacagcttcagattcatctgataatggtaacgtacaacatgaccgaaatgaattacaagcattttttgatgcaaattatcatgattatcgctttattgaccgtgaaaatgcagattctggcacatttaactatgtaaaaggcatttttgataagattaatacgttattaggcagtaatgatccaataaacaataaagacttgcaacttgcatacaaagaattggaacaagctgttgctttaattcgtacaatgcctcaacgtcaacagactagccgacgttcaaatagaattcaaacgcgttcggttgagtcaagagctgcagagcctagatcagtatcagactatcaaaatgcaaattcatcatattatgttgaaaatgctaatgatggttcgggctatcctgttggtacatatatcaatgcttctagtaaaggggcgccatataatttaccaactacaccatggaatacattgaaggcctctgactcaaaggaaattgctcttatgacagcgaaacaaactggagacgggtaccaatgggttattaagtttaataaaggacatgctccacatcaaaatatgatcttttggtttgcattaccagcagaccaagtgccagtaggaagaactgactttgtaacagttaattcagatggaacaaatgtacaatggagtcatggagcaggagcaggtgcaaataaaccacttcaacaaatgtgggaatatggagtaaatgatcctcatcgttcacatgactttaaaataagaaatagaagtggccaagtaatatatgactggccaactgtccatatttattctttagaagatttatctagagcgagtgattattttagtgaagctggagcaacagctgctactaaagcatttggtagacaaaattttgaatatattaatggtcaaaaacctgctgaatcaccgggtgttcctaaagtttatactttcatcggtcaaggtgatgcaagttatacaatttcatttaaaacacaaggtccaactgttaataaattgtattatgcagcaggtgggcgtgctttagagtacaatcaattatttatgtacagtcaactatacgtcgaatcaacgcaagaccatcaacaacgtcttaatggtttaagacaagtggttaatcgtacatatcgcataggtacaactaaacgtgtagaagtgagtcaaggaaatgtacaaacgaaaaaggtattagaaagtacaaacctaaatatagatgattttgttgatgatcctttaagttatgttaagacgccgagtaataaagtgttaggattttattcgactaatgcaaacactaatgcttttagaccgggtggagcccaacaattaaatgaatatcaattaagtcaattatttactgatcaaaaattacaagaagcagcaagaactagaaacccaataagattaatgattggtttcgactatcctgatgcttatggtaatagtgaaactttagttcctgttaacttaacggtattacctgaaatccaacataatattaaattctttaaaaatgacgatactcaaaatattgctgaaaaaccattttcaaaacaagctgggcatccagttttctatgtatatgcaggtaaccaagggaatgcttccgtgaatttaggtggtagcgtaacatctattcaaccattacgtattaatttaacaagtaatgagaattttacagataaagattggcaaattacaggtattccgcgtacattacacattgaaaactcgacaaatagaactaataatgctagagaacgtaacattgaacttgttggtaacttattaccaggggattactttggaacgatacgttttggacgtaaagaacaattattcgaaatacgtgttaagccacatacgccaagaattacaactacagcagaggaattaagaggtacagcattacaaaaagtcccagttacagttacgaatattccgttggatccatcggcattagtatatttagtttatccaacagaacaaacaagagatggtggaactgaggcagatcaaataccgtccggctatacaatactggcaacagggacacctgatggtgtgcataataccataacgataccaccaaaagactatactgtatttatacctccagtgggtaaacaaattagagcattaatttattacaataaagtagtagcgtctaatatgagtagtcctgttacaattttgccggatgatattccaccgacaattaataatccagttggtttaaatgcgaaatattatcgtggtgatgaagtcaactttacaatgggtgtctctgatagacattctggattaaaaagtacaactattacgacattgccaagtggttggacatcaaatttaactaaatccgacaacaaaaacggctcattagctattacaggtagagtctctatgaatcaggcatttaacagtgatattacatttaaagtgtcagcgacagacaatgtcaataatacgacgaatgatagtcagtctaaacatgtgacagtacatgtaggtaaaattagtgaagatgcgcatccaattgtcttaggaaatgctgaaaaagttgtcgttgtaaatccgacatctgtatctaatgatgaaaaacaacgaataattactgcatttatgaataaaaaccaaaatataagaggttatttagcttcatcaaatccagttacagttgataataatggtaatgtcacattacattaccgtgatggctcatcaacaacgcttgatgctacaaatgtgatgacatacgaaccagttgtgaaacctgaatatcaaactgccaatgctgctaaaacagcaacggtaacgattgctaaaggacaatcatttaatattggtgatattaaacaatattttactttaagtaatggacaagcgattccgaatggaacatttacaaatattacttctgatagaacgattccaactgcacaagaagttagtcaaatgaatgcaggcacgcagttatatcatatagttgcttcaaatgcatatcataaagacactgaagatttctatattagtttaaaaatcgttgatgtgaagcaacctgaaggcgatcaacgtgtctatcgtacgtcaacatatgatttaactactgatgaaatctcaaaagtaaaacaagcttttattaatgcaaatagagatgtaattacgcttgccgaaggtgatatttcagttacaaatacacctaatggtgctaatgtaagtactattacagtaaatattaataaaggtcgattaacgaaatcattcgcgtcaaacctagctaatatgaatttcttgcgttgggttaatttcccacaagattacacagtatcttggacaaatgcgaaaattgcaaatcgaccaactgatggtggtctatcttggtctgatgaccataaatcattaatttatcgttatgatgctacattaggcacacaaattacaactaatgatattttaacgatgctaaaagcgactactacagtgcctggattgcgtaataatattactggtaatgaaaaaacacaagcagaagcaggtggaagaccaaactatagaacaactggttattcgcaagcaaatgcaacatctgatggccaaagacaatatacgttgaatggtcaagtgattcaaatattggacattatcaacccttcaaacggttatggtgggcaacctgttacaaattcaaatactcgtgcaaaccatagtaactcaactgttgttaacgtaaacgaaccggcagctaatggtgctggcgcatttacaattgaccacgttgtaaaaagtaattctacacataatgcaagtgatgcagtttataaagcacagttatacttaacgccatatggtccaaaacaatatgttgaacatttaaatcaaaatacaggaaatactactgacgctattaacatttattttgtaccaagtgacttagtgaatccaacaatttcagtaggtaattacactaatcatcaagtgttctcaggtgaaacatttacaaatacgattacagcgaatgataactttggtgtgcaatctgtaactgtaccaaatacatcacaaattacaggtattgttgataataaccatcaacatgtttctgcaacggcaccaaatgtgacatcagcaactaataagacaatcaatttattagcaactgatacaagcggcaatacagctacaacttcgttcaatgtaacagtgaaacctttgcgtgataaatatcgagttggtacttcatcaacggctgctaatcctgtgagaattgccaatatttcgaataatgcgacagtatcacaagctgatcaaacggcaattattaattcattaacgtttactgaaacagtaccaaatagaagttatgcaagagcaagtgcgaatgaaatcactagtaaaacagttagtaatgtcagtcgtactggaaataatgccaatgtcacagtaactgttacttatcaagatggaacaacatcaacagtgactgtacctgtaaagcatgtcattccagaaatcgttgcacattcgcattacactgtacaaggccaagacttcccagcaggtaatggttctagtgcatcagattactttaagttatctaatggtagtgccattccagatgcaactattacatgggtaagtggtcaagcgccaaataaagataatacacgtattggtgaagatataacagtaactgcacatatcttaattgatggtgaaacaacgccgattacgaaaacagcaacatataaagtagtaagaactgtaccgaaacatgtctttgaaacagccagaggtgttttatacccaggtgtttcagatatgtatgatgcgaaacaatatgttaagccagtaaataattcttggtcgacaaatgcgcaacatatgaatttccaatttgttggaacatatggtcctaacaaagatgttgtaggcatatctactcgtcttattagagtgacatatgataatagacaaactgaagatttaactattttatctaaagttaaacctgacccaccaagaattgacgcaaactctgtgacatataaagcaggtcttacaaaccaagaaattaaagttaataacgtattaaataactcgtcagtaaaattatttaaagcagataatacaccattaaatgtcacaaatattactcatggtagtggttttagttcggttgtgacagtaagtgacgcgttaccaaatggcggaattaaagcaaaatcttcaatttcaatgaacaatgtgacgtatacgacgcaagacgaacatggtcaagttgttacagtaacaagaaatgaatctgttgattcaaatgacagtgcaacagtaacagtgacaccacaattacaagcaactactgaaggcgctgtatttattaaaggtggcgacggttttgatttcggacacgtagaaagatttattcaaaacccgccacatggggcaacggttgcatggcatgatagtccagatacatggaagaatacagtcggtaacactcataaaactgcggttgtaacattacctaatggtcaaggtacgcgtaatgttgaagttccagtcaaagtttatccagttgctaatgctaaggcgccatcacgtgatgtgaaaggtcaaaatttgactagtggaacggatgcgataaactacattacatttgatccaaatactaacacgaatggtattacagcggcttgggcaaatagacaacaaccaaataatcaacaagctggcgttcaaaacttaaatgtcgatgtaacatatccaggcatttcagctgcgaaacgtgttcctgtaactgtaaacgtatatcaatttgaattccctcaaactagttatacgacaacagttggtggcactttagcaagtggtacacaagcctctggttatgcacatatgcaaaatgctacaggtttaccaacagatggatttacgtataaatggaataatgcagcaacaggtacaaatgacgcaaactgggcagctatgaataaaccgaatgtggctaaagtcgttaatgcaaaatatgacgtcatctataacggacatacatttgcaacatctttaccagcgaaatttgtagtaaaagatgtccaaccgtcgaaaccaactgtgactgaaacagcggcaggagcgattactattgcacctggtgcgaaccaaacagtcaatacacatgctggtaatgttacgacatatgctgacaaattagttattaaacgtaatggaagtgttgtaacgacatttacacgtcgtaataatacgagcccatgggtgaaagaagcatcagcagctaatgtaacaggtattgttggaactaataatggtattactgttgcagcaggtactttcaatcctgctgatacaattcaagttgttgcaacacaaggtagtggcgaaacaatcagtgacgagcaacgtagtgatgatttcacagttgtcgcaccacaaccgaaccaagcgactacgaaaatttggcaaaatggtaatattgatatcacgcctaataacccatcaggtcatttaattaatccaactcaagcaatggatattgcttacactgaaaaagtgggtaatggtgcagaacatagtaagacacttagtgttgttcgtggtcaaaataatcaatggacaatagctaataaacctgactatgtaacgttagatgcacaaactggtaaggtgacgtttaatgccaacactatcaagccgaattcaacaatcacaattacaccgaaagcaggtactggtcactcagcaagcagtaatccaagtacattaactgcaccggcagcacatactgtcaacacaacagaaattgtgaaagattatggttcaaatgtaacagcagctgaaattaacaatgcagttcaagttgctaataaacgtactgcaacgattaaaaatggcacagcaatgcctactaatttagctggtggtagcacaacgacgattcctgtgacagtaacttacaatgatggtagtactgaagaagtacaagagtccattttcacaaaagcggataaacgtgagttaatcacagctaaaaatcatttagatgatccagttagtacagatggtaaaaagccaggtacaattacgcagtacaataatgcaatgcataatgcgcaacaacaaatcaattctgcgaaaacagaagcacaacaagtgattaataatgagcgtgcaacaccacaacaagtttctgacgcattaactaaagttcaagctgcacaaactaagataaatgaagctaaagcattacttcaaaataaagaagataatagtcaattagtaacgtctaaaaataacttacaaagttctgtgaaccaagtaccatcaactgctggtatgacgcaacaaagtattgataactataatgcgaagaagcgtgaagcagaaaccgaaataactgcagcacaacgtgttatagacaatggtgatgcaactgcacaacaaatttcagatgaaaaacatcgtgtcgataacgcattaacagcattaaaccaagcgaaacatgatttaactgcagatacacatgccttagagcaagcagtgcaacaattgaatcgcacaggtacaacgactggtaagaagccggcaagtattactgcctacaataattcgatgcatgcgcttcaaagtgacttaacaagtgctaaaaatagtgccaatactatcattcaaaagccaattaggtcagtgcaagaggtacaaacagcattaacaaatgtaaatcgtgttaatgagcgattaacgcaagcaattaatcaattagtacctttagctgataatagtgctttaagaactgctaagacgaaacttgatgaagaaatcaataaatcagtaactactgatggtatgacacaatcatcaatccaagcatatgaaaatgctaaacgtgcgggtcaaacagaatcaacaaatgcacaaaatgttattaacaatggtgatgcgactgaccaacaaattgccacagaaaaaacaaaagtagaagaaaaatataatagcttaaaacaagcaattgctggactaactccagacttggcaccattacaaactgcaaaaactcagttgcaaaatgatattgatcagccaacgagtacgactggtatgacaagcgcatctgttgctgcatttaatgacaaactttcagcagctagaactaaaattcaagaaattgatcgcgtactagcatctcatccagatgttgcaacgattcgtcaaaacgtgacagcagcgaatgctgctaaaacagcacttgatcaagcgcgcaatggcttaacagtcgataaagcacctttagaaaatgcgaaaaatcaactacaacatagtattgatacgcaaacaagtacaactggtatgacacaagactctataaatgcatacaatgcgaagttaacagctgcacgtaataaggttcaacaaatcaatcaagtattagcaggttcacctactgtagatcaaattaatacaaatacgtctgcagcaaatcaagcgaaatctgatttagatcatgcacgtcaagcgttaacaccagataaagcgccgcttcaaaatgcgaaaacgcaattagaacaaagcattaatcaaccaacagatacaacaggtatgacaaccgcttcgttaaatgcatacaaccaaaaattacaagcagcacgtcaaaagttaactgaaattaatcaagtgttgaatggcaacccaactgtccaaaatatcaatgataaagtggcagaggcaaaccaagctaaggatcaattaaatacagcacgtcaaggtttaacattagatagacagccagctttaacaacattacatggtgcatctaacttaaaccaagcacaacaaaataatttcacgcaacaaattaatgctgctcaaaatcatgctgcgcttgaaacaattaagtctaacattacagctttaaatactgcgatgactaagctaaaagacagtgttgcggataataattcgattaaatcaggtcaaaattacactgacgcaactcaagctaataaacaagcgtatgacaatgcagtcaatgcagctaaaggtgtcattggagaaactaataatccaacaatggatgttaatacagtgaaccaaaaagcagcatctgttaaatcgacgaaagatgctttagatggtcaacaaaacttacaacgtgcgaaaacagaagcaacaaatgcgattacgcatgcaagtgatttaaaccaagcacaaaagaatgcattaacacaacaagtgaatagtgcacaaaatgtacaagcagtaaatgatattaaacaaacgactcaaagcttaaatactgctatgacaggtttaaaacgtggcgttgctaatcataatcaagtcgtacaaagtgataattatgtcaacgcagatactaataagaaaaatgattacaacaatgcatacaaccatgcgaatgacattattaatggtaatgcacaacatccagttataacaccaagtgatgttaacaatgctttatcaaatgtcactagtaaagaacatgcattgaatggtgaagctaagttaaatgctgcgaaacaagaagcgaacactgcattaggtcaattaaataacttgaataaagcgcaacgtcaaaacttacaatcgcaaattaatagtgcacatcaaatcgagacagttaatacaattaagcaaaatgcaacaaacttgaatagtgcaatgggtaacttaagacaagctgttgcagataaagatcaagtgaaacgtacagaagattatgcggatgcagatacagctaaacaaaatgcatataacagtgcagtttcaagtgccgaaacaatcattaatcaaacaacaaatccaacgatgtctgttgatgatgttaatcgtgcaacttcagctgttactactaataaaaatgcattaaatggtgatgaaaaattagcacaatctaaaacagatgctgcaagagcaattgatacattaccacatttaaataatgcacaaaaagcagatgttaaatctaaaattaatgctgcatcaaatattgctggcgtaaatactgttaaacaacaaggtacagatttaaatacagcgatgggtaatttgcaaggtgcaatcaatgacgaacaaacgacattaaatagtcaaaattatcaagatgcgacaccaagtaagaaaacagcatacacaaatgcggtacaagctgcgaaagatattttaaataaatcaaatggtcaaaataaaacgaaagatcaagttactgaagcgatgaatcaagtgaattctgctaaaaataacttagatggtacgcgtttattagatcaagcgaagcaaacagcaaaacagcagttaaataatatgacgcatttaacaactgcacaaaaaacgaatttaacaaaccaaattaatagtggtactactgtcgctggtgttcaaacggttcaatcaaatgccaatacattagatcaagccatgaatacgttaagacaaagtattgccaacaaagatgcgactaaagcaagtgaagattacgtagatgctaataatgataagcaaacagcatataacaacgcagtagctgctgctgaaacgattattaatgctaatagtaatccagaaatgaatccaagtacgattacacaaaaagcagagcaagtgaatagttctaaaacggcacttaacggtgatgaaaacttagctgctgcaaaacaaaatgcgaaaacgtacttaaacacattgacaagtattacagatgctcaaaagaacaatttgattagtcaaattactagtgcgacaagagtgagtggtgttgatactgtaaaacaaaatgcgcaacatctagaccaagctatggctagcttacagaatggtattaacaacgaatctcaagtgaaatcatctgagaaatatcgtgatgctgatacaaataaacaacaagagtatgataatgctattactgcagcgaaagcgattttaaataaatcgacaggtccaaacactgcgcaaaatgcagttgaagcagcattacaacgtgttaataatgcgaaagatgcattgaatggtgatgcaaaattaattgcagctcaaaacgcagcgaaacaacatttaggtactttaacgcatatcactacagctcaacgtaatgatttaacaaatcaaatttcacaagctacaaacttagctggtgttgaatctgttaaacaaaatgcgaatagtttagatggtgctatgggtaacttacaaacggctatcaacgataagtcaggaacattagcgagccaaaacttcttggatgctgatgagcaaaaacgtaatgcatacaatcaagctgtatcagcagccgaaaccattttaaataaacaaactggaccgaatacagcgaaaacagcagtcgaacaagcacttaataatgttaataatgcgaaacatgcattaaatggtacgcaaaacttaaacaatgcgaaacaagcagcgattacagcaatcaatggcgcatctgatttaaatcaaaaacaaaaagatgcattaaaagcacaagctaatggtgctcaacgcgtatctaatgcacaagatgtacagcacaatgcgactgaactgaacacggcaatgggcacattaaaacatgccatcgcagataagacgaatacgttagcaagcagtaaatatgttaatgccgatagcactaaacaaaatgcttacacaactaaagttaccaatgctgaacatattattagcggtacgccaacggttgttacgacaccttcagaagtaacagctgcagctaatcaagtaaacagcgcgaaacaagaattaaatggtgacgaaagattacgtgaagcaaaacaaaacgccaatactgctattgatgcattaacacaattaaatacacctcaaaaagctaaattaaaagaacaagtgggacaagccaatagattagaagacgtacaaactgttcaaacaaatggacaagcattgaacaatgcaatgaaaggcttaagagatagtattgctaacgaaacaacagtcaaaacaagtcaaaactatacagacgcaagtccgaataaccaatcaacatataatagcgctgtgtcaaatgcgaaaggtatcattaatcaaactaacaatccgactatggatactagtgcgattacccaagctacaacacaagtgaataatgctaaaaatggtttaaacggtgctgaaaacttaagaaatgcacaaaacactgctaagcaaaacttaaatacattatcacacttaacaaataaccaaaaatctgccatctcatcacaaattgatcgtgcaggtcatgtgagtgaggtaactgctactaaaaatgcagcaactgagttgaatacgcaaatgggtaacttggaacaagctatccatgatcaaaacacagttaaacaaagtgttaaatttactgatgcagataaagctaaacgtgatgcgtatacaaatgcggtaagcagagctgaagcaattctgaataaaacgcaaggtgcaaatacgtctaaacaagatgttgaagcggctattcaaaatgtttcaagtgctaaaaatgcattgaatggtgatcaaaacgttacaaatgcgaagaatgcagctaaaaatgcattaaataacttaacgtcaattaataatgcacaaaaacgtgacttaacaactaaaattgatcaagcaacaactgtagctggtgttgaagctgtatctaatacgagtacacaattgaatacagcgatggctaacttgcaaaatggtattaatgataaaacaaatacactagcaagtgaaaactatcatgatgctgattcagataagaaaactgcttatactcaagccgttacgaacgcagaaaatattttaaataaaaatagtggatcaaatttagacaaaactgccgttgaaaacgcgttgtcacaagttgctaatgcgaaaggtgccctaaatggtaaccataatttagagcaagctaaatcaaatgcaaacactactataaacggacttcaacatttaacaactgcacaaaaagataaattgaaacaacaagtgcaacaagcacaaaatgttgcaggtgtagatactgttaaatcaagtgccaacacattaaatggtgctatgggtacgttaagaaatagcatacaagataacacagctacgaaaaatggccaaaactatcttgatgctacagaacgtaacaaaacaaactataacaatgctgttgatagtgctaatggtgtcattaatgcaacaagcaatccaaatatggatgctaatgcaattaaccaaatcgctacacaagtgacatcaacgaaaaatgcattagatggtacacataatttaacgcaagcgaaacaaacagcaacaaatgccatcgatggtgctactaacttaaataaagcgcaaaaagatgcgttaaaagcacaagttacaagtgcgcaacgtgttgcaaatgtaacaagtatccaacaaactgcaaatgaacttaatacagctatgggtcaattacaacatggtattgatgatgaaaatgcaacaaaacaaactcaaaaatatcgtgacgctgaacaaagtaagaaaactgcttatgatcaagctgtagctgctgcgaaagcaattttaaataaacaaacaggttcaaattcagataaagcagcagttgaccgtgcattacaacaagtaacaagtacgaaagatgcattgaatggtgatgcgaaactggcagaagcgaaagcggcagctaaacaaaacttaggtactttaaaccatattacaaatgcacaacgtactgcgttagaaggtcaaatcaatcaagcgacgactgttgatggcgttaatactgtgaaaacaaatgccaatacattagacggcgcaatgaatagcttgcaaggttcaatcaatgataaagatgctacattaagaaatcaaaattatcttgatgcggatgaatcaaaacgaaatgcatatacgcaagctgtcacaacagctgaaggcattttaaataaacaaactggtggtaacacatctaaagcagacgttgataatgcattaaatgcagttacaagagcgaaagcggctttaaatggtgctgaaaacttaagaaatgcgaaaacttcagcaacaaatacgattaatggtttacaacacttaacacaattacaaaaagacaacttgaagcatcaagttgaacaagcgcaaaatgtagctggtgtaaatggtgttaaagataaaggtaatacgttaaatactgccatgggtgcattacgtacaagtatccaaaatgataatacgacgaaaacaagtcaaaattatcttgatgcatctgatagcaacaaaaataattacaatactgctgtaaataatgcaaatggtgttattaatgcaacgaacaatccaaatatggatgctaatgcgattaatggcatggcaaatcaagtcaatacaacaaaagcagcgttaaatggtgcacaaaacttagctcaagctaaaacaaatgcgacgaacacaattaacaacgcacatgacttaaatcaaaaacaaaaagatgcattaaaaacacaagttaacaatgcacaacgtgtatctgatgcaaataacgttcaacatacagctactgaattgaacggtgcgatgacagcacttaaagcagctattgctgataaagaaagaacaaaagcaagcggtaattatgtcaatgctgatcaagaaaaacgtcaagcgtatgattcaaaagtgactaacgccgaaaatatcattaatggtacaccgaatgcgacattaacagtcaatgacgtaaatagtgcggcatcacaagtgaatgcagctaaaacagcattaaatggtgataacaacttacgtgttgcgaaagagcatgccaacaatacaattgatggcttagcgcaattgaataatgcacaaaaagcaaaattaaaagaacaagttcaaagtgcaactacattagatggtgttcaaactgttaaaaatagttctcaaacgttgaatacagcgatgaaaggcttaagagatagtattgcgaatgaagcaacaattaaagcaggtcaaaactacactgacgcaagtccaaataatcgtaacgagtacgacagtgcagttactgcagcaaaagcaatcattaatcaaacatcgaacccaacgatggaaccaaatactattacgcaagtaacatcacaagtgacaactaaagaacaggcattaaatggtgcgcgaaacttagctcaagctaagacaactgcgaaaaacaacttgaataacttaacatcaattaacaatgcacaaaaagatgcgttaacgcgtagcattgatggtgcaacaacagtagctggtgtaaatcaagaaactgcaaaagcaacagaattaaataacgcaatgcatagtttacaaaatggtatcaatgatgagacacaaacaaaacaaactcagaaatacctagatgcagagccaagtaagaaatcagcttatgatcaagcagtaaatgcagcgaaagcaattttaacaaaagctagtggtcaaaatgtagacaaagcagcagttgaacaagcattgcaaaatgtgaacagtacgaagacggcgttgaacggtgatgcgaaattaaatgaagctaaagcagctgcgaaacaaacgttaggtacattaacacacattaataatgcacaacgtacagcgttagataatgaaattacacaagcaacaaatgttgaaggtgttaatacagttaaagccaaagcgcaacaattagatggtgctatgggtcaattagaaacatcaattcgtgataaagacacgacgttacaaagtcaaaattatcaagatgctgatgatgctaaacgaactgcttattctcaagcagtaaatgcagcagcaactattttaaataaaacagctggcggaaatacacctaaagcagatgtcgaaagagcaatgcaagctgttacacaagccaatactgcattaaacggtattcaaaacttagaacgtgcgaaacaggctgctaacacagcgattacaaatgcttcggacttaaatacaaaacaaaaagaagcattgaaagcacaagtaacaagtgcaggacgcgtatctgtagcaaatggtgttgaacatactgcgactgaattaaatactgcgatgacagctttaaaacgtgctattgctgataaagctgacacaaaaactagtggtaactatgtcaatgctgatgcgaataaacgtcaagcatatgatgaaaaagtgacagctgccgaaaatatcgttagtggtacaccaacaccaacgttaacaccagcagatgttacaaatgcagcaacgcaagtaacgaatgctaagacgcagttaaacggtaatcataatttagaagtagcgaaacaaaatgctaacactgcaattgatggtttaacttctttaaatggtccgcaaaaagcaaaacttaaagaacaagtgggtcaagcgacgacgttgccaaatgttcaaactgttcgtgataatgcacaaacattaaacactgcaatgaaaggtctacgagatagcattgcgaatgaagcaacgattaaagcaggtcaaaactacacagatgcaagtcaaaacaaacaaactgactacaacagtgcagtcactgcagcaaaagcaatcattggtcaaacaactagtccatcaatgaatgcgcaagaaattaatcaagcgaaagaccaagtgacagctaaacaacaagcgttaaacggtcaagaaaacttaagaactgcgcaaacaaatgcgaagcaacatttgaacggcttaagtgacttaactgacgctcaaaaagatgcagtgaaacgtcaaatcgaaggtgcaacgcatgttaatgaagtaacacaagcacaaaataatgcggatgcattaaatacagctatgacgaacttgaaaaatggtattcaagatcagaatacgattaagcaaggtgttaacttcactgatgccgacgaagcgaaacgtaatgcatatacaaatgcagtgacgcaagctgaacaaattttaaataaagcacaaggtccaaatacttcaaaagacggtgtcgaaactgcgttagaaaatgtacaacgtgctaaaaacgaattgaacggtaatcaaaatgttgcgaacgctaagacaactgcgaaaaatgcattgaataacctaacatcaattaacaatgcacaaaaagaagcattgaaaacgcaaattgaaggtgcgacaacagttgcaggtgtaaatcaagtgtctacaatagcatctgaattaaatactgcaatgagcaacttacaacgtggtattaacgatgaagcagctacaaaagcagctcagaaatatactgatgcagatagagaaaaacaaacagcatacaatgatgctgtaacggcagctaaaacgttattagataaaacagctggcacaaatgaaaataaagcagccgttgaacaagcattacaacgtgtgaatactgctaaaactgcattaaatggtgatgcgcgcttaaatgaagcgaagaacacagctaaacaacaagtagcgacaatgtcacacttaactgatgctcaaaaagcaaacttaacatcgcaaatcgaaagtggtacgactgttgcaggtgttcaaggtattcaagctaatgccggtactttagatcaagcaatgaatcaattaagacaaagtattgcttctaaagatgcgactaaatcaagcgaagattatcaagacgcgaatgcagatttacaaaatgcatacaatgatgcggtaactaatgctgaaggtattattagtgcaacgaataaccctgaaatgaatcctgatacaattaaccaaaaagcgagccaagtgaacagtgcgaagtctgcattgaacggtgatgaaaaattagcagcagcaaaacaaactgcgaaatcagatatcggtcgtttgacagacttgaacaatgcacaacgaactgcggcaaatgctgaagtggatcaagcaccaaatcttgcagctgtcacagcggctaaaaataaagcaacatcgttaaacacagcgatgggtaatttgaaacatgcacttgctgaaaaggataatacgaaacgtagtgtcaattacaaagatgcggatcaaccaaaacaacaagcgtatgatactgcggttacacaagcagaagcaattactaatgctaatggcagcaacgcgaatgaaacacaagttcaagcagcactaaaccaattgaatcaagctaaaaatgacttgaatggtgataataaagttgctcaagcaaaagagtcagcgaaacgtgcattagcttcatatagtaacttgaataatgcgcaatcaactgcagcaactagtcaaattgacaatgcaacgacagtagcaggtgtaactgctgcacaaaatactgctaatgaattaaatacagcaatgggtcaacttcaaaatggtattaatgaccaaaacactgttaaacaacaagtgaactttacagatgctgaccaaggtaagaaagatgcttacacaaatgctgttacgaatgctcaaggtattttagataaatcaaacggtcaaaatatgacaaaagcacaagttgaagctgcattaaatcaagtaacgactgctaagaatgctttaaacggtgatgcaaatgtaagacaagcaaaatcagatgcgaaagcaaacttaggtacattaacacacttaaataatgcacaaaaacaagatttaacatcacaaatcgaaggtgcaacaacagtcaacggtgtaaatagtgttaaaacgaaagcacaagacttagatggtgcaatgcaacgattagagacagcaatcgcaaataaagatcaaactaaagcgagcgaaaactacatcgacgcagatccaactaagaaaacagcatttgataatgccatcatacaagctgaatcttacttaaataaagatcatggtgcgaataaagataagcaagctgttgaacaagcaattcaaagtgtaacgtctactgaaaatgctttgaacggtgacgcaaacttacaacgcgctaaaactgaagctacacaagctatcgataacttgacacatttgaatacgccacaaaaaacagcattaaaacaacaagtgaacgctgcgcaacgtgtatcaggtgtaactgatctgaaaaatagtgctacatcacttaataatgcgatggatcaattaaaacaagcaattgctgatcatgacacaattgttgctggtggtaattacactaacgcgagtcctgataagcaaggtgcttatactgatgcatataatgctgcgaaaaacattgtaaatggttcacctaatgtgattacaaatgcagcagatgttacagcagtaacacaacgtgttaataatgctgaaacaggtttaaacggtgatacaaacttagcaactgcgaagcaacaagctaaagatacattacgtcaaatgacacatttatctgatgcacaaaaacaaagtattactggtcaaattgatagcgcgacacaagtaactggcgtccaaagtgtgaaagacaacgcgacaaatcttgataatgcaatgaatcaacttcgaaatagtattgcgaataaagatgaagttaaagcaagtcaaccatatgttgatgcagatacggataaacaaaatgcatacaacacagctgttacaagtgctgaaaatatcattaatgcaacgagtcagccgacacttgatccatctgcagtaacacaagcagctaatcaagtgaacactaacaaaactgcgcttaatggtgtacaaaacttagcgaataaaaagcaagaaacgactgctaacatcaaccgattaagtcatttaaataatgctcaaaagcaagatttaaatacgcaagtgacaaatgcaccaaatattagcacagtaaatcaagtgaaaactaaagctgaacaattagatcaagcaatggaacgtttaatcaacggaatccaagacaaagatcaagtgaaacaaagtgttaactttacagatgcagatccagaaaaacaaacagcatacaacaatgcggtaactgctgttgaaaatattattaatcaagcaaatggtacaaatgcgaaccaatcacaagttgaagcagcactttcaactgtaacaactactaaacaagcgttgaatggtgatagaaaagtaacagatgctaaaaacaatgcaaaccaaacattatctacattagataacttaaacaatgcacaaaaaggtgctgttactggaaacatcaatcaagcgcacactgtagctgaagtaacgcaagccattcaaacagctcaggaactgaatacagcgatgggtaacttgaaaaatagcttgaatgataaagacactacacttggcagtcaaaactttgcagatgcagatccagagaagaaaaatgcatacaatgaagcggttcataatgctgaaaatattttaaataaatctacaggtacgaacgtgcctaaagatcaagttgaagcagctatgaatcaagtgaatgctacaaaagcagcgcttaatggtactcaaaaccttgaaaaagctaaacaacacgcaaatacagcaattgacggtttaagccatttaacaaatgcacaaaaagaggcattaaaacaattggtacaacaatcgactactgttgcagaagcacaaggtaatgagcaaaaagcaaacaatgttgatgcagcaatggacaaattacgtcaaagtattgcagataatgcgacaacaaaacaaaaccaaaattatactgatgcaagtcagaataaaaaggatgcgtacaataatgctgtcacaactgcacaaggtattattgatcaaactacaagtccaactttagatccgactgttatcaatcaagctgctggacaagtaagcacaactaaaaatgcattaaatggtaatgaaaacctagaggcagcgaaacaacaagcgtcacaatcattaggttcattagataacttaaataatgcgcaaaaacaaacagttactgatcaaattaatggcgcgcatactgttgatgaagcaaatcaaattaagcaaaatgcgcaaaacttaaatacagcgatgggtaacttgaaacaagcgatagctgacaaagatgctacgaaagcgacagttaacttcactgatgcagatcaagcaaaacaacaagcatataacactgctgttacaaatgctgaaaatatcatttcaaaagctaatggcggcaatgcaacacaagctgaagttgaacaagcaatcaaacaagttaatgctgcaaaacaagcattaaatggtaatgccaacgttcaacatgcgaaagatgaagcaacagcattaattaataactctaatgatcttaaccaagcacagaaagatgcattaaaacaacaagtacaaaatgcaactactgtagctggtgtaaacaatgttaaacaaacagcacaagagttaaacaatgcgatgacacaattaaaacaaggcattgcagataaagaacaaacgaaagctgatggtaactttgtcaatgcagatcctgacaagcaaaatgcatataaacaagcagtagcgaaagctgaagcattaattagtggtacgcctgatgttgtcgttacacctagcgaaattactgcagcgttaaataaagttacgcaagctaaaaatgatttaaatggtaatacgaacttagcaacggcgaaacaaaatgttcaacatgctatcgatcaattgccaaacttgaatcaagcgcaacgtgatgaatacaacaaacaaattacgcaagcaactcttgtaccaaacgtcaatgctattcaacaagcggcgacaacgcttaatgacgcgatgacacaattgaaacaaggtattgcgaataaagcacaaattaaaggtagcgagaactatcacgatgctgatactgacaagcaaacagcatatgataatgcagtaacaaaagcagaagaattgttaaaacaaacaacaaatccaacaatggatccaaatacaattcaacaagcattaactaaagtgaatgacacaaatcaagcacttaacggtaatcaaaaattagctgatgccaaacaagatgctaagacaacacttggtacactagatcatttaaatgatgctcaaaaacaagcgctaacaactcaagttgaacaagcaccagatattgcaacagttaataatgttaagcaaaatgctcaaaatctgaataatgctatgactaacttaaacaatgcattacaagataaaactgagacattaaatagcattaactttactgatgcagatcaagctaagaaagatgcttatactaatgcggtttcacatgcagaaggtattttatctaaagcaaatggcagcaatgcaagtcaaactgaagtggaacaagcgatgcaacgtgtgaacgaagcgaaacaagcattgaatggtaatgacaatgtacaacgtgcaaaagatgcagcgaaacaagtgattacaaatgcaaatgatttaaatcaagcgcaaaaagatgcattaaaacaacaagtcgatgttgcgcaaactgttgcaaatgtaaacacgattaagcaaacagcacaagatttaaatcaagcaatgacacaattgaaacaaggtattgcagataaagaccaaactaaagcaaatggtaactttgtcaatgctgatactgataagcaaaatgcatataacaatgcggtagcacatgctgaacaaatcattagtggtacaccaaatgcaaacgtggatccacaacaagtggctcaagcgttacaacaagtgaatcaagctaagggtgatttaaacggtaaccataacttacaagttgctaaagacaatgcaaatacagccattgatcagttaccaaacttaaatcaaccacaaaaaacagcattaaaagaccaagtgtcgcatgcagaacttgttacaggtgttaatgctattaagcaaaatgctgatgcgttaaataatgcaatgggtacattgaaacaacaaattcaagcgaacagtcaagtaccacagtcagttgactttacacaagcggatcaagacaaacaacaagcatataacaatgcggctaaccaagcacaacaaatcgcaaatggcataccaacacctgtattgacgcctgatacagtaacacaagcagtgacaactatgaatcaagcgaaagatgcattaaacggtgatgaaaaattagcacaagcgaaacaagaagctttagcaaatcttgatacgttacgcgacttaaatcaaccacaacgtgatgcattaagaaaccaaatcaatcaagcacaagcgttagctacagttgaacaaactaaacaaaatgaacaaaatgtgaatacagcaatgggtaacttgaaacaaggtattgcaaacaaagatactgtcaaagcaagtgagaactatcatgatgctgatgccgataagcaaacagcatatacaaatgcagtgtctcaagcggaaggtattatcaatcaatcgacaaatccaacgcttaacccagatgaaataacacgtgcattaactcaagtgactgatgctaaaaatggcttaaacggtgaagctaaattggcaactgaaaagcaaaatgctaaagatgccgtaagtgggatgacgcatttaaacgatgctcaaaaacaagcattaaaaggtcaaatcgatcaatcgcctgaaattgctacagtgaaccaagttaaacaaacagcaacgagcctagatcatgcaatggatcaattatcacaagctattaatgataaagctcaaacattagcggacggtaattacttaaatgcagatcctgacaaacaaaatgcgtataaacaggcagtagcaaaagctgaagcattattgaataaacaaagtggtactaatgaagtacaagcacaagttgaaagcatcactaatgaagtgaacgcagcgaaacaagcattaaatggtaatgacaatttggcaaatgcaaaacaacatgcaaaacaacaattggcgaacttaacacacttaaatgatgcacaaaaacaatcatttgaaagtcaaattacacaagcgccacttgttacagatgtcactacgattaatcaaaaagcacaaacgttagatcatgcgatggaattattaagaaatagtgttgcggataatcaaacgacattagcgtctgaagattatcatgatgcaactacgcaaagacaaaatgactataaccaagctgtaacagctgctaataatatcatttatcaaactacatcgcctacgatgaatccagatgatgttaatggtgcaacgacacaagtgaataatacgaaagttgcattagatggtgatgaaaaccttgcagtagctaaacaacaagcaaacaacagacttgatcaattagatcatttgaataatgcgcaaaagcaacagttacaatcacaaattacgcaatcatctgatattgctgcagttaatggtcacaaacaaacagcagaatctttaaatactgcgatgggtaacttaattaatgcgattgcagatcatcaagccgttgaacaacgtgataacttcatcaatgctgatactgataaacaaactgcttataatacagcggtaaatgaagcagcagcaatgattaacaaacaaactggtcaaaatgcgaaccaaacagaagtagaacaagctattactaaagttcaaacaacacttcaagcgttaaatggagatcataatttacaagttgctaaaacaaatgcgacgcaagcaattgatgctttaacaagcttaaatgatcctcaaaaaacagcattaaaagaccaagttacagctgcaactttagtaactgcagttcatcaaattgaacaaaatgcgaatacgcttaaccaagcaatgcatggtttaagacagagcattcaagataacgcagcaactaaagcaaatagcaaatatatcaacgaagatcaaccagagcaacaaaactatgatcaagctgttcaagccgcaaataatattatcaatgaacaaactgcaacattagataataatgcgattaatcaagcagcggcaactgtgaatacaacgaaagcagcattacatggtgatgtgaaattacaaaatgataaagatcatgctaaacaaacggttagtcaattagcacatctaaacaatgcacaaaaacatatggaagatacgttaattgatagcgaaacaactagaacagcagttaagcaagatttgactgaagcaccagcattagatcaacttatggatgcattgcaacaaagtattgctgacaaagatgcaacacgtatgagcagtgcatatgtcaatgcagaaccgaataaaaaacaagcctatgatgaagcagttcaaaatgctgagtctatcattgcaggattaaataatccaactatcaataaaggtaatgtatcaagtgcgactcaagcagtaacatcatctaaaaatgcattagatggtgttgaacgattagctcaagataagcaaactgctggaaattctctaaatcatttagatcaattaacaccagctcaacaacaagcgctagaaaatcaaattaataatgcaacaactcgtgataaagtggctgaaatcattgcacaagcgcaagcattaaatgaagcgatgaaagcattaaaagaaagtattaaggatcaaccacaaactgaagcaagtagtaaatttattaacgaggatcaagcgcaaaaagatgcttatacgcaagcagtacaacacgcgaaagatttgattaacaaaacaactgatcctacattagctaaatcaatcattgatcaagcgacacaggcagtgactgatgctaaaaacaatttacatggtgatcaaaaactagctcaagataagcaacgtgcaacagaaacgttaaataacttgtctaacttgaatacaccacaacgtcaagcacttgaaaatcaaatcaataatgcagcaactcgtggcgaagtagcacaaaaattaactgaagcagaagcacttaaccaagcaatggaagctttacgtaatagcattcaagatcaacagcaaacggaagcgggtagcaagtttatcaatgaagataaaccacaaaaagatgcttaccaagcagcagttcaaaatgcaaaagatttaattaatcaaactaacaatccaacgcttgataaagcacaagttgaacaattgacacaagctgttaaccaagctaaagataacctacacggtgatcaaaaacttgcagacgataaacaacatgcggttactgatttaaatcaattaaatggtttaaataatccacagcgtcaagcacttgtaagtcaaataaacaatgcagcaactcgtggcgaagtagcacaaaaattagctgaagcaaaagcacttgatcaagcaatgcaagcattacgtaatagtattcaagatcaacaacaaacagaatctggtagcaagtttattaatgaagataaaccgcaaaaagatgcttaccaagcagcagttcaaaatgcacaagatttaattaaccaaacaggtaatccaacactcgacaaatcacaagtagaacaattaacacaagcagtaacaactgcaaaagataatctacatggtgatcaaaaactagctcgtgatcaacaacaagcagtaacgactgttaatgcattaccaaacttaaatcatgcacaacaacaagcattaactgatgcaattaatgcagcgcctacaagaacagaggttgcacaacatgttcaaactgctactgaacttgatcacgcaatggaaatattgaaaaataaagttgatcaagtgaatacagataaggctcaaccaaattacactgaagcgtcaactgataaaaaagaagcagtagaccaagcgttacaagctgcagaaagcattacagaccctactaatggttcaaatgcaaataaagatgctgtagaacaagcgttaactaagcttcaagaaaaagaaaatgagttaaatggtaatgagagagtcgctgaagctaaaacacaagcgaaacaaactattgaccaattaacacatttaaatgctgatcaaattgcaactgctaaacaaaacattgatcaagcgacgaaacttcaaccaattgctgaattagtagatcaagcaacgcaattgaatcaatctatggatcaattacaacaagcagttaatgaacatgctaacgttgagcaaactgtagattacacacaagcagattcagataagcaaaatgcttataaacaagctattgctgatgctgaaaatgtattgaaacaaaatgcgaataagcaacaagtggatcaagcacttcaaaatattttaaatgcaaaacaagcattaaatggtgatgaacgtgtagcacttgctaaaacaaatggtaaacatgacatcgaccaattgaatgcattaaacaatgctcaacaagatggatttaaaggtcgcatcgatcaatcaaacgatttaaatcaaatccaacaaattgtagatgaggctaaggcacttaatcgtgcaatggatcaattatcacaagaaatcactggcaatgaaggacgcacgaaaggtagcacgaactatgtcaatgcagatacacaagtcaaacaagtatatgatgaagcggttgataaagcgaaacaagcacttgataaatcgtctgggcaaaacttaactgcagaacaagttatcaaattaaatgatgcagtcactgcagctaagaaagcattaaatggtgaagaaagacttaataatcgtaaagctgaagcattacaaagattggatcaattaacacatctaaacaatgctcaaagacaattagcaatccaacaaattaataatgctgaaacgctaaataaagcatctcgagcaattaatagagcaactaaattagataatgcaatgggtgcagtacaacaatatattgacgaacagcaccttggtgttatcagcagcacaaattacatcaatgcagatgacaatttgaaagcaaattatgataatgcaattgcgaatgcagcacatgagttagataaagtgcaaggtaatgcaattgcaaaagctgaagcagagcaattgaaacaaaatattatcgatgctcaaaatgcattaaatggagaccaaaaccttgcaaatgccaaagataaagcaaatgcgtttgttaattcgttaaatggattaaatcaacagcaacaagatcttgcacataaagcaattaacaatgccggtactgtatcagatgtaacagatattgttaataatcaaattgacttaaatgatgcaatggaaacattgaaacatttagttgacaatgaaattccaaatgcagagcaaactgtcaattaccaaaacgctgacgataatgctaaaacaaacttcgatgatgccaaacgtctagcaaatacattgctaaatagtgataacacaaatgtgaatgatattaacggcgcaattcaaacagtcaatgatgcaatccataatcttaatggtgatcaacgactacaagatgctaaagacaaggcaattcaatctattaatcaagctttagctaataagctaaaagaaatcgaagcttcaaatgcgacggatcaagacaagcttattgcgaaaaataaagcagaagaattggcaaacagcatcatcaacaacattaataaagcaacaagtaatcaggctgtatctcaagttcaaacagcaggcaaccacgcgattgaacaagtgcatgccaatgaaataccaaaagcaaaaattgatgccaataaagacgttgataagcaagtacaagcattaattgacgaaattgatcgaaatccaaatctaacagataaggaaaaacaagcacttaaagatcgtattaatcaaatacttcaacaaggtcataacgacattaacaatgcgctgactaaagaagaaattgaacaagctaaagcacaacttgcgcaagcattacaagacatcaaagatttagtgaaagctaaagaagatgcgaaacaagatgttgacaagcaagttcaagcattaattgacgaaatcgatcaaaatccaaatctaacagataaggaaaaacaagcacttaaagatcgtattaatcaaatacttcaacaaggtcataacgacattaacaatgcgatgacaaaagaagcaattgaacaagcaaaagaacgtttagcgcaagcattacaagaaattaaaaatttagtgaaagctaaagaaaatgcgaaacaagatgttgataaacgtgtacaagctttaattgatgaaatcgatcgaaatccaaatctaacagataaggaaaaacaagcgcttaaagatcgaattaaccaaatacttcaacaaggtcataacgacattaacaatgcgatgactaaagaagaaattgaacaagccaaagcacaacttgcacaagcattacaagacatcaaagatttagtgaaagctaaagaagatgcgaaaaatgcaataaaagccttagctaatgcgaagcgtgatcaaatcaattcaaatccagatttaacacctgagcaaaaagcaaaagcgctcaaagaaattgacgaagctgaaaaacgagcactacaaaacgttgagaatgctcaaactatagatcaattaaatcgaggattaaacttaggtttagatgacattagaaatacacatgtatgggaggttgatgaacaacctgctgtaaatgaaatttttgaagcaacacctgagcaaatcctagttaatggtgaactcattgtacatcgtgatgacatcattacagaacaagatattcttgcacacataaacttaattgatcagctttcagcagaagttattgatacaccatcaactgcaacgatttctgatagcttaacagcaaaagttgaagttacattgcttgatggatcaaaagtgattgttaatgttcctgtaaaagttgtagaaaaagaattgtcagtagtcaaacaacaggcaattgaatcaatcgaaaatgcggcacaacaaaagattaatgaaatcaataatagtgtgacattaacactggaacaaaaagaagctgcaattgcagaagttaataagcttaaacaacaagcaattgatcatattaacaatgcacctgatgttcattcagttgaagaaattcaacaacaagaacaagcgcatattgaacaatttaatccagaacaatttacgattgaacaagcaaaatcaaatgcaattaaatcgattgaagatgcaattcaacatatgattgatgaaatcaaagctcgtactgatctaacagataaagagaagcaagaagctattgctaagttaaatcaattaaaagaacaagcaattcaagcgattcaacgtgcgcaaagcatcgatgaaataactgagcaattggaacaatttaaagctcaaatgaaagcagctaatccaacagcaaaagaactagctaaacgcaagcaagaagctattagtagaattaaagacttttcaaatgaaaaaataaatagtattcgaaatagtgaaattggcacaactgatgaaaaacaagcagcaatgaatcaaattaacgaaattgtgcttgaaacaattagagatattaataatgcgcatacattacagcaagttgaggctgcattgaacaatggtattgctcgaatttcagcagtacaaattgtaatatctgatcgtgctaaacaatcgtcaagtactggaaatgaatctaatagccatttaacaattggttatggaactgcaaatcatccatttaacagttcgactattggacataaaaagaaaattgatgaagatgatgacattgatccacttcatatgcgtcactttaggaataatttcggtaatgttattaaaaacgctattggtgtggtgggtatctctggcttactagctagtttctggttcttcattgccaaacgtcgtcgtaaagaagatgaagaggaagaattagaaataagagataataataaagattcaataaaagagactttagacgatacaaaacatttaccacttttatttgcgaaacgtcgcagaaaagaagatgaagaagatgttactgttgaagaaaaagattcgctaaataatggcgagtcactcgataaagttaaacatacgccgttcttcttaccaaaacgtcgtcgtaaagaagatgaagaagatgtggaagttacaaatgaaaacacagatgaaaaagtgttgaaagataacgaacattcaccactcttattcgcaaaacgacgcaaagataaagaggaagatgttgaaacaacaactagtattgaatctaaagatgaggacgttcctttattattggctaaaaagaaaaatcaaaaagataaccaatccaaagacaaaaagtcagcatcaaaaaatacttctaaaaaggtagcagctaaaaagaagaaaaagaaatctaagaaaaataaaaaataa

SEQ ID NO: 418208 - DNA, 957 bp, Staphylococcus aureus
ttgaaaaataaattgctagttttatcattgggagcattatgtgtatcacaaatttgggaaagcaatcgtgcgagtgcagtggtttctggggaggagaatccatatgtatcaaaagcgttatctgtatcagggcaaaagagtaataatttaaccttaaagcagtataaagacagtcttaggagcgttatgtgtacatcagaaataaataaaaacgatggatatgatgaacctgaatataaagaggcaatggatacttaccgaaaaaaattatttgctgaactagatgcgctaaataaatttttagatgaagaaagaactattacaattaagaaaaaaagtaatgaaaatgtaagtgaagatattcttggattaacgcatcaaagatatgctgcaatacatcaaggaattaaagataataaggctgaatttgagaaaaaagttgagagtattgaaaacaaatattcggatctcaaaaagtttgatgaagttaaggatgacaaagtcagagatgaattgaatgaattagaaaataaagttttaatgctaggtcaagcttttcccgataaagttgaagccagaatggatctttataataaattagatatgatagttggttatagtgaagatgaacgagaagaaagacatcctcaaaatgaaagattatataaagaacgagttgaagatttagaaacaattatcgatgaattctttaaagatataaatgaaaatagaccagcaaatatcccagcattaactagtgataaagaaaataatagatctatggcattaaaattaaaacaagatacagaagctgctaaaaatgacgaatctaaaagaagcaagagaagtaaaagaagtttaaatactcaaaattacaaatctgcatctcaagaagtaactgcagaacaaaaagcagaatacgaaagaaaagctgaagaaagaaaagaaaagttttag

SEQ ID NO: 418209 - DNA, 225 bp, Staphylococcus aureus
ttggcaggtggtactggtttaccaggttcagctggtacctctggtgttggcggtgttggtgtttccggctcacttggtacctctggtgttggcggtgttggtgtttccggctcacttggtacctctggtgttggtggtgttggtgtttccggctcacttggtacttctggtgttggtggtgttggtggtgttggcggcgttgtatcttcttcaatcgtttgttga

SEQ ID NO: 418210 - DNA, 537 bp, Staphylococcus aureus; identical to SEQ ID NO: 414173

SEQ ID NO: 418211 - DNA, 513 bp, Staphylococcus aureus
atgcggacagcgattcagattcagacagcgattcagattcagacagcgattcagactctgatgcggatagcgactcagattcagacagcgactcagactcagatagcgattctgactcagatagcgattcagattcagacagcgattcagattcagacagcgactcagactcagatagcgattctgactctgatgcggacagcgattcagattcagacagcgattcagattcagacagtgactcagactctgatgcggacagcgattcagattcagacagcgattcagattctgatgcggatagcgactcagactctgatgcggacagcgattcagattcagacagcgactcagactctgatgcggacagcgattcagattcagacagtgactcagactctgatgcggacagcgactcagactcagatagcgattctgactctgatgcggacagcgactcagattcagacagcgactcagactcaagaaaacatacatctgttaaaccgatga

SEQ ID NO: 418212 - DNA, 318 bp, Staphylococcus aureus
atgcaattttatctgattttactagcactactttatttagttgttagttttattagtatttttaaaatggaagtgatattcactcgtattttgagaattattatgggtgtgttgttattattcgtcgtagcattaacgacgatgagcttcccgaaagaaaactggtgggtctttatcgtcttattactcttagttggtaatgtcgaagtgacaggattcaaaatgcttaaaaaagatctaaaaggtgtaaacatcctaaatttaatgtcattatttatctttgtcatatacttcatcttgaccatcgcattattctaa

SEQ ID NO: 418213 - DNA, 537 bp, Staphylococcus aureus
ttgaattggttcgggcaagatccagcatttgattactttaaaacgatggatagtacgactgttgcaactgttgtattggcatttgatgaaaaagacattgaaaacacttatgatggtactggcttcgtgattgcgagaacgagtgatacagacattaccgcatgtacttggacatcgaaaaaatggccatttactacaccggaaggtaaagcattgattcgtgcgtatgtaggtaaaccaggtgatactgtggttgatgatcatacagataatgaattagtatcgattgtacgtagagatttaagtcaaatgatgacatttaaaggtgatcctgaatttacaattgtcaatcgtttgccgaaaagtatgccacagtaccatgttggtcacattcaacaaattaggcagattcaagcacatattaaacaaacatatccacgacttagagtaactggtgcatcttttgaagcggttggactacctgattgtattacacaaggtaaagttgctgctgaagaagtaatcgcagagttgtaa

SEQ ID NO: 418214 - DNA, 288 bp, Staphylococcus aureus
gtgaatttacaagttaaagtagagccttttagcaaaaaggttaaagtaaatgttaaacagaaaggtagtttagcagatgataaagaattaagttccattgaattagaagataaagaaattgaaatcttcggtagtcgatatgacttacaaaatataggcgaagttgatgcagaagtagatttagatggtatttcagaatcaactgaaaagactgtgaaaatcaatctgcctgaacatgtcactaaagcagaaccaagtgaaacaaaagcttatatcaatgtaaaataa

SEQ ID NO: 418215 - DNA, 1905 bp, Staphylococcus aureus; identical to SEQ ID NO: 408598

SEQ ID NO: 418216 - DNA, 357 bp, Staphylococcus aureus
gtggaatacgggtttgctaaaagattattaaatacaaaacgctcattggcattacttttaatggcagaagttgatatttctatattaagtatggttccaagagaatattttcatcctaaacctaaagtgaatagctcacttatcagattaaatagaaaaaaatcaagaatatcacacaaagataaacagaagtataattatttcgttatgaaatgggttaacaaagaatacaagaaaatatttacaaaaaatcaatttaacaattccttaaaacatgcaggaattgacgatttaaacaatattagctttgaacaattcttatctcttttcaatagctataaattatttaataagtaa

SEQ ID NO: 418217 - DNA, 207 bp, Staphylococcus aureus
gtgacgcaatacttagtcacaacattcaaagattcaacaggacgcaagcatacacacataactcgagctaaaagcaatcaaaggtttacagttgttgaggcagagagtaaagaagaagcgaaagagaagtacaaggcgcaagttaaaagagatgcagttattaaagtgggtcagttgtatgaaaatataagggagtgtgggaaatga

SEQ ID NO: 418218 - DNA, 471 bp, Staphylococcus aureus; identical to SEQ ID NO: 409320

SEQ ID NO: 418219 - DNA, 333 bp, Staphylococcus aureus; identical to SEQ ID NO: 413588

SEQ ID NO: 418220 - DNA, 927 bp, Staphylococcus aureus
atggaaccaatattagaaatgattaaaacattaacaggtattaatagtccttcaggagacacagaagaagcaattcaatttgtcgaaaaatatgcaaaagacttgggttatcaaacaacactaacaaataaaggtgcgttattaataacagtgccaggcaaaaatgatgaagtacaacgctgtattactgctcatgttgatactttaggtgcaatggttaaagaaattaaagaagatggtcgcttagcaatagaattaattggaggattcacgtataacgcgattgagggtgaatattgccaaattaaaactgatgctggtcaaatatatacaggaacaatttgtctgcatgaaacaagtgttcatgtatatagaaataatcatgaaatacctagagatcaaaagcatatggaaataagaattgatgaagtaactacatcagaagaagatacaaagagtttaggtatttcagtaggtgattttgttagctttgatccacgtacagttatcacgtcatcaggttttattaaatctcgtcatttagatgataaagctagcgtagcgatgatactacaattactaaagaaattaaaagaagagcaaataatattaccacatacaacgcaattttatatttctaataacgaagaaataggttacggtgcaaatgcatcaattgattcgaaaatcaaagaatatattgcattagatatgggcgcgttgggagacggtcaagcatcggatgaatatacagtttctatttgtgccaaagatgcttcagcagctttacatgctggtgcggatatcagacatggtttatttggcgctggcattgaatcatctcatgcaatggaacgaacacatattgattctattaaagcgacagagaaattactatatgcatattgcttatcaccaattgagtaa

SEQ ID NO: 418221 - DNA, 285 bp, Staphylococcus aureus
atgaccaaagaacaacaacttgcagaacgaattattgctgcagtaggtggtatggataatatagatagtgtcatgaactgtatgacacgtgtgcgtattaaagtattagatgagaataaagtagatgaccaagaactaaggcatattgatggtgtcatgggtgttatacacgatgaacgcattcaagttgtggttggacctggtacagtcaataaagtggctaatcatatggcggaattaagtggtgttaaactaggtgaccccaataccacaccatcacaatga

SEQ ID NO: 418222 - DNA, 240 bp, Staphylococcus aureus
atgggaagtgctaaaaattacccttccttagatattttgattgctatgagtgacttatttggaattactatagatcatttaattaaaggagatacatgttttaaaaaagttattttagagggaaatgatagagagaacaaccgggtacctttcatagttgattttctttatgatttttggtggcttttctttcctgttgccgtattcttagtttgggctattcattcgtccttggattga

SEQ ID NO: 418223 - DNA, 147 bp, Staphylococcus aureus
atgcaagacaatcatacaaaatatatagacggaaatcaagataacgaaacactcaaaggtgttacaaaaagtgggaaacaacgtccgtggagagaaaagaaaatagataatttaaggttctgttgcaaagttagaaatatagtataa

SEQ ID NO: 418224 - DNA, 147 bp, Staphylococcus aureus; identical to SEQ ID NO: 418223

SEQ ID NO: 418225 - DNA, 147 bp, Staphylococcus aureus; identical to SEQ ID NO: 418223

SEQ ID NO: 418226 - DNA, 189 bp, Staphylococcus aureus
atgttaagttatggtggattgcttaaacaaaagcataaaattttaaacttagacgatgccgaagatggtaatttgattaatacaagtgatgaagataaaacgacagacgaagaagaaaaagcacattcgattacagcaatttggaatttcgaaaagcaaaattattatttaaaaaatttaaagagttaa

SEQ ID NO: 418227 - DNA, 147 bp, Staphylococcus aureus; identical to SEQ ID NO: 414010

SEQ ID NO: 418228 - DNA, 147 bp, Staphylococcus aureus; identical to SEQ ID NO: 407426

SEQ ID NO: 418229 - DNA, 147 bp, Staphylococcus aureus; identical to SEQ ID NO: 414010

SEQ ID NO: 418230 - DNA, 813 bp, Staphylococcus aureus
ttgaaaaacactttataccatcaactttatgaaaaattaaaaaaacaaataattgaaggtcaatttaaagaaggcgataaattttattctaaaagacaattaagcaaacatttatctattagccaaacaaccgtagagcatgcatatcaacttctattagacgaaggttacatttattcaagacctcgctctggatattttgtgtccgaaattgaatctttaacaattttaaacaatcaacctatcccctctctttttgatgatgattcatataaaccaaaagcgagtgatgaagcttatgattatgcttttaatttggatgaaatagatacgaaacatttccctatagaacttttcagaaagtattccaaagatctttatgatacaaatcatttaaatcaattacgtagaggacattttcaaggagaattacatttgcggtttcaactggcattttatttatttactaatcgtggcgtaatttgtgatcctaatcaaattataattggctcatctaccgaacaattagtaaatcaattagtcgatttactttatacttcaacatttattatcgaaaaacctagttatccaccaatcaaaaatattttagataaaaaacaagttgaatatgaacaaattgaagttgaagataatggaataaacgtagatgaagttattaaatcacaaaaaaaatatagtatatataacgccttcccatcaatttccaactggatatgtgatggacttaaaaaaacgaactcaattaatacaatgggctcaagaaaaagaagaacgatttattatagaagatga

SEQ ID NO: 418231 - DNA, 324 bp, Staphylococcus aureus; identical to SEQ ID NO: 409861

SEQ ID NO: 418232 - DNA, 183 bp, Staphylococcus aureus; identical to SEQ ID NO: 410158

SEQ ID NO: 418233 - DNA, 402 bp, Staphylococcus aureus; identical to SEQ ID NO: 408187

SEQ ID NO: 418234 - DNA, 618 bp, Staphylococcus aureus; identical to SEQ ID NO: 409378

SEQ ID NO: 418235 - DNA, 348 bp, Staphylococcus aureus; identical to SEQ ID NO: 409379

SEQ ID NO: 418236 - DNA, 975 bp, Staphylococcus aureus; identical to SEQ ID NO: 409380

SEQ ID NO: 418237 - DNA, 816 bp, Staphylococcus aureus; identical to SEQ ID NO: 409381

SEQ ID NO: 418238 - DNA, 831 bp, Staphylococcus aureus; identical to SEQ ID NO: 409382

SEQ ID NO: 418239 - DNA, 669 bp, Staphylococcus aureus; identical to SEQ ID NO: 410409

SEQ ID NO: 418240 - DNA, 594 bp, Staphylococcus aureus; identical to SEQ ID NO: 411693

SEQ ID NO: 418241 - DNA, 381 bp, Staphylococcus aureus; identical to SEQ ID NO: 409383

SEQ ID NO: 418242 - DNA, 1758 bp, Staphylococcus aureus
atggctaaattactaataatgagtgtagtaagcttttgttttatatttctattgttagtattttttaggtacatattaaaacgctattttaattatagtttaaattataaagtttggtatctaactgtgcttgctggattaattccttttatcccaattaaattctcttttataaaatttaataatgtgaataatcaagcgcccacagttgaaagtaagtcacacgacttgaaccataacataattaccaccaaacctgttcaagagttcgcaacagatatccataagtttaattgggattcaattgataatatctgcacagttatttggatagttttagttattattttaagttttaaatttttgaaagccttattatatcttaaatatttaaagaaacagtcactttatctaaacgaaaatgaaaaaaataaaatagatacgatacttttcaaccatcaatataaaaaaaatattgtgattcgaaaagcagaggctattcaatctccaataactttttggtatgggaaatatattattttgattcctagttcatattttaaaagtgtaattgataaaagactaaaatatataatactgcatgaatatgctcatgctaaaaatagagatactttacatttaattatctttaatatcttctctattattatgagttacaatccattagtacatattgtaaaaagaaagataattcatgacaatgaagtagaagccgatagatttgtccttaataatattaacaaaaatgaatttaaaacttatgcggaatctattatggactccgtattaaaaacctcatttttcaacaaaaatatattaagccattcatttaatggtaaaaaatcattactcaaaaatagattaattaatataaaagaagccgatctgaaaaagcagtcaaaattaattctaatttttatttgtatttttactttttttatcatgataattcaaagccagtttttaatggggcaatccttaactgattataattataaaaagcccttacaaagcgattaccaaattttagatgaaagtaaaaattttggttcaaatagtggatctttcgttatgtacagcatgaagaaagacaaatactatatttataatgaaaaagaaagtagaaaaagatattctcctgattcaacttacaaaatttatttagcactgtttggacttgaccgtcatattataagtgataaaaattcacgtatgtcatggaatcataaacattatcttttcgagtcttggaataaggaacaagatttaaatacagcaatgcaaaattcagttaattggtacttcgaacgtattagtaatcaaataccaaagaactatactgcggctcaactcaagcaattaaattatggtaatgaaaatttgggaagttataaaagctattggatggaagatagtttgaaaatatctaatcttgaacaagtaatagtttttaaaaatatgatggaacaaaataaccattttagtaaaaaagcaaagaatcaattatcttcttcattattgattaagaaaaatgaaaagtatgaactgtatgggaaaacaggtacaggtatagtaaacgggaagtataataatgggtggtttgtaggttacgtaattacaaatcatgataagtattattttgctacacatttatcagatggaaacccgtctgggaaaaatgctgaattaataagtgaaaaaatattaaaaggaatgggtgttttaaatggccaataa

SEQ ID NO: 418243 - DNA, 609 bp, Staphylococcus aureus
atgattgttggctatgcgagagtatcatcgaacgatcaaaatttagaaagacaacttgaaaatttaaagacgttttgtgctgaaaaaatatttacagaaaaacagtctgggaaatctattgaaaatagaccagtacttcaagaagcacttaactttttgaggatgggagatcggtttgtagtagaatccattgattgtttaggtcgtaattatgatgaagtgattcataccgttaattatttaaaagacaaagaagtacaattaatgattactagcttacctatgatgaatgaagtggttggcaatccattactggataagtttatgaaagatttaattattcaaatattagcaatggtttcagaacaagagagaaatgaaagtaaacgtcgacaagcgcaaggaattcaagttgcgaaggaaaaaggcatatataaagggcgccccttactttattcaccaaatgctaaagatccacagaaacgtattatttatcatcgcgttgtagaaatgttagaagaaggccaatcaattagtaaaattgcgaaagaagtaaatataacaaggcagacgatttacagaattaaaaacgataatgatttgatttaa

SEQ ID NO: 418244 - DNA, 294 bp, Staphylococcus aureus; identical to SEQ ID NO: 408498

SEQ ID NO: 418245 - DNA, 492 bp, Staphylococcus aureus
atgactttcgaagaaaaacaaagtgaaatgtacaataaaattgcaaatgagattagtggaatgataccggttgagtgggaaaaggtatatacaattgcttatgtagataatcaaggtggagaggtcatttttaattatactaaacctggaagtgaagaattgaattattattcagatattcctaaagatttcaatgtctcaaatgatatttttatggatttatggatgaaagtttatcggatgtttgatgagttaagagaaacttttaaaaaagaaaggtttgaaccatggacatcatgtgaatttgattttacaagagagggtaaattgaaagtatcatttgattatatagattggataaatacagagtttgatcaattgggccgtgaaaattattatatgtacaaaaaatttggggttataccagaaatggaatatgaaatggaggaggttaaacaaatcgagcaatatattaaagagcaagaagaatag

SEQ ID NO: 418246 - DNA, 282 bp, Staphylococcus aureus; identical to SEQ ID NO: 407821

SEQ ID NO: 418247 - DNA, 1296 bp, Staphylococcus aureus
atgaatattatactagatgacgcaccaaagactaatatacctattgagataaaagattactcctccctcttactatgttcattcttataccaaccattatttatattaaatgatggaaagttcatcgaaaatattgttactgataaaactacagataaacatattattttagagttcaaggaagtatattggagtaacggtgaactactaactgctgaagatttcatgaatacaatattttatatattagaaaataaattatatgcctcaaattatttgacattcatagaaggcgtagaagaatacttagatgaagaaattaacataaatgaaattggaatatacatagagaagaattctatatgtatcaaaaataagtatcaaggcaattactataaatatttgttttcaacaatatattttgccccattgaagataaaaaatggatttatattaaaaaatgtgacttgcggaaaatataaaatgatttcaaaagataattcactaagtttatcctctaatgtttataataataaaagcaatgttgaaaaaataaatttttggattgataaagatccgaaaaacaatatagttagatttttacaagataatattgattttacatctacgacattattatatgaagagcatgttaatggcataactgaaaaagaagaatttaaaagtaaaacttctaatcttcaacttagattagagtttagaaatggttcagtaaatttaaaaaaagatatttcaaaacatttgatatctatactgacaacagataaatatttaagtaaagatatgaatattattttagagaagaatatagaaaaattaattccagagaatgtatacaatatcccaaaaaatactataaaattactctatgctgattattatcctaataataaaattgcatattcaatattcgaattttataaagccaaaaatttagatgttgatttatatactggcaactttgatttttttttgaaagagtatgataaaaataaatacgatatagtcattaatattatttctccaatcacaaaacatttattagattattttatagaaaaaatatctttttttgaaaaagattatttggatgaatatattataatgttgaataaatggattgaaggagaagaaacgaagcgtaatttagtagagtatataagtaaatactcgttaatattagaggtaggaaatttaaagcataattatttattaaatgataaatatgtcaataaaatttatatagatgataatgataatataataattaaataa

SEQ ID NO: 418248 - DNA, 651 bp, Staphylococcus aureus
atgaaaaaatgtattttatttatattttctataattttattagtttcaatttctactttatttataccaaatgctaagtctgattctcgtgaaggtttaaaagacttttattcaaaaaaaatagatgtatacacaaataaaaaaataaatgaaaaagataaatatagcgttgatattgaagttgacaattatgtttatcgaatcaatacattagacgataaaatattaaaccaatttaaggttggtgattatgtagatgcttggggacatataataaataataaacccattggcaaagtaattaaattttatgatggagatattagtaaacatagccctttagacaagcctacaaatatatcttatcgaattaatttatttaaagaacaaaagcaaacagaagtaacacccgaaaaagagttagaaataggaaatagatatttaactatgaaacagattgattatcgaattaaaagttatttagtaaaaaaacaacagttatatactgaattctacaatggaaaaattgaaataagcatgttagatggaaaaaaacattttattgatttgagtacatactattatgatcctagcaactttacacttgattacacaaaaataagtcattttgatatatatatggaaaaatag

SEQ ID NO: 418249 - DNA, 147 bp, Staphylococcus aureus; identical to SEQ ID NO: 407426

SEQ ID NO: 418250 - DNA, 489 bp, Staphylococcus aureus; identical to SEQ ID NO: 409940

SEQ ID NO: 418251 - DNA, 948 bp, Staphylococcus aureus
atgagctataaccatcttacactaactgaacgcgcacgtatagaggttttacgtcaagaaaattattctttaagatctattgcacgtaaattaaaacgatctgtatctactatctcacgtgaaattagtaggaataatttaaatcagtcgtatcaagctgaaacagctcaaaaaaattatgaaaccaaaagaaaactttgtggtcgtcctactcgatttactccagaacttggtaatatcattaaatattatttaaaatgccactggtctcctgaacaaatcgtaggtcgtctattacaaaatcaaatctgttttaaaatcatctatcgatggattaactctaatatgattaatttcgaacttatttcatgccttcgtcaaaaaggaaaaagacagaaacctaaagaaactagaggtaagtttaatattggccgtcctatttcacaacgtcctaaggaagtaaagaaacgtaatacattcggtcattgggaagctgacacaattgtatccagcagaggcaaaagtaaagggtgcattgctaccttcgcagaaagaaaatcacgttattattattgtgtacttatgcctgatcgttcctctaattctatggagacggcaattaataaccttatcaaacatctacctaaaggtgccgttaaaactattactgtcgatagagggaaagagttctcttgttatcaaaatattgaaaaccaatttaatattaatgtctacttcgctgatccatattccgcatggcaaagaggtacaaatgaaaataccaatggtttactaagagaatttttccctaagaaaacagacttagctaaagtaaatcaagagcaacttaactatgcattagactcaattaattatcgaccaagaaagtgtttaaattggaagtttccttatgaagttttatgtgatgaactgttgcacttaaattga

SEQ ID NO: 418252 - DNA, 636 bp, Staphylococcus aureus
atgtatagagcagttatatttgatttcgatggaacaataatagatacggaacaacatttatttaatgttattaataaacatttagagatgcataatgccgatcctataagcattgatttttatcgttcttctattggaggagcagctacagatttgcatgaccatttaattaaagcgattggttcggaaaataaagataaactttatgaagaacatcatcttactagtacaacattaccgatgattgatacgattaaatcattgatggcatttttaaagcaacgtcacattcctatggcgattgccacaagtagtgttaaatcggaaataatgcctacctttaaagcattaggtctagacgattatatagaggtagttgttggtagagaagatgttgaacaagttaaacctgaccctgaattatatttatctgcagtacaacaattaaattatatgccgacacaatgtttggctattgaagattctgtaaatggtgcaacagccgcgattgcagctggattagatgttattgttaatacgaataaaatgacaagcgcacaggacttttctaatgtagattatgtagcaaaagatattgattacgatcaaattgtagcgcgtttctttacgaaatag

SEQ ID NO: 418253 - DNA, 948 bp, Staphylococcus aureus
ttgaaacgttcgtctaaaagtaaaatgagcctaccgaaaaaaatatttttatgggtattcggtattttagtaatcttagcgattgtagctgttgtgtatgtagctgctaaaatttttattactggtaataagatacacaatccgttagatcgcaatcattcagaattaagagataaaaaagtgagtttaaacgatggtgatccattcacaatcgctttatttggtgtcgattcagatgctgatcgtaagaaaaagggtggcggagagcgtagtgatagtattatgattttatctatcaaccctaaaacgaagaaaactgaaatagtaagtataccgcgtgatacaagagcggaaattgttggccgtgatactactgaaaaaattgcacatgcctatgcatatggtggaccaaatatggctgttaaatcacttgaaaaattaatgaatgtgccaattgatcattatgcgacaatcgatatggatggtttgcataatatgatagatagcatcggcggtgttgatgtagtaagtaatgatacattcactgttgatggtgttcgttttacaaaaggacagcaaacacatgtaaatggtgatcaagcattgaagtttattagaagtcgtaaagaagaaggtgctggtggtgactttggtcgacaacaacgtcagcaaattgtacttgaagcgatggctaataagattgcaagcccatcatcgattacacattttaatagtctaatgaatgaaattcaaaataatgttaaaacagatttaacattaggtgatttgaatacgattagaagcaattataaagatgctaatgacacgattaataaacatcaattgagtggtcaaggcggcattcaaagtgacggattgtactacttcattcctagtgagcagtcaaaagctgaaagtactaagttattaaaagataatctagagtag

SEQ ID NO: 418254 - DNA, 777 bp, Staphylococcus aureus
atgaagaagaatttcaagttacgtatttcaacgctactattgatagttattttagttgttttttctgtattgctcatcgtgaatgaaactaaattgtttaaaaatgatgtgaattactcttttgatgaggctgtttcaatgcaacaagggaaaggtattgtacagacaaaagaagaggatggtaaatttgttgaagcaaataataatgaaattgctaaagcaatgactatttcacataaagacaatgatatgaagtatatggatatcacagaaaaagtgccaatgtcggaatctgaagttaatcaattgctaaaaggtaaggggattttagaaaatcgagggaaagtttttctagaagctcaagaaaaatatgaggttaatgtcatttatcttgttagccatgcattagtagaaacaggtaacggcaaatcagaattagcaaaaggcattaaagatggaaaaaaacgctattacaacttttttggtataggagcattcgatagtagtgctgttcgtagtgggaaaagttatgctgaaaaggaacaatggacatcaccagataaggcgattcttggtggtgcaaagttcattcgtaatgaatattttgaaaacaatcaactgaatttatatcaaatgcgatggaatccagaaaatcctgcgcaacatcaatatgcgagtgacattcgctgggcagataaaattgccaaattaatggataaatcctataagcagtttggtataaagaaagatgatattagacaaacatattataaataa

SEQ ID NO: 418255 - DNA, 1125 bp, Staphylococcus aureus
atgaagatagcaattataggtgcaggcatcggtggattaacagctgctgcactattacaagaacaaggtcatactattaaagtctttgaaaaaaatgagtcagttaaagaaattggcgctgggattggtatcggagataatgtgcttaaaaaattaggtaatcatgacttagctaaaggtattaaaaatgctgggcaaatcttatctacaatgacagtgttagatgacaaagatcgcccgttaactactgttaaattaaaaagtaatacattgaatgtgacgttaccacgccaaacattaattgacattattaaatcttatgtaaaagatgatgcaatatttacaaatcatgaagtcacgcatatagataatgagacagataaagttaccatacatttcgcggaacaagagagtgaagcatttgatttatgtattggtgctgatggaattcattctaaagtgagacaatctgtaaatgctgacagtaaagtattatatcaagggtatacatgctttagaggtttaattgatgatattgatttaaaacatccggattgtgcaaaagaatactggggaagaaaaggaagagtaggtattgttccgttattaaataatcaagcatattggttcattacaattaactcgaaggaaaacaatcataaatatagttcgtttggtaaacctcatttgcaggcatactttaatcactatccaaatgaagttagagagatcttagacaaacaaagtgaaacaggtatcttattgcataatatttatgatttgaaaccactcaaatcttttgtttatggtcgtactattttactaggagatgcagcacatgcgacaacgcctaatatggggcaaggtgctggacaagcaatggaagatgctatcgtattagtaaattgttttaatgcatacgactttgaaaaagcattacagcgttatgataaaatacgtgtcaaacatactgcaaaagtaattaaacgttctagaaaaatcggtaaaattgcccaatatcgtagtcgtttagttgttgcagttagaaatcgtattatgaaaatgatgccaaatgcattagcagctggacagactaaattcttatataaatcgaaagaaaagtaa

SEQ ID NO: 418256 - DNA, 1083 bp, Staphylococcus aureus
atgaaaatagcaattgtaggatcaggaaatggcgcagttacggcagcagtagatatggtgagcaaaggccacgatgttaaattatattgtcgtaatcaatctataagtaagtttcaaaacgcaatcgaaaagggcggatttgattttaataatgaaggtgaagaacgtttcgtaaaattcactgatattagtgatgatatggaatatgttttaaaagatgctgaaattgttcaagtgattattccatcttcatacatagagtattatgctgatgtaatggcagagcatgtaactgataatcagttgatattcttcaacatggctgcagcaatggggtcaattcgttttatgaatgttttagaagatagacatattgaaacaaaaccacaattagcagaagctaatacgttgacgtatggtacgcgtgtcgattttgaaaatgcagcagttgatttatctctaaatgtacgtcgtatcttcttttcaacatatgatagaagctgtctaaatgattgttatgacaaagtttcaagtatttatgatcatttagtaaaagaggaaagcttaattaaaacaaatcttgaaaatggtaatcctgaagtgcatccagggccaacattattgaatgtcggttgtattgattatgctggtgagttcgctttatataaagaaggaattactaaacatacagttagattacttcatgcaatcgaattagaacgtttaaatttaggccgtagattaggttttgaattatcaacagctaaagaatcacgtattgaacgtggttatttagaacgtgataaagaagatgaaccattaaatcgtttgtttaatacaagcccagtattttcacaaattccaggaccaaatcatgtagaaagcagatatttaactgaggatattgcatatggtttagtattatggtcaagcttaggtcgtgttattgatgtaccgacaccaaatatagatgcagtaattgtcattgcatcgacaatcttagaaagagatttctttgaagaagggttaacagttgaatccattggcttagataagcttgatttagaaaaatatttaaaataa

SEQ ID NO: 418257 - DNA, 1398 bp, Staphylococcus aureus
atgacaagaaaaccaacctttttagaatcaatttcgacaatgattgtaatggttattgttgttgtaacaggctttgtgttttttgatattccaattcaagtattattaattattgcctcagcatatgccgcatggattgcaaaacgtgtaggcttaacatggcaagatttagaaaaaggcattgcagaacgtttaaatactgcaatgcctgcaattttaataatactagcggtaggaattatagtaggcagttggatgttttctggcacagtgccagccttgatttattatggcttagatttattgaatccaagctattttttaatatcagccttttttataagtgctgttacatctgtagcaactggtacagcatggggctctgcatcaactgcagggattgcacttatttctatcggtaatcaattaagtatctcaccaggaatggctgcgggtgctattatagcaggcgctgtatttggcgataaaatgtcacctttatcagatacaactaatttagcggcgcttgtcactaaagtgaatatatttaaacacattcgttcaatgatgtggacaacaatacctgcgtcaatcatcggtttattagtatggtttattgctggatttcaatttaaagggcattcaaatgataagcagattcaaacattgttatcagagcttgcacatatttatcaaattaacatatgggtctgggttcccttaattgtgatcattgtttgtttgctatttaaaatggctacagtgccagctatgctaatatcaagcttttctgccattatagtgggaacttttaatcatcatttcaaaatgacagatggtttcaaagcaatatttagtggttttaacgactcaatgatacatcagtctcatatttcatccagtgtgaaaagcttgttagaacagggtggtatgatgagtatgacccaaatattagtaacgatattttgcgggtatgcatttgcaggtattgtagaaaaagcaggatgtttagaagtcttattaactactatttctaaaggcatccattctgtaggaagtttaatatgtattactgttatttgttgtattgcgcttgtattcgctgcaggtgttgcttcgattgtaattataatggtcggtgtgttaatgaaagatttgttcgaaaaataccaagtctctcgttccgttttatcaagaacacttgaagactcaagtacgatggtcttacctttaataccatggggaacatcgggtatttactatacgaatcaacttcatgtctctgttggagaatttttcatatggacagtaccatgttatttatgcgcaattatagcaattatctatggttttacagggataggtattaaaaagtcatcgaattcacgtttaacttaa

SEQ ID NO: 418258 - DNA, 810 bp, Staphylococcus aureus
atgaagaaaatcgctacagctactatcgcaactgcaggattcgctacaatcgcaattgcatcaggaaatcaagctcatgcttctgagcaagataactacggttataatccaaatgacccaacatcatatagctatacttacactattgatgcacaaggtaactaccattacacatggaaaggtaactggcatccaagtcaattaaaccaagataatggctattacagctattactactacaatggctacaataactatagctacaacaattacaataacggttatagctacaataactacagccgttacaacaactactcaaataataatcaatcatataactacaacaactataatagttacaacacaaacagctaccgtactggtggtttaggtgcaagctacagcacttcaagcaacaatgttcaagtaactacaactatggctccatcatcaaatggccgttcaatctcaagtggttatacttcaggacgtaacttatacacttctggtcaatgtacatactacgtatttgatcgtgtaggtggtaaaatcggttcaacttggggcaatgcaagtaactgggctaacgcagctgcaagagctggttacacagtgaacaatacaccaaaagctggtgcaattatgcaaacaactcaaggtgcatacggtcacgttgcatacgttgaaagtgttaacagcaatggttcagtaagagtttcagaaatgaactatggttatggcccaggtgttgtaacttcacgtacaatctcagctagccaagctgctggttataacttcattcactaa

SEQ ID NO: 418259 - DNA, 327 bp, Staphylococcus aureus
atgattttagataatgtaaatccaaatgatttatttccaactgaaaaaaagggcccgtcagtgctaggaataattgagtatcaagttcaaggtaagaatgaatttgaaggggcatttatagcaacaaatgaaagattaattatgaatgtagatatgaatggtcaattttattatagaagtattagttataatgaaatagagaagatagattatgatggtcaaactataatgttcaaatttaatattggtaatgtcccaatgcatgatattaaaagtgataacgttgaaatgtttgttgaatacgtaaaacaacatatgatagtataa

SEQ ID NO: 418260 - DNA, 672 bp, Staphylococcus aureus
atgcctgacttaacacctttttggatatcaatacgagttgctgtaatcagtacgattattgtaacggttttaggtgtttttatatctaaatggttgtatcgtcgtaaaggttcgtgggttaaagtattggaaagtttattgatattacctattgttttgccgccaacggtattaggttttattctattaatcatcttctcgccaagaggaccaatcggtcaattctttgcgaatgtactacatttacctgtagtgttcactttgacaggtgctgtgatagcatctgtcattgttagttttccactaatgtatcaacatactgtgcaaggcttcagaggtatagacacgaaaatgattaatacagctagaacgatgggagcaagtgaaacgaaaattttcctcaaattaattttaccattagctaaacgctctattttagcaggtataatgatgagttttgctcgtgcattaggtgagtttggtgctacattaatggttgcaggatatattccaaataaaacgaatacactacctttagaaatatacttcttagtggaacaaggtagagaaaatgaagcgtggttatgggtattagtgctagtcgcattctctattgtggttatatctacaattaatttattgaataaagataaatataaggaggtcgactag

SEQ ID NO: 418261 - DNA, 447 bp, Staphylococcus aureus
atgaaacaatttgaaatcgtgacagaaccgatacaaacagaacaatatcgtgaattcactataaatgaatatcaaggtgcagtagttgtttttaccggtcatgttcgcgaatggactaaaggcgtcaaaacggaatatttagaatatgaagcgtatattccaatggctgaaaagaaattggcacaaattggagatgaaataaatgaaaaatggcctggaacgataacgagtattgttcatagaatagggccattacaaatttcagatatagctgtattaattgcagtttcttcaccgcatcgtaaagatgcctatcgagcaaatgaatatgcaattgagcgtatcaaagaaattgttccgatttggaaaaaagaaatttgggaagatggttcaaaatggcaagggcatcaaaaagggaattatgaagaagcgaagagggaggaataa

SEQ ID NO: 418262 - DNA, 234 bp, Staphylococcus aureus
atgaaggtactttacttcgcagaaattaaagatatattacaaaaagcacaggaagatattgtgcttgaacaagcattgactgtacaacaatttgaaattttattgtttgaacgttatccgcaaatcaataataaaaagtttcaagttgctgtaaatgaggaatttgtacaaaaatccgatttcattcaacctaatgataccgttgcattaattccaccggttagtggaggttaa

SEQ ID NO: 418263 - DNA, 351 bp, Staphylococcus aureus; identical to SEQ ID NO: 414457

SEQ ID NO: 418264 - DNA, 834 bp, Staphylococcus aureus
atggctattaaaaagtataagccaataacaaatggtcgtcgtaatatgacttcgttagatttcgcagaaatcacgaaaactacacctgaaaagtcattattaaaaccgctaccgaaaaaagcgggacgtaacaaccaaggtaaattgactgtaagacaccatggtggtggacacaaacgtcaataccgtgttatcgatttcaaacgtaacaaagatggtatcaatgcaaaagttgattctattcaatatgatccaaaccgctcagcaaacatcgctttagttgtatatgcagacggtgaaaaacgatatatcattgctcctaaaggattagaagtaggtcaaatcgttgaaagtggtgctgaagctgacatcaaagttggtaacgcattaccattacaaaacattccagttggtacagtagtacacaacatcgagcttaaacctggtaaaggtggacaaatcgctcgttcagctggtgcaagtgctcaagtacttggtaaagaaggtaaatacgtattaatcagattaagatctggtgaagttcgtatgatcttatctacttgccgtgctacaatcggtcaagttggtaacctacaacacgaattagttaacgttggtaaagccggacgttcaagatggaaaggtatccgtccaacagttcgtggttctgtaatgaaccctaacgatcacccacacggtggtggtgaaggtcgtgctcctatcggtagaccatctccaatgtcaccatggggtaaacctacgcttggtaagaaaactcgtcgtggtaaaaaatcatcagacaaacttatcgttcgtggacgtaagaaaaaataa

SEQ ID NO: 418265 - DNA, 654 bp, Staphylococcus aureus
gtgggtcaaaaaattaatccaatcggacttcgtgttggtattatccgtgattgggaagctaaatggtatgctgaaaaagacttcgcttcacttttacacgaagatttaaaaatccgtaaatttattgataatgaattaaaagaagcatcagtttctcacgtagagattgaacgtgctgcaaaccgtatcaacattgcaattcatactggtaaacctggtatggtaattggtaaaggcggttcagaaatcgaaaaattacgcaacaaattaaatgcgttaactgataaaaaagtacacatcaacgtaattgaaatcaaaaaagttgatcttgacgctcgtttagtagctgaaaacatcgcacgtcaattagaaaaccgtgcttcattccgtcgtgtacaaaaacaagcaatcactagagctatgaaacttggtgctaaaggtatcaaaactcaagtatctggtcgtttaggcggagctgatatcgctcgtgctgaacaatattcagaaggaactgttccacttcatacgttacgtgctgacatcgattatgcacacgctgaagctgacactacttacggtaaattaggcgttaaagtatggatctatcgtggagaagttcttcctactaagaacactagtggaggaggaaaataa

SEQ ID NO: 418266 - DNA, 360 bp, Staphylococcus aureus; identical to SEQ ID NO: 415300

SEQ ID NO: 418267 - DNA, 180 bp, Staphylococcus aureus; identical to SEQ ID NO: 406234

SEQ ID NO: 418268 - DNA, 441 bp, Staphylococcus aureus; identical to SEQ ID NO: 406233

SEQ ID NO: 418269 - DNA, 1293 bp, Staphylococcus aureus
atgattcaaacccttgtgaacttctttagaacaaaagaggttcgtaacaagattttcttcacactagcaatgttagtaatttttaaaatagggacttatataccagctccaggagtaaatcctgcagcttttgataatccccaaggttctcaaggtgccactgagttattaaatacttttggtggcggagccttgaaacgattttctatttttgcaatgggtattgtaccctacatcactgcatctatcgtaatgcaactattacaaatggatattgtccctaaattctcagaatgggcaaaacaaggtgaagtaggaagaagaaagttaaataacgttactcgttatttagcaatttctttagcatttatccaatctataggtatggcattccaatttaataattatctcaaaggtgcactgattattaatcagtcaattatgagttatttattaattgcactagttttgacagcaggaactgctttcttaatatggcttggtgatcaaatcactcagttcggtgttggtaatggtatttctattatcatattcgcaggtattttatcaacgttaccagccagtctaattcaatttggacaaactgctttcgttgggcaagaagatacgtcattagcatggttgaaagtattaggactattagtgtcactgatactattaactgtaggtgctatttatgttcttgaagccgttcgtaaaattccaattcaatatgctaagaaacaaactgctcaaagattaggttcacaagcaacgtatctacctctaaaagtgaactcagctggtgttattcctgtaatctttgcaatggcgttcttcttactgcctagaacattaacgttgttctatccagataaagaatgggcacaaaacattgcgaatgctgcaaatccttcaagtaatgttggtatggttgtatatattgtactgatcatactattcacatacttctatgcatttgtacaagttaatccggaaaaaatggctgataaccttaagaaacaaggtagctatgttccaggtattagacctggtgaacaaaccaaaaaatatattactaaagttttatatcgtttaacttttgtaggttctatcttcttagccgttatttcaattctaccgatattagcaactaagtttatgggattaccacaatcaattcagattggtggtacaagtttacttatcgttattggtgtagcgattgaaacaatgaaatctttagaagctcaagtatctcaaaaagaatataaaggctttggtggtagataa

SEQ ID NO: 418270 - DNA, 219 bp, Staphylococcus aureus; identical to SEQ ID NO: 406230

SEQ ID NO: 418271 - DNA, 810 bp, Staphylococcus aureus
gtggaggataagaattcagttattgtatttaaaaatgtttcatttcaatatcaaagtgatgcatccttcacattgaaagatgtttcttttaatatacctaaagggcagtggacatctattgtcggtcataacggttctgggaaatctacaattgccaagttaatgattggcatagagaacgttaaatctggagaaattttttataataatcaaactataacagatgataattttgaaaagttaagaaaagacataggaattgtatttcagaatccggataatcaatttgttggttcaattgtaaaatacgatgttgcatttggactcgaaaatcatgcggttccacatgacgaaatgcacagaagagtcagcgaagcacttaaacaagttgatatgttagaacgtgcagattatgaacctaatgcattatcggggggacagaagcagcgtgtggctatagcaagtgtattagcacttaacccctctgtcattatattagatgaggcgacttctatgttagatcctgatgcacgtcaaaatttattggatttagtgagaaaagttaaatcagaacataatattacaatcatttctattacgcatgatttatctgaggcgatggaagcagatcatgttatcgttatgaataaagggactgtctataaagaaggaacagcgactgaaattttcgaccatgcagaagagttaacaacaataggtctagatttgccattcccaatcaaaataaatcaaatgctgggacaccaaacatcattcttaacttatgaagggctggtggatcaactatga

SEQ ID NO: 418272 - DNA, 636 bp, Staphylococcus aureus
atgcatgaaggctttatgacattgattaaagagatgtttccgaacgctaaaatagttatcgatcgattccatattgttcaattattaaatcgtgctttaaatggtattcgagtcgctgttatgaatgaattaagaacgacgaatcaacctttatataataagtttaaaagatatgcgaaattactattaaaacctggagaagatttaggggcatttgaatatcgtaaagtagctttatttaaggaatggaagacacaaaagggtatcgtcaagtatttattagatcaagatgactcgttaaatgacgcctaccaatatatcaatcagctacgattcaaacttaaacataatgattatgaaggctttattcacgaattaaaacatatgccattatcccaaacgcatttagttgtccaacgagcaattaagacacttaacaaacatgcatactttataaaaaatacatttgattattacaatttatcaaatggtcctttagaaggtataaataacaaaataaaattaattaaacgtacatcttttagttatggaaattacaatcatttgcgcaatcgaatattattatgttcaaaactttacgctccaaaaagtaaaaggaagttaagcaatgtttag

SEQ ID NO: 418273 - DNA, 222 bp, Staphylococcus aureus; identical to SEQ ID NO: 417259

SEQ ID NO: 418274 - DNA, 414 bp, Staphylococcus aureus
atgtgtgaattccaaattgaaagtatgtaccatatgagtgcgtcgaccacaacatgtgatgaaataatgggggtcgtgtctgtctcatatccgattgaaaaattagttatcaaaattattgaaacaaaagcagggttacaaaactataaaaatagatctataaataatatggcgttgttgaaaaaggtactaaatcattatacagaaaaagagcagaagcaagttgtaaaatatatgcgttcaaatggacgatataagccttacaacgtcattgaacgcttacaagttgatttgtatcaagcaagtattaaacaacgttcagaacgtcaaaaacaaagaaatacagcaattgaaaacagtaagattgcacgagtaaatgaatatcaccaatcttcatatgtaaaagtggtgtaa

SEQ ID NO: 418275 - DNA, 639 bp, Staphylococcus aureus
gtgtttattgcacgagtttcaaaaggacgttcaattagagagttcatttctggtgtcttgctagttccagcaattgttagttttgtttggtttagtgtctttggtgtattaggcatcgagacaggtaagaaacacaaagaaatttttgatatgactcctgaaacacagctatttggagtgtttaatcatgtgccatttggcattgttttatcgttgattgcattattattaattgcatcattctttattacatctgctgactcagcaacatttgtattaggaatgcaaacaacatttggttcattaaatccatctagtatggtaaaagttgtttggggaatttcacaggccttaatagcatttgtacttttattagctggtggcggtaacggcgctgaagctttaaatgcgattcaaagtgctgcaattataagtgcattcccattctcctttgtcgtcatactcatgatggtaagtttctacaaggatgcgaaccaggaacgtaaattcctaggtttaacattgactccgaataaacatcgcttacaagaatatatcaagagtcaacaagaagattatgaatctgacattcttgaaaagcgtcagtcacgtagaaatatagagaaaaaagataactaa

SEQ ID NO: 418276 - DNA, 162 bp, Staphylococcus aureus
atgaaagaacaacttaatcaactatcagcatatcagcctggtttatctccaagggcattgaaagaaaagtatggcattgaaggagatttatataaacttgcatcaaatgaaaatttgtatggaccatcgcctaaagttaaagaagcgatatcagccacttag

SEQ ID NO: 418277 - DNA, 285 bp, Staphylococcus aureus
atggctttaaacatggctggtcagtcgattttggagattggacgaagattcaaagatgttaaagaaaatgacttagcgcatggagagttcggcaaatggttaaaaaatttaaattttgattggaatacagctaatcgttttatgaaagtttcggcagaattaccaaattctgatacgtaccataatttaggctctaatgcgttgtatctaattactactcttcctgaacgagaacgcactaaagaacacaaaacatcaaacggcgaaactaaaattccatactaa

SEQ ID NO: 418278 - DNA, 438 bp, Staphylococcus aureus
gtgtttaaaagaaacatagacgttgttttattttttataatcctaattattgtgttcttgtgtttgaatgttcaatattctgttattcaaaataaagaaaaatatagtgattttttggaaacaataatatctttttcttctttaacaacagcatttttgtttttttctgttactcttataccacttttaaatgatagagcaaaattgtttgagaagttagatacagaaaagaaattgattgaaaatattatgctaaatacagagatgttcttatttttatctatttatacattggttttgtacggttttaaattatatgatattgaaattgataacatttattttgttatttggtattcaattatatgtgcttccatttttaaactaataagaactttctattttttgacaatcaatattgctaagaccattaaatga

SEQ ID NO: 418279 - DNA, 909 bp, Staphylococcus aureus
atgaatactgttaccaaaaaatataatttttttgttttaacttatcaatttaaaaataaggttgaaaaaaattatgaaagaatgaacgaatatttagaaaaatctctgaaagaatttgaagaaaaaaaggattttaattttataaaatgcaaaaacacgacctacatcggatttaattatattgaaaaatatgaatacgataataatgaagtatgggtcttttgtttgtcaaaaacagttacaacaaaaattgcagttataaatgaaataaaaaaaagagtaaaagatggtagatcagaatatggtgatgaactagaacaaggtttaacagttgatactgtagtgttattttgtcctaaatcaggaatagtgattattccatcaaataaaggtggaatttctcgatcagattttaaacagtttttctataaaactgttaagaaaaaaggagctaaaatgaacatcgctataaataatacagaaattgaaaatttaaagcacattgataatataaaagaagttgagtttaatatttctagaattgtagatgtagataaaataaagaataaaaatcagtcaacgcaaagagataaaaaaatgattgataaactaaatgctgattctatgaaggtaaagtatacatcaaaatctttaaatatttccgagtcattaaaacaaataaaaaatattttagcgaaagataagacaaaagaagtcaaaaaaatggttattagaggagagaatgatggccatgaacaaattattgatcttatcgctaacagattaatatatatagatgatgatgtagaattaaacaacaataataaaataactattaattctatgattaaatcgataaaaaaagcttatagagataatttgaagattattgaaaaagatattctttaa

SEQ ID NO: 418280 - DNA, 906 bp, Staphylococcus aureus
atggaagagaaacaatacttatggagatataacgatatagaaaaaagaatgaatgaacttcacaaaaaatataaagaattagtggatatattttttggtgatgtaatagataaaaatactggatacttccccttttattccggtataaaatatagttacgcagatttgaatatcagtttttacagaggtttaatttatattcacggtgggtcagaaggcatgcaagcgaaaaaaataaatatttctgtagatgatgttttaaaaagaacagaaagatctttcgagaagttaagtgaatatataaaaagtactttcattttcgaaaaagtcatacatgattttcaaatgtttaacttgagcgatttagctagtatatacaacgacgatgcaattgcgcattattattttgaaactcattctgacttatatttatcagataaatctacaaaaatttatcgaacacctaattctttgttagaaaacgcaaatgatttaccggcttctttaagaaaatacactcaattattagaaacagttaatgacaaggattttgaaactcatatagttgaagcttatgattgctttatgtctgaaaaaaggctagctacatcactacttttaggtagagcgctagaactaatgtgtaggctgatattgaacaagtttgataaagatataattaaacaaacacctgattacaagaggaatataagaacatttttaaacgaaatggaaaacaacgatttaatagaagaacatttaaaacattcagtcaaagctgctattgaacacagaaactctattatgcatggtattaaaatcgaagagtacaattcgataattcaaacattatttgacgaaatagctaagctgtctaatgtatataagtctcttaataaacagtaa

SEQ ID NO: 418281 - DNA, 549 bp, Staphylococcus aureus
atgaaagagatttggaaagatgttgttggatatgaaggtatttatgaagtcagtagttacggaagaattagaacgcataaagataaaacgacttataccgagaaacatggtattagacattggaaacaacgttatttaaaagataaaacgcccaacggtagagatgtaagagtatcgctttggaaaaacggagagtgtaagtattttctagttcatagattagtagctttcgcttttataccagttgttaaaggaaaagagtgtattaaccatatagacggtaatcctaaaaataataacgttgaaaatctcgaatggtgtacttacaaagaaaatactattcatgctttcgaaaatggacttaatactagcaatatggctgtaaaactaacaaatcacataggaatagaatacgaatttataagcatggcgagggcttcaaagtttttaggtaggtgtcacggatacgtaagtgataggttgaaaactggtcatgaacaattaaccgatattaacggaaattattttaaagtagagaagttggtttaa

SEQ ID NO: 418282 - DNA, 261 bp, Staphylococcus aureus
atgtattacaaatttggtgagataaaaaacaaaattataagctttaacgggtttgaatttaaagtgtctgcgatgaagaaacatgacggtatcagtatacaagttaaggatatgaataatgttccacttaaatcatttcatgtcacagatttaagcgaactatatattgcaatggatgtaatgcatgacgttgtaaacgaatggattaaagaaaatacagatgattacgacagactaatgaacttagtcatgaaatggtag

SEQ ID NO: 418283 - DNA, 321 bp, Staphylococcus aureus
atggctaaagaaattctttcacaaaatttaaaagaacttttaagtcgcaaaggaaaaacacaaactgatatggcgaaagaacttaatttaaaagaatccactgtaagcagttggattaacgctgtcaaataccctagaagagacaaaattgaattactcgctgattattttgatgttatgccttcagatatcactgaagataaatcaactcaacaacatacaattgccgctcactttgataaagaagatttaacagaggaggaattggatgaagtaagacaatttatcgaaataataaagcgtagaaaaaacagaaaataa

SEQ ID NO: 418284 - DNA, 462 bp, Staphylococcus aureus
atgggaaaatatgaggaattggttattcaacatgaagaaataccaatctacgaaaccgatttattacctgatttccaatctggttgtttttttgatggggaaatttacattaaaaagtcattgaatgatttaaggaagcttgaaattttacacgaagaaatagcacactacaaaataaccgctggggatatattggactataaaaaacctataaatcgttatttcgaaaacaaagcgcgccgattagcaaatcattcagcaataacgtttgatgacttaatagaagctaatcaaagtggcgtgcgaaacttacatgaattatctgaatttttggaactaaacgaggactatgtatctaaagtattagatgaatatttttcgatatatggtttagatgtaatacatagaaattacttaattagattcagtcccctttcagttactaaacttagtgaaatataa

SEQ ID NO: 418285 - DNA, 1143 bp, Staphylococcus aureus
ttgaacgaaaacgctttggagagtaaatatttagaaggaacatttcctattataaaaattcctaaagaaactaattattggattataagagcgtctggaggcaaatatgcaaaagatttcgaattaaataacagaataactttagactcggaaaacattaatatcaaccaagttaaatcaaattatgatgtatttagaaaaacttttgaaaaacacaggttaaaagaatctaaacataatagtaatttatcaatgtcatctcaatctataaccatttcatctaaaaaaatattcaattttatccatactgtaaaagttggcgacgttgtattagtgcccacttatcagtcgcgatattttattgtaggtgttgttactgatagtgcaagacagtacagtaatctttcagacaaaaatttgatttcaaaattcgaaggcgaaaacattccgttatcaaaggacaaattttacagagaagtgtcttggataaataaagtcccgagatttaaaattgattctagtttattatatacgctaacaatgcatcaaaccttaataaaattagaagaaaatactagccatgtaaatagtttgttgacacctttatatataaaaacggattatttaaatctatcattgagagtcaacaaaccggaaaatatttcgtcagaagattgggaagaattttactcttatctgaacgctttgaaaacagcaaacgaagatattacagtaaaaagcaacgttcagagtcctgggaatatagacttaagtacattgttttcatcgataccaaatagcgcctttttagtaattttgtcatttttcctagtcgggggagatattgaatatggtcaattacattttaaaattaatggattattaccttatgcaaaagataaattatttaaatctaaaggaaaagataattcaaaaacagaatcggagtctaataacacttctaatcctgataatcaatttaaacaagattctgattgtataactttaaattttaacgagttaaatgaaaatcaaaaagaaaatcttaaagacatgattcatacattagatttgagtattgatgatgttcaaaaattagcacaaaacacaattgttaattctaatcaaaatgaacacgattaa

SEQ ID NO: 418286 - DNA, 216 bp, Staphylococcus aureus
atgaaaaaaatatttcaattatttataggttatgtcttattatcatctttgtgtttaatagtttattctaaaactttagtattattcaacattccaagtaatgtggttttaatagtattattatttataacattgataattattagaattagacccaaagatgacgcacattggtatcaattcaaaataattattaatcgtgttcattttgattag

SEQ ID NO: 418287 - DNA, 720 bp, Staphylococcus aureus; identical to SEQ ID NO: 411654

SEQ ID NO: 418288 - DNA, 936 bp, Staphylococcus aureus; identical to SEQ ID NO: 414103

SEQ ID NO: 418289 - DNA, 816 bp, Staphylococcus aureus; identical to SEQ ID NO: 410862

SEQ ID NO: 418290 - DNA, 750 bp, Staphylococcus aureus
atgattaaaattaaagatgttgaaaagtcatatcaaagcgcacatgtttttaagcgtcgtcgaacacctatcgtgaaaggtgtgtcatttgagtgtccaatcggtgcgacgattgcgattatcggagaaagtggtagcggtaaatcgacattgagtcgtatgatattaggtattgagaaaccggataaaggttgtgtaaccttaaatgatcaaccgatgcataagaagaaagtgagacgtcatcaaattggtgctgtatttcaagattatacgtcatcattacatccatttcagactgttagagaaatcttatttgaagtgatgtgtcaatgtgatggacaacctaaagatgttatggaagttcaagcaattacattgttggaagaagtcggtctatctaaggcatacatggataaatatcctaatatgttatcaggtggagaggcgcaacgtgttgcgattgcgcgtgcaatatgtattaaccctaaatatattttgtttgatgaagccattagttcactcgacatgtcaattcaaacacaaatattagatttattgattcatttacgtgaaacgcgtcagttgagttatatttttatcacacatgatattcaagctgccacgtatttatgtgatcaattaattatttttaaaaacggaaaaatagaagaacaaattccgacaagcgcattgcataaaagtgacaatgcttatacaagagaattaatagaaaaacaactatcattctaa

SEQ ID NO: 418291 - DNA, 1194 bp, Staphylococcus aureus; identical to SEQ ID NO: 412539

SEQ ID NO: 418292 - DNA, 624 bp, Staphylococcus aureus
atgtcaaatacaaataaacattacatagaagaagaatacgctactgaacaatcgcgttttttcaaacgtgatattggatttattttcctttatatatttttggttaacatcttgccaatcattatcgtctttttaacttttgggttagtagctgtattcactcaacaagccccatggggtttctcttttcctatttcaatgaacattagctatttactcgcagttattctttcattagctatttttcgtcggatgcatgaagatgcgtttattccaatgatacgttcgcaaatcattgccagcaccaaatataaatggcatattcttatatcatttacattaagtatcgtactctttttacttttaaattatttcgatattttcgcactaaatgtagatgcctttactgtctttgacatttacccgctcattagagattatggttccatcagtttaatagtaatgttgtggttaaccattatattaaatactttaatttgtcaacttattttccgtcatattttaattcaagaattaagcagaatcatgcctttaaagattacaatagtattgtccattatccttgaaactctgttctactatccatacattgatactagctag

SEQ ID NO: 418293 - DNA, 456 bp, Staphylococcus aureus; identical to SEQ ID NO: 414101

SEQ ID NO: 418294 - DNA, 267 bp, Staphylococcus aureus
atgagcaattacacggttaagattaaaaattcagcgaaatcagatttaaagaaaataaaacatccttatttaaagaagacatttatagaaattgttgagactttaaaaaatgatccttataaaataacacaatcctttgaaaaattagaacctaaatatttagagcgatattcaagaagaattaaccttcagcacagggtcgtctataccatagatgatcgaaataaagtagtattaatactatcggcatggtcacattatgattaa

SEQ ID NO: 418295 - DNA, 663 bp, Staphylococcus aureus
atgttgttagaaattaaagatttagtgtataaagcgagcgatagaatcatactaaatcatatcagtctaaaagtagataaaggcgagagtattgccattataggtccatcaggtagtggtaaaagtacatttcaaaagcaaatatgtaatttgattagtccaactagtggagaactttattttaaaggtaaaccctataatgattatgacccggaagaattgcgtcaacgaatcagttatttgatgcagcaaagtgacttgtttggtgaaacgattgaagataacatgatattcccatcacttgcacgtaatgataaatttgatagaaaacgtgcaaagcaattaattaaagatgtcggtttgggacattatcaattaagttcggaagtggaaaatatgtcgggtggtgagcggcaaagaattgctatagcgcgccaactgatgtatacaccggatattcttttattagatgaatcgaccagtgcattagacgttcataataaagaaaagatagaaaatatcatttttaagttagtggaacaggatgttgctatcatgtggattacccatagtgatgatcaaagtatgagacattttcaaaagcgcataacgattgttgatggcaaaatttctaaggttgaggagttgaatcaacatgagtaa

SEQ ID NO: 418296 - DNA, 777 bp, Staphylococcus aureus; identical to SEQ ID NO: 411650

SEQ ID NO: 418297 - DNA, 1188 bp, Staphylococcus aureus
atgtcaatcatgcgactatttacattcattttaagtatttttatcgtaggaatggttgaaatgatggttgcaggaattatgaacttgatgagtcaggacttacatgtatcagaagctgtcgttggtcaattagtgacaatgtacgctttaacatttgcgatatgtggacctattctggttaaattaacgaaccgtttttcatcaaggcctgtattattatggacattacttatatttatcattggtaatggcattattgctgtagcgccaaatttttcaatattagtagttggtagaattatctcatctgcagcagcagcactaattatcgtaaaagtattagctattacagcgatgttatcagcacctaaaaatcgtggcaaaatgattggacttgtctatacagggtttagtggggccaatgtttttggtgtaccaattggaacggttatcggcgatttagtaggttggcgctatacatttctattcttaattattgtgagtattattgttggcttcttgatgatgatctatttaccgaaggatcaggaaatacaacgaggccctgtgaatcatgagacaccatctcatgaaaatcatgttacttcgaaaatattaagacctgctgaagtagcaaaatatttaattattacgtttttagtattgattgcaaactcagtgacattcgtctttataaatccacttattttatctaatggtcatgatatgtcattcgtttcattagcacttctagtaaatggaatcgctggcgttattggaacatcattaggtggtatattctccgataaaattacaagtaagcgttggttaatgatttctgtttctatttttatcgtcatgatgttacttatgaatttaatcttacctggttcaggtctattgttagcaggactatttatttggaatatcatgcaatggagtactaatccagcagtgcaaagcggtgtgattcaacatgttgaaggcgacacaagtcaagtaatgagttggaacatgtctagtttaaacgctggtattggtgttggaggcattattggaggcttggtcatgacacatgtttctgttcaagctatcacgtatacgagtgccatcattggtgcattaggattaatcgttgttttcacattgaaaaataatcattatgctaaaacatttaaatcatcataa

SEQ ID NO: 418298 - DNA, 1353 bp, Staphylococcus aureus
atgaaaattaatactacaggtggtcaaattcatggtattacacaagatggtttagatatcttcttaggcattccttatgcagaaccaccagttcatgacaatcgctttaaacattctacgttaaaaacacaatggtcagagccaattgatgcaaccgaaatacaacccatcccaccgcaaccagacaacaaattagaagattttttctcctcacaatctacaacttttactgaacatgaagactgtttatatctaaatatttggaaacaacataatgatcagacgaagaaacctgtcatcatttatttttatggtggtagttttgaaaatggtcatggtacagccgaactctatcaaccggcacatttagtacaaaataacgacattatcgttattacatgcaattatcgtttaggcgcattagggtatttagactggtcatattttaataaagattttcattccaataatggactttcagatcaaatcaatgtcataaaatgggtgcatcaatttattgaatccttcggtggcgacgctaataacattactttaatgggtcagtcttcaggcagtatgagcattttgactttacttaaaataactgacattgagccatacttccataaagtcgttttgctaagtggcgcactacgattagacacccttgagagtgcacgcaataaagcacaacatttccaaaaaatgatgcgcgattatttagatacagatgatgttacgtcattatcgacagatgatattcttatgctaatggcgaagctaaaacaatctcgaggaccttctaaagggcttgatttaatatatgcgcctattaaaacagattatatacaaaataattacccaacaacgaaaccaatttttgcgtgttatacaaaagatgaaggcgatatttatattactagtgaacagaaaaaattatcgccgcaacgctttatcgacattatggaattaaatgatattcctttaaaatacgaagatgttcagactgcgaagcaacaatctttagcgattacacattgttatttcaaacagccgatgaagcaatttttacaacaacttaatatacaagattcaaacgcacaactatggcttgctgaatttgcatggcatgatacttctagcgcacactatcgcagtgcttaccatattctagatatggtattttggttcggaaacttacaaatattagcagcacatcaatatccaacaactgctcaccttaaatttttaagtcgacaaatgcaaaatgatttagctaattttgctaaaagcggtaaaatgccttggccgatgtatcataatgaacgtcgctattatcgcacatatcaataa

SEQ ID NO: 418299 - DNA, 1638 bp, Staphylococcus aureus
atgaataaagacaagcaattgcacaacgacaaaatcaatctatcccaattagtcttattagggttaggctctttaataggatctggttggctatttggtgcgtgggaagcatcatcaatagctggaccagcagcaatcatatcatgggttcttggattcctagtcattggaaccattgcctataactacattgaaatcggcacaatgtttcctcaatcaggtggcatgagtaactatgcccagtatacacatggctcattattaggctttattgctgcttgggcgaattgggtgtctttggtgacaataatacctatcgaagctgtgtcagctgttcaatatatgagttcttggccgtggcattgggcgaaaccaatgagatatttaatggaaaatggctctattagcacatacggattgctagctgtatatctcatcattgttattttttcattattaaactattggtccgtaaaacttttaacatcatttacgagtttaatttctgtatttaaattaggcgtacccatgttaaccatcatcatgttgatgctatcaggattcgacacttcaaattacggccattcggcaagcacatttatgccttacggaagtgcaccgatttttgctgcaacaacagcatcagggattattttttcattcaattcattccagacaattattaatatgggttcagaaattaaaaatcctgaaaaaaatatcgcaagaggcatcgctatctcactgtcaatcagtgcagtgttgtacatcattttacaaagtacgtttatcacttctatgcctcaatcaatgttacaacatagtggatggaatggcatcaacttcaattcaccatttgcagatttagctatcttattaggaattaattggctcgcaattttactatatattgaagcttttgtatcaccattcggtactggcgtgtcatttgtcgccgttacaggtcgagttttacgagcaatggagaaaaatggacatatccctaaatttcttgggaagatgaatgaaaaatatcatatcccccgtgtagcaatcatctttaatgccatcattagtatgattatggttacattatttagagattggggtacgctagcagcagttatttctactgcaactttagtagcctatttaactggcccaacgacagtgattgcattaagaaaaatgggaccaacaatgactcgtccatttagagcaaaaattttaaaagtaatggcaccattatcatttgtattagcttcattagctatatattgggcaatgtggccaacaacggctgaagttattttaatcattatacttggattaccaatctacttcttctatgaatatcgtatgaattggcgtaatacaaagaaacaaattggtggtagcttatggattattgtatatttaatcgtgctatcaatactgtcatttataggaagcaaagaatttaaaggcttaaatatgattcactatccatttgactttatcgttattattattgtggcgcttatattctattacatcggtacaacgagttcatttgaaagcgtctatttccgtcgcgcaacacgaatcaatacgaagatgcgtgagtcactaaataatgaatcaaagtcatctcattaa

SEQ ID NO: 418300 - DNA, 600 bp, Staphylococcus aureus
atgagtgagaaacaatcaaatgaacaagttgaagcatttttaaataaagagagtcaatggcaagaagaatataaatatttgagagcgttaatctttaatgaaacagaattagaggaagcgtataaatggatgcatccttgttacacgttgaataataaaaatgtagtacttatccatggcttcaaaaattatgttgcactattatttcataaaggtgccattttggaggataaatatcatacactcattcaacagactgaaaaggtgcaagcagctcgtcagttacgatttgaaaatttaacagagattcaagcacgtaccgaagaaattaaatattatctagctgaagcaattaaagctgaaaaagctggtaaaaaagttgaaatgaagaaaacagaggaatatgttattcctaaagagttagaagctaagttcgaagaaatgccacagttagagtcttcattttataaattaacgccaggcagacaacatcaatatatatatcatattggacaagctaaacgcagtgaaacaagacaaaagcgtgttgaaaagtatattaaccaaatactagaaggtaaagggatgcatgataagtaa

SEQ ID NO: 418301 - DNA, 1227 bp, Staphylococcus aureus
atgttaagtattaagcatttaacgaaaatttattctggtaataaaaaggcagtagatgacatctctttagatattcaatctggggaatttatcgcatttattggaaccagtggaagtggcaaaacgactgctttaagaatgataaaccgtatgattgaagcgacagaaggacaaattgaaattgatggtaaagatgttcggagtatgaatcctgtcgaattgcgtagaaatattggctatgttattcaacaaattgggttaatgcctcatatgacgattaaagagaatattgtattggtacccaaattgttgaaatggactaaagaagaaaaggataaacgtgcaaaggaattaattaaacttgtggatttaccggagtcatttttagagcgttatccagcagaactatcaggtgggcaacaacaacgtatcggtgttgtaagagcacttgcggccgaacaagatattattttaatggatgaaccttttggtgcattggatcctattacgagagatacgttacaagatttagttaaaacgttacaacgaaaattaggcaagacgtttatctttgtaacacatgatatggatgaagcgattaaattagcagacaaaatttgtattatgtcagaaggtaaggtggtgcaatttgatacaccagacaatattttaagacatcccgcaaatgattttgtacgtgattttataggacaaaatagactgattcaagaccgtcccaatgacaagactgtagaaggtgtaatgattaaaccaatcacgatacaggcagatgcaacgcttaatgatgctgttcatattatgagacaaaagcgtgtagatacgatttttgtcgttgatagtgacaaccatttacttggattcttagatattgaagatataaatcagggtatacgtggacacaaaagtttacgagataccatgcaacaacatatttacaccgttcaaattgattctaaattacaagattctgtacgtacgattttaaaaagaaacgttaggaatgtacctgtcgtagatgataagcaacgtttagtaggactgattacgcgtgccaatgttgttgacattgtatatgacacgatttggggcgatagtgaggatgcagtgcaaacagaacatgtgggggaagacactgcgtcctcaaaaatgcatgagcaacacactactaatgtcaaagtacgtgacataggaggtgataaatcatga

SEQ ID NO: 418302 - DNA, 942 bp, Staphylococcus aureus
atgaagaaaattaaatatatacttgtcgtgtttgtcttatcgcttaccgtattatctggatgtagtttgcccggactaggtagtaagagcacgaaaaatgatgtcaaaattacagcattatcaacaagcgaatcgcaaattatttcacatatgttacggttgttaatagagcatgatacacatggtaagataaagccaacattagtaaataatttagggtcaagtacgattcaacataatgccttaattaatggggatgctaatatatcaggtgttagatataatggcacagatttaacgggagctttgaaggaagcaccaattaaagatcctaagaaagcaatgatagccacacaacaaggatttaaaaagaaatttgatcaaacgttttttgattcgtatggttttgcgaatacgtatgcattcatggtaacgaaggaaactgctaaaaaatatcatttagagacagtttcagatttagcaaagcatagtaaagatttacgtttaggcatggatagttcatggatgaatcgtaaaggcgatggctatgaaggatttaaaaaagagtatggtttcgactttggtacagtgaggccaatgcaaataggtctagtctacgacgcattaaactcagagaagttagacgttgcattaggttattctacagatggtcgaattgccgcgtatgatttgaaagtacttaaagatgataaacaatttttcccaccttatgctgcgagtgctgttgcaacaaatgaattattacgccaacacccagaacttaaaacgacgattaataagttgacaggaaagatttcaacttcagagatgcagcgcttgaattatgaagcggatggtaaaggtaaagaacctgctgtcgtcgcagaagaatttttgaaaaaacaccactattttgataaacagaaaggtggtcataagtaa

SEQ ID NO: 418303 - DNA, 1401 bp, Staphylococcus aureus
atggacacatcaaaacaatttagaggtgacaaccgattgcttttgggtatcgttttaggggttattaccttttggctattcgcgcagtcacttgttaatcttgttgtcccattacaatcaacatatagtagtgacgttggaacgataaatatcgctgttagcttatctgccttatttgctggtttgtttatcgtaggtgctggtgatgttgctgataaatttggtcgcgtcaaaattacttatgtaggattgatattaaatgttgtaggttcattactcatcatcattacacctttgccagcatttttaattataggtagaataattcaaggtttgtctgcagcatgtattatgccatcaacacttgctattattaacgaatattatattggtacaagaagacaacgtgccttaagctattggtctattggttcttggggtggtagtggtatttgtacgttgtttggtggcttaatggctacatatataggttggcgttcaatatttgttgtttcaattctattaacattattagcaatgtacttaatcaaacatgcacctgagactaaagcagaaccaatcaaaggtatgaaagcagaagctaaaaagtttgacgttattggtttagtcattttagtagtgacgatgttaagtttaaatgtaatcatcacacagacgtctcattttggtttagtttcaccgttaattctaggtttaattgttgtgtttatctgttcattagttggttttgtatattacgaaaataaaataaagcatccacttgttgatttttcaatttttaaaaatagaggatacagtggtgcaactatttcaaacttcttattaaatggtgtagcaggtggtgcacttatcgtcattaacacgtattatcaacaacaattaggatttaattcttcgcaaacgggttatatttcattaacgtatttaatagcagtgttgtcaatgattcgtgtaggtgaaaagattttatctcaacatggtccgaagcgcccactattactaggaagtggctttacagtgattgggttaatcttattgtcgttaacatttttaccagaaatgtggtatatcgtatctagtatagttggatatttattgtttggtactggtttaggattatatgctacaccatcaactgatacagcagttgctagtgcgccagatgataagtcgggtgttgcttcaggtgtgtataaaatggcgtcatcattaggaaatgcatttggagtagcagtatctggtacggtttatactgtgttagcagctaatttaaatttgaacttaggtggtttcacaggtatgatgtttaatgccttgctagcaattgttgcatttttagtcattttactattagttcctaaaaatcaaacgaatttgtaa

SEQ ID NO: 418304 - DNA, 936 bp, Staphylococcus aureus; identical to SEQ ID NO: 404957

SEQ ID NO: 418305 - DNA, 852 bp, Staphylococcus aureus
atgagtaaaatttttgtaactggtgcaacgggccttattggcattaaattagttcaaagactaaaagaagaggggcatgaggttgctggttttactacatctgagaatggtcaacaaaagctagctgctgttaatgtaaaagcatatattggtgatatattaaaagctgatactattgatcaagcgttagcagattttaaaccagaaatcattatcaatcaaattacggatttaaaaaatgttgatatggcagcaaatacgaaagtacgtattgaaggttctaaaaacctaattgatgcggcgaaaaagcatgacgttaagaaagtaattgcccaaagtattgcctttatgtatgaacctggcgaaggattagcaaatgaaaaaacggcacttgattttaactcaactggcgatagaaaagtaacggttgatggtgtggttggtttagaagaagaaacggctcgtatggatgaatacgttgttttacgttttggctggttatatggcccaggtacttggtacggaaaagatggcatgatttataatcaatttatggatggtcaagtgacactttcagatggcgtaacatcatttgtgcatcttgatgatgcagttgaaacatctattcaagctattcattttgaaaatggtatctataatgtagcagatgatgcacctgttaaaggttctgaatttgcagaatggtataaagaacaacttggtgttgaaccaaatattgatattcaacctgcgcaaccatttgaacgtggcgtaagcaatgagaagtttaaagcgcaaggtggtactctgatttataaaacttggaaagacagcatgaatccaattaaataa

SEQ ID NO: 418306 - DNA, 1410 bp, Staphylococcus aureus
atggcaagaaaattgcatagagagttgaataacagacacatccaattgatagcaattgggggcgcaattggaactgggttattcctaggatcaggtcaaacaatatctttaactggtccatcactgttattcacatacatgattattggggttgtactattcgcttttatgcgcgcattaggcgaattgttgttgagcaatacaagatttaattcatttgttgatattgcaaatgaatatttaggcccttttggtggctttgtcattggctggacttactggttatgttggattgtatcaagtatgtcagacctaactgcgatgggacaatactttgcattttggtatccacaagtcccaaattggattaccgtgctatttattgttttaatcttgattagcttcaacttattaggtgccagattatttggtgaactggagttttggttctctattattaaagttgtcacaattattgcgatggttatcgttggtcttgtattaatctttttctcatttaaaacacattatggacatgcatcattcacaaacttaatcagtcacggtggcatgttccctggaggaacatttggtttcttaatgtcattccaaattgctgtatattcattcattggtattgaacttataggtgtaactgctggtgaaacgaaagatcctgaaaaaaccttaccgaaagcaattaataatgtacctatccgtattttattattctatatcggtggtctattagtaattatgtcagtcataccttggaatgatatcgatccaaatagtagccctttcgttaaactctttacattaatcggcgtgccatttgcagcaggcatcgttaactttgtcgtgctaactgccgcggcctctgctacaaatagtggtatctattcgaatagtcgtatcttattcggactgtcacaacaagggttaggtcctaaagttttaaataaaacgaatagtcatggcgtgccttatttatcaatgttagtttcatcaattgcattacttatagcagccttgttaaactacattttccctaatgcaattcaactattcatatacgttacaacgttatcaactgtgttgtttttagttgtttgggcaatgattattgtcgcttatctaatgtatttgaaaaagcatcctgaggcacataaaaacagtaaatttaagctgattggtggtaagcctattgcttacattattctagcgttcttcttctttgtattcattttattattctttagtgacgaaacaagagcagctatttatatttcgccgttctggtttatatttttatttttcttttataaaaaatacaaaacgaatgctgaaaaactcgcatatgaacaacgacaaaatgacagcggtcatttcagatatgacaatcaataa

SEQ ID NO: 418307 - DNA, 348 bp, Staphylococcus aureus
atgcgattgaaaaaatggaacatcattagaccaccatttaatgtgacacgtatatctgaatacgcagcagttgcagcacttgaagatcaacaatatttaaaagaggtaacacataaaaatagtgttgaacgcgaaagattttatcaattacctcaaagtgagcatttcttaccaagtcaaacgaattttatatttgtaaaaacaaagcgggtaaatgaactttatgaagcacttttaaatgtagggtgtattacgcgaccatttccaactggtgttagaattacaattggttttaaagaacaaaatgataaaatgttagaagttttatcaaactttaaatacgaatag

SEQ ID NO: 418308 - DNA, 267 bp, Staphylococcus aureus; identical to SEQ ID NO: 417358

SEQ ID NO: 418309 - DNA, 336 bp, Staphylococcus aureus
atgactatgtcaataccaattaatttacctacaaacagtactatgattaatgaattatgtacattacaaagtagaaccatcaatataaaaggagaggttttaataactgaaatatatgatgattacttttttaaaaatgatgagtggcacattacagcttttaacaaattcaagcaatttcaagatagtatcaagaactatagagacaaaagaaaaaatgttttctttaggattaaaagtaaaaatttgaatttagaatttaaatacctttttttgaaactgatagttaaagaacttagcaatcttattaagctttactgctccagtattaaataa

SEQ ID NO: 418310 - DNA, 414 bp, Staphylococcus aureus; identical to SEQ ID NO: 410173

SEQ ID NO: 418311 - DNA, 477 bp, Staphylococcus aureus
gtgcaagctacaggccttcacctcgaacaattaacaaacggggtttggttcatggcagcgattgtctgctatctaattattccaaaaccaggtattgctttactggctgaatttgctgcaggtgccggcgaaactatcattatgggtcgtttcgatattccgacaatcgtttacgctttcatacaaggtttagcgtgtgaacttgtctttgcaatttttaaatatcaatctcgttcagttatggtagctatgttagcaggtttttgtacagcaatcgcggctttccctatagattatttctatggttatttaaatgaagttgcaggttggaacttaacattattcatcgtatttagattaattagtggtgcagtagtcgccggcgtcctatcttaccttttagtaaaagctttagataagacaggcgtaacaaaattatttagaccagctgctaaagaagattacgacaacttataa

SEQ ID NO: 418312 - DNA, 525 bp, Staphylococcus aureus
atgagtaatactaaaattaaatatcaaatttttatttcatcaacttatttagatttaatagaagagcgtcaagcagtagtagaagcagttttaaacagtaataatattccagcaggtatggaactttttaactcaagtagtaaaagccaatgggaaataataacacaatggatcaatgaatcagatgcagtgatattattgttaggttctagttatggaacaattgatagtgaagaaaatattagctatacagaaatggagtacaattttgctaaatctttaggtaaacctatatatgtttttgagatgaataaagcatctaccgaatccgcggaaaagtctaaaaaattagatgagtttaagacaaaagttaaagaaaatagactaattagtccaaatattaatgatatttcggaattaaaaagtaaagtatctcagactttaatgcaaagtgtacctagtgaaattaaagaaaatagtggatggataagagtacaggattgtggtaaaaatgtaaaaaattaa

SEQ ID NO: 418313 - DNA, 444 bp, Staphylococcus aureus
ttggatgctatacaaagagatttagatacatatgattttttgaaagaagaactttataaaatattcatgtatgtaaaaactttttatttccagcacacaccatttgatgatagttatattgaagatatagaaaactacctgctaaattatgaaaataatccacataaatcattcatgaaaataaaagtttatgattataaaaactttttaaaacatttaaaaaacatattgattttaattaaacaaggaaaaaagccattagctcaagccggtcattttaaattaagcttttacgaagaggatttaaaattgttacaaaaaaattataagactacgctagtcgatattaaaggattgaataaacatttttataaggaatgtgataggtgcttaaaagcatataatatttttattgagggtataaataaacatttatatgaatga

SEQ ID NO: 418314 - DNA, 669 bp, Staphylococcus aureus; identical to SEQ ID NO: 410409

SEQ ID NO: 418315 - DNA, 594 bp, Staphylococcus aureus; identical to SEQ ID NO: 411693

SEQ ID NO: 418316 - DNA, 381 bp, Staphylococcus aureus
atggtcaataagcaagttgaaatatctatggctgaatgggatgttatgaatataatatgggataaaaaatcagtatcagctaatgaaattgtagttgaaattcaaaaatataaagaagttagtgataaaacgattagaacattaatcacaagactatataaaaaagagattataaaacgatacaaatcagaaaatatttatttttactcatcaaatattaaagaagacgatattaaaatgaaaactgctaaaacctttcttaataaactgtatggaggggatatgaaaagtttagtgttgaattttgcgaaaaatgaagaattaaataacaaagaaattgaagaattgcgagatattttaaatgatattagtaaaaagtaa

SEQ ID NO: 418317 - DNA, 1758 bp, Staphylococcus aureus
atggctaaattactaataatgagtgtagtaagcttttgttttatatttctattgttagtattttttaggtacatattaaaacgctattttaattatagtttaaattataaagtttggtatctaactgtgcttgctggattaattccttttatcccaattaaattctcttttataaaatttaataatgtgaataatcaagcgcccacagttgaaagtaagtcacacgacttgaaccataacataattaccaccaaacctgttcaagagttcgcaacagatatccataagtttaattgggattcaattgataatatctgcacagttatttggatagttttagttattattttaagttttaaatttttgaaagccttattatatcttaaatatttaaagaaacagtcactttatctaaacgaaaatgaaaaaaataaaatagatacgatacttttcaaccatcaatataaaaaaaatattgtgattcgaaaagcagaggctattcaatctccaataactttttggtatgggaaatatattattttgattcctagttcatattttaaaagtgtaattgataaaagactaaaatatataatactgcatgaatatgctcatgctaaaaatagagatactttacatttaattatctttaatatcttctctattattatgagttacaatccattagtacatattgtaaaaagaaagataattcatgacaatgaagtagaagccgatagatttgtccttaataatattaacaaaaatgaatttaaaacttatgcggaatctattatggactccgtattaaaaacctcatttttcaacaaaaatatattaagccattcatttaatggtaaaaaatcattactcaaaaatagattaattaatataaaagaagccgatctgaaaaagcagtcaaaattaattctaatttttatttgtatttttactttttttatcatgataattcaaagccagtttttaatggggcaatccttaactgattataattataaaaagcccttacaaagcgattaccaaattttagatgaaagtaaaaattttggttcaaatagtggatctttcgttatgtacagcatgaagaaagacaaatactatatttataatgaaaaagaaagtagaaaaagatattctcctgattcaacttacaaaatttatttagcactgtttggacttgaccgtcatattataagtgataaaaattcacgtatgtcatggaatcataaacattatcttttcgagtcttggaataaggaacaagatttaaatacagcaatgcaaaattcagttaattggtacttcgaacgtattagtaatcaaataccaaagaactatactgcggctcaactcaagcaattaaattatggtaatgaaaatttgggaagttataaaagctattggatggaagatagtttgaaaatatctaatcttgaacaagtaatagtttttaaaaatatgatggaacaaaataaccattttagtaaaaaagcaaagaatcaattatcttcttcattattgattaagaaaaatgaaaagtatgaactgtatgggaaaacaggtacaggtatagtaaacgggaagtataataatgggtggtttgtaggttacgtaattacaaatcatgataagtattattttgctacacatttatcagatggaaacccgtctgggaaaaatgctgaattaataagtgaaaaaatattaaaaggaatgggtgttttaaatggtcaataa

SEQ ID NO: 418318 - DNA, 609 bp, Staphylococcus aureus; identical to SEQ ID NO: 418243

SEQ ID NO: 418319 - DNA, 294 bp, Staphylococcus aureus; identical to SEQ ID NO: 408498

SEQ ID NO: 418320 - DNA, 141 bp, Staphylococcus aureus; identical to SEQ ID NO: 410536

SEQ ID NO: 418321 - DNA, 165 bp, Staphylococcus aureus; identical to SEQ ID NO: 408679

SEQ ID NO: 418322 - DNA, 270 bp, Staphylococcus aureus
atgtttgtatttccacacggtgcacaagataggcatacatcagcgtatgattatttggtcgataaagcaggctttaaatttattgcaggtgttggtccaaataattttacagacatatcagcaacgaacgtttaccaagatagggttgcgattgatggtctaaacttatttgaatttaaatataaactcaaaccgttttttaatcctgaaaatgtatatagtaaacaagatagacaattctttaaaggtaatcgggattatgaagaatag

SEQ ID NO: 418323 - DNA, 579 bp, Staphylococcus aureus
gtgcttacaaatgataaatatttaactgcgaaagcatttgataatcgctatggctgtgcattagctgttgaggtattaaaacgtttaaaagatgaaaatattggcattaacttatacagtggtgccacagtgcaagaagaagttgggttacgtggtgcgaaagtggcagcgaatacgattaaaccagatttggcgatagccgtcgatgtgggtattgcttatgataccccaggtatgtcaggtcaaacgagcgatagtaaactaggcggtggtccagttgttattatgatggatgcaacaagtattgcgcaccaaggtttgcgcaagcatattaaagatgtagctaagaaacataacatcgaagtacaatgggatacgacaccaggtggaggtacagatgcgggaagtattcatgtcgcaaatgaaggtattccaacgatgacaatcggtgttacgctgcgatacatgcattctaatgtttcagtgctcaatgtagatgattatgaaaattctgtccgtcttgttactgaaattgtccgttcattgaatgatgaaacttataaaaatatcatgtggtag

SEQ ID NO: 418324 - DNA, 522 bp, Staphylococcus aureus
atgaatcagtcagtcaaattacttaaacatttaacagatgtaaacggcattgctggttatgaaatgcaagttaaagaagcaatgcgtaactatatagagcctgtcagtgatcaaattattgaagataatttgggtggcatttttggaaagaaaaatgctgagaatggtcaatactcaattatgatttctggtcatatggatgaagttggttttatggtaacaaagattgataaacatggttttatttcatttacgccagttggtggatggtggaatcaagtcatgctatctcaaaaagtaacgattacaacagattcgggtaaagaaattagaggtatcatcggttctaaaccaccgcatgtcttaacgcctgaagaacgtaaaaagccaatggaaatcaaaaatatgtttatagatattggtgttagtagcaaggaagaagctgaagaagctggcgttgaagtaggcaatatggttcgccatatagtgaatttgaagtgcttacaaatgataaatatttaa

SEQ ID NO: 418325 - DNA, 141 bp, Staphylococcus aureus; identical to SEQ ID NO: 407391

SEQ ID NO: 418326 - DNA, 726 bp, Staphylococcus aureus
atgaaaaatagttatcaagctcaaaaagtgattgaagaagtaattaaggaaaagccaaaagcacgttggttgtttttaacactttcaacaaaaaatgcgatagatggagatactttagaacaaagtttgaatcatctaactaaagcatttgatagggtgaatagatataaaaaggttaaacaaaatcttgttggatttatgcgttcaacagaagttaccgttaataaaaatgacggtagttataatcagcatatgcacgttttgttatgtgttgaaaatgcatattttagaaaaaaagagaattatataactcaagaagaatgggttaatttatggcaaaaagcattacaagttgattatcgacctgttgtaaatattaaagcaattaaacctaatcaaaaaggcgataaagatattgaatcggcaatcaaagagacatcaaaatattcggttaagtcatctgattttttaactgacgatgacgaaaaaaatcaagaaattgtaagtgatttagaaaaaggtttatatcgaaaacgtatgttaagttatggtggattgcttaaacaaaagcataaaattttaaacttagacgatgccgaagatggtaatttaattaatacaagtgatgaagataaaataacagatgaagaagcaaaagcacattcgattacagcaatttggaatttcgaaaagcaaaattattatttaaaaaatttaaggagttaa

SEQ ID NO: 418327 - DNA, 189 bp, Staphylococcus aureus
atgttaagttatggtggattacttaaagaaaagcataaaattttaaacatagacgatgccgaagatggtaatttgattaatacaagtgatgaagataaaacgacagacgaagaagaaaaagcacattcgattacagcaatttggaatttcgaaaagcaaaattattatttaaaaaatttaaggagttaa

SEQ ID NO: 418328 - DNA, 189 bp, Staphylococcus aureus
atgttaagttatggtggattgcttaaacaaaagcataaaattttaaacttagacgatgccgaagatggtaatttgattaatacaagtgatgaagataaaacgacagacgaagaagaaaaagcacattcgattacagcaatttggaatttcgaaaagcaaaattattatttaaaaaatttaaggagttaa

SEQ ID NO: 418329 - DNA, 231 bp, Staphylococcus aureus
gtgcgtgaccaattagggttacgtgtgtctttaggtaatttgtcaaatgatggttatcgtatgacctttggtcaaactgataaagaatttcaaacgattcatgatagtgatatcggccgaggttatatatctatacttggacaatataatgaaccaattttatttgatgcaccttcaatggaacaatatgattttgtggaagatgtgaaacaaatattaaataaggagtga

SEQ ID NO: 418330 - DNA, 807 bp, Staphylococcus aureus
ttgaaacaagagagaagtgaaaagatgggatattttaaaagagttgtactttacataattgttatggttgtgagtgtttttataataggttgtgatagttcaagcgatactgcagaaaaatcaaaagaagattcaaaagaagaacaaatcaaaaagagttttgcgaaaacattggatatgtatccaattaagaatctcgaggacttatatgataaagaaggataccgtgatggcgaatttaaaaaggacgacaaaggaatgtggactatatatacagattttgctaaaagcaataaatcagacgaattggatgatgaaggtatggttttaaatctggatagaaatactcgaacggctaagggatattattttgttaagaaattttatgaaaaggataaattttcagatagaaaaaattataaagttgaaatgaaaaacaataaaattattttattagacaaggtaaacgatccagaccttaaagaaagaatagaaaattttaagttttttggacaatatgcaaattttaaggatttggaaaattacaacaatggcgacgtgtcaataaattggaatgttccaagttatgacgtggaatataaaatgagcaataaagatgaaaatgttaagcaattaagcagtcgttataacattcctactgataaagctccaatgttaaaaatgcatattgacggggacttaaaaggaagttctgttggatataaaaggttagaaatagacttttcaaaagaagatagggatatttcagtcattgattatttaagttataagccagcgaaaaaatag

SEQ ID NO: 418331 - DNA, 1326 bp, Staphylococcus aureus
atgaaaaataaggattatactataaatccaggtaatttaaaaagcaattccgaggcaacaagctccatatctagtgttagttatgaaatagaaaatgctaataatcatggattaaaaaaagataaaatacacgatcaaattgaagacttaaaagcaggaaaaaaattcccttctaatcttgagtatatagatagtcacacagataaaaaacacggtgtgacagcatcagctttcctaaacaaagataccgggaaagtgattattggcatgactggaacaaacttcaaaaaggaagctcttgcgaagcaacttttgctaccagggtttgcaacaacaaaacaagataaaattgactcagctgagactagaaaggatttaatttccggtgtccaaattggaacatttcctccgtctgataaaagcaaacattatgaagaaacacaagagttcatcaaaaaaataaaaaataagtatgatattgattttattactgggcattcattaggcggtagagaagcggtaatattaggtatgagtaatggtattcctaatatcgttgtttataatccagctcccatatcagctattggcttagaccctaattctcgattatttaaattatataaaggatataaaggtaacattactagagttgtatctaataaagatgagttaactaattttattcagggatatacgaaatatgtttattttggacatgagatagtgattgaaaatggtaaaggtcattcaatggatggattcttaactgaacaagaacaaaaagctataaaaaaagaacttaaaaaactacaaggttatgtagaagaaaataataagtcatttgtaaagcattctaataatgccatatctaaattagctagtatagaattacttagaacaaatatgatgactacaaatggaggttggttatcttcttcgcaacaaaaagctttagaaagtttatcagctttaacaattgcgcagtcattcagtcaactgatagatgatgaaattaatcaaattaaaaaaatgtataatgaaaaggaaaagaaatttgaaaaaaattgggaagacgcgcaaaaagctggaaacgctgtaggtaaagatataactgtgagtgaagtgctagaagctttagatgaaggtcatgtgaatgaaagtagtatggtaggagatcctgaacaaatgatatctgcaaaagaaagacaactttcaacgatagggtcttctgtatcaaattatattctaagagttagatctagtattaatgaaatcgttgataaagatcaagtgcttgcatcacaaataggtggattactatga

SEQ ID NO: 418332 - DNA, 231 bp, Staphylococcus aureus; identical to SEQ ID NO: 418133

SEQ ID NO: 418333 - DNA, 504 bp, Staphylococcus aureus
gtgactccgattcagatagcgattcggactcagatagcgactcagattccgatagtgactccgactccgacagcgattcagattcagatagcgattcggattcagacagcgattcggattcagacagcgattcagactcagacagtgactcagattcagatagcgattcggactcagacagtgagtcagattcagacagcgattcggattcagacagcgactccgattcagacagcgattcagactcagacagtgagtcagattcagatagcgattcggactcagacagtgagtcagattcagacagcgagtcagattcagacagcgattcggattcagacagcgattcagactcagacagtgactccgattcagatagcgattcggattcagacagcgattcagactcagacagtgattcggactcagatagcgactccgattcaagagttacaccaccaaataatgaacagaaagcaccatcaaatcctaaaggtgaagtaa

SEQ ID NO: 418334 - DNA, 315 bp, Staphylococcus aureus; identical to SEQ ID NO: 408085

SEQ ID NO: 418335 - DNA, 3030 bp, Staphylococcus aureus
atgaaaaagaaaaattggatttatgcattaattgtcactttaattattataattgccatagttagtatgatattttttgttcaaacaaaatatggagatcaatcagaaaaaggatcccaaagtgtaagtaataaaaataataaaatacatatcgcaattgttaacgaggatcaaccaacgacatataatggtaaaaaagttgagctgggtcaagcatttattaaaaggttagcaaatgagaaaaactataaatttgaaacagtaacaagaaacgttgctgagtctggtttgaaaaatggtggataccaagtcatgattgttatcccagaaaacttttcaaaattggcaatgcaattagacgctaaaacaccatcgaaaatatcgctacagtataaaacagctgtaggacaaaaagaagaagtagctaaaaacacagaaaaagttgtaagtaatgtacttaacgactttaacaaaaacttagtcgaaatttatttaacaagcatcattgataatttacataatgcacaaaaaaatgttggcgctattatgacgcgtgaacatggtgtgaatagtaaattctcgaattacttattaaatccaattaacgacttcccggaattatttacagatacgcttgtaaattcaatttctgcaaacaaagacattacaaaatggttccaaacatacaataaatcattattgagtgcgaattcagatacgttcagggtgaacacagattataatgtttcgactttaattgaaaaacaaaattcattatttgacgagcacaatacagcgatggataaaatgttacaagattataaatcgcaaaaagatagtgtggaacttgataactatatcaatgcattaaaacagatggacagccaaattgatcaacaatcaagtatgcaagatacaggtaaagaagaatataaacaaactgttaaagaaaacttagataaattaagagaaatcattcaatcacaagagtcaccattttcaaaaggtatgattgaagactaccgtaagcaattaacagaatcactgcaagatgagcttgcaaataacaaagacttacaagatgcgctaaatagcattaaaatgaacaatgctcaattcgctgaaaacttagaaaaacaacttcatgatgatattgtcaaagaacctgatacagatacaacatttatctataacatgtctaaacaagactttatagctgcaggtttaaatgagggtgaagctaataaatacgaagcaattgtcaaagaagcaaaacgttataaaaacgaatataatttgaaaaaaccgttagcagaacacattaatttaacagattacgataaccaagttgcgcaagacacaagtagtttgattaatgatggtgtcaaagtgcaacgtactgaaacgattaaaagtaatgatattaatcaattaactgttgcaacagatcctcattttaactttgaaggcgacattaaaattaatggtaaaaaatatgacattaaggatcaaagtgttcaactcgatacatctaacaaggaatataaagttgaagtcaatggcgttgctaaattgaaaaaggatgctgagaaagatttcttaaaagataaaacaatgcatttacaattgttatttggacaagcaaatcgtcaagatgaaccaaatgataagaaagcaacgagtgttgtggatgtaacattgaatcataaccttgatggtcgcttatcgaaagatgcattaagccagcaattgagtgcattatctaggtttgatgcacattataaaatgtacacagatacaaaaggcagagaagataaaccattcgataacaaacgtttaattgatatgatggttgaccaagttatcaatgacatggaaagtttcaaagacgataaagtagctgtgttacatcaaattgattcaatggaagaaaactcagacaaactgattgatgacattttaaataacaaaaagaatacaacaaaaaataaagaagatatttctaagctgattgatcagttagaaaacgttaaaaagacttttgctgaagaaccacaagaaccaaaaattgacaaaggcaaaaatgatgaattcaacacaatgtcttctaacttagataaagaaattagcagaatttctgaaaagagcacgcaattgctatctgatacacaagaatcaaaaacaattgcagattcagttagtggacaattaaatcaattagataataatgtgaataaactacatgcgacaggtcgagcattaggcgtaagagcgaatgatttgaaccgtcaaatggctaaaaacgataaagataatgagttattcgctaaagagtttaaaaaagtattacaaaattctaaagatggcgacagacaaaaccaagcattaaaagcatttatgagtaatccggttcaaaagaaaaacttagaaaatgttttagctaataatggtaatacagaggtgatttcaccgacattattcgtattattgatgtatttactatcaatgattacagcatatattttctatagttatgaacgtgccaaaggtcaaatgaatttcattaaagatgattatagtagtaaaaaccatctttggaataatgtcattacgtcaggtgttattggtacaactggtttggtagaaggattaattgtcggtttaattgcaatgaataagttccatgtattagctggctatagagcgaaattcatcttaatggtgattttaactatgatggtctttgtacttattaatacgtatttactaagacaggtaaaatctatcggtatgttcttaatgattgctgcattgggtctatactttgtagctatgaataatttgaaagcggctggacaaggtgtgactaataaaatttcaccattgtcttatatcgataacatgttcttcaattatttaaatgcagagcatcctataggcttggcactagtaatattaacagtacttgtgattattggttttgtactgaacatgtttataaaacactttaagaaagagagattaatctaa

SEQ ID NO: 418336 - DNA, 903 bp, Staphylococcus aureus; identical to SEQ ID NO: 415507

SEQ ID NO: 418337 - DNA, 993 bp, Staphylococcus aureus
atgtgcacaggattcacaatacaaactttaaataatcaagtacttcttggacgcacgatggattatgattatccattagatggttcgccagcagtgacgcctagaaattatcgttggacatctcgcactggcacgacaggccaaacgcaatatggctttattggtacaggaacagatatggaaggttttatttatggtgatggtgttaatgaacatggcgttgctatttcgacacaatatttccgaggttatagttcatatggctcaacacacaaagcggacgcgatgaatattacgcaaaatgaaattgtgacatggattttgggatatacaacaagcattgaagatatgaaacaacaagcatcccaaatacatgttgtagcggtatatttaaatgacatcggtgaagttccgccattgcattatcatgtttccgatgcaactggacattcagtcgaagtttcatttaaagagggggaagtggttataaaagataaccctattggtgtcttaacaaatcatccagacttagattggcattatagtaatttaagacaatatatcaatatttctccttatccagcaacagcaaagttattggaaggtgtaacgattgaacctttaggcaatgaagcaggtacatttggattgccaggtggatttacttcaactgagcgctttgtgagaatggcatttatgaaagcaaacattgctcaaaacaatgataaagaaatggatttaatgaatgcattttatttattagatgcggtaaatataccgattggaattgtacgtccgcatgatgctgacaatcactatacgatgtatcagaccgtaataaatttaactacaagaacgttatatattaagtattatggcagcaatgaaatagtagcattaaagctcacagatgatttaattaatagaaaagatatgacgatttttaagcctgagaagcatatcactattagaaagttgaatgacaatcaatag

SEQ ID NO: 418338 - DNA, 675 bp, Staphylococcus aureus
atgataaataaaaatgacatagtagcagatatagtaatagattatccgaaagcagcagatatttttagaagcgtaggtatagacttttgttgcggtggacaagtaagtatagaagcagcatccttagaaaagaaaaatgtagatttgaacgaattattacagcgtctcaatgacgttgaacaaacgaatacaccaggttcgcttaaccctaaatttttaaatgtttcgtcacttattcaatatattcaagcagcatatcatgaacctcttagagaagaatttaaaaatttaacaccttatgtgacgaaattatcgaaagtacatggacctaaccatccatatttagtcgagttaaaagaaacatatgatacatttaaaagtggcatgttagagcatatgcaaaaagaagatgatgttgattttccaaaactaattaaatatgaacaaggtgaagtagtaaacgatattaatacagtgattgatgatttagtatctgatcacattgcaacgggacaattgttagtgaaaatgagcgatttaacatctagctatgaaccaccgatagaggcatgtggtacgtggcgactcgtttatcagagattaaaagcacttgaagtgttaacacatgagcatgttcatttagagaatcatgttttatttaaaaaagtatcataa

SEQ ID NO: 418339 - DNA, 1689 bp, Staphylococcus aureus; identical to SEQ ID NO: 415667

SEQ ID NO: 418340 - DNA, 1026 bp, Staphylococcus aureus
atgattaatcaagtatatcaattagttgcacctagacaatttgaagttacgtataacaacgtagatatttacagtgactatgtcattgtacgtcctttatatatgtcaatttgtgctgccgatcaaagatattatactggtagccgtgatgagaatgtcttatctcagaaattgccaatgtctttaattcatgaaggtgttggtgaggtcgtatttgacagtaaaggtgtgtttaataaaggtacaaaagtagttatggtaccgaatacgccgacagaaaaagacgatgtcattgctgaaaactatttaaaatcgagctacttcagatcaagtggacatgatgggtttatgcaagattttgtgttgctaaatcatgatagagctgtaccactacctgatgatattgatttaagtattatttcatatacagagcttgtaacagtaagtttgcatgctattcgtcgttttgaaaagaaatctatttcaaataaaaatacatttggtatttggggtgatggtaacttaggttacattacagccattttattacgtaaattatatccagagtctaaaatatatgtctttggtaaaacagattataaattgagtcacttctcatttgttgatgatgtcttctttattaataaaatacctgaaggcttaacatttgatcatgcatttgagtgcgttggtgggcgtggtagccaatcagcaataaatcaaatgattgattatatttcaccagaaggaagcattgcactgttaggtgtaagtgagttcccagtagaagttaatacacgtctagtattggaaaaaggactaacgttgattggtagtagtcgaagtggttcaaaagatttccaagatgttgtagacttatacattcaatacccagatattgtagataaattagcgttgttaaaaggtcaagaatatgaaattgcaacaattaatgatcttacagaagcttttgaagcagacctgtctacatcttggggtaaaacagtattaaaatggattatgtaa

SEQ ID NO: 418341 - DNA, 1170 bp, Staphylococcus aureus
atgattaaaaatacaattaaaaaattgatagaacatagtatatatacgacttttaaattactatcaaaattgccaaacaagaatctaatttattttgaaagctttcatggtaaacaatacagcgacaaccccaaagcattatatgaatacttaactgaacatagcgatgcccaattaatatggggtgtgaaaaaaggatatgaacacatattccaacagtacaatgtaccatatgttacaaagttttcaatgaaatggtttttagcgatgccaagagcgaaagcgtggatgattaacacacgtacaccagattggttatataaatcaccgcgaacgacgtacttacaaacatggcatggcacgccattaaaaaagattggtttggatattagtaacgttaaaatgctaggaacaaatactcaaaattaccaagatggctttaaaaaagaaagccaacggtgggattatctagtgtcacctaatccatattcgacatcgatatttcaacatgcatttcatgttagtcgagataagattttggaaacaggttatccaagaaatgataaattatcacataaacgcaatgatactgaatatattaatggtattaagacaagattaaatattccattagataaaaaagtgattatgtacgcgccaacttggcgtgacgatgaagcgattcgagaaggttcatatcaatttaatgttaactttgatatagaagctttgcgtcaagcgctggatgatgattatgttattttattacgcatgcattatttagttgtgacacgtattgatgaacatgatgattttgtgaaagacgtttcagattatgaagacatttcggatttatacttaatcagcgatgcgttagttaccgactactcatctgtcatgttcgacttcggtgtattaaagcgtccgcaaattttctatgcatatgacttagataaatatggcgatgagcttagaggtttttacatggattataaaaaagagttgccaggtccaattgttgaaaatcaaacagcactcattgatgcattaaaacaaatcgatgagactgcaaatgagtatattgaagcacgaacggtattttatcaaaaattctgttcattagaagatggacaagcgtcacaacgaatttgccaaacgatttttaagtga

SEQ ID NO: 418342 - DNA, 147 bp, Staphylococcus aureus; identical to SEQ ID NO: 413354

SEQ ID NO: 418343 - DNA, 279 bp, Staphylococcus aureus; identical to SEQ ID NO: 415469

SEQ ID NO: 418344 - DNA, 345 bp, Staphylococcus aureus; identical to SEQ ID NO: 405115

SEQ ID NO: 418345 - DNA, 2250 bp, Staphylococcus aureus; identical to SEQ ID NO: 415533

SEQ ID NO: 418346 - DNA, 969 bp, Staphylococcus aureus
atgaaatcaaaaatttatatcttgctattatttctcatttttttatcatcatgcgctaatacgcgtcactctgaatcagataaaaatgtattaacagtttattctccgtatcaatcaaacttgattcgtccaattttaaatgaatttgaaaaacaagagcatgtcaaaattgaaatcaaacatggatctactcaagtactgctttcaaacttgcataacgaagatttttcggagcgtggtgacgtctttatgggtggtgtgttatcagaaacaattgatcatccagaagattttgttccctatcaagatacatctgtaacacagcaattagaggattatcgctcgaacaataaatatgttactagttttctattaatgccaacagttatagtagtgaattcagatttacaaggagatattaagattcgaggttatcaagatttattacaacctatacttaaaggtaaaattgcgtactcaaatccaaatacaacaacgacaggctatcaacatatgcgcgctatttatagcatgcatcatcgagtaagtgatgtgcatcaattccaaaaccatgcgatgcaactgtcaaagacgtctaaagtcattgaagatgttgcaaaaggtaaatattacgcaggtctaagctacgaacaagatgcacgcacatggaaaaacaaaggttatcctgtatcaatcgtttatccaattgaaggaacaatgttaaatgttgatggtattgctttagttaaaaatgcacaccctcatcctaagcgtaaaaagttagtgcaatatttaacaagccgctcagtacaacaacgattagttgcagagttcgatgccaagtcaattcgaaaggatgttagtgaacaaagcgatcagtctatcgaaaatcttaagaacatacctttaataccgaaatctaaattaccggacattccacatcataaatttttggagatgattcaatga

SEQ ID NO: 418347 - DNA, 1269 bp, Staphylococcus aureus; identical to SEQ ID NO: 415541

SEQ ID NO: 418348 - DNA, 1272 bp, Staphylococcus aureus; identical to SEQ ID NO: 413358

SEQ ID NO: 418349 - DNA, 1098 bp, Staphylococcus aureus; identical to SEQ ID NO: 413359

SEQ ID NO: 418350 - DNA, 579 bp, Staphylococcus aureus; identical to SEQ ID NO: 415542

SEQ ID NO: 418351 - DNA, 1164 bp, Staphylococcus aureus; identical to SEQ ID NO: 415617

SEQ ID NO: 418352 - DNA, 879 bp, Staphylococcus aureus; identical to SEQ ID NO: 415448

SEQ ID NO: 418353 - DNA, 1641 bp, Staphylococcus aureus; identical to SEQ ID NO: 415561

SEQ ID NO: 418354 - DNA, 765 bp, Staphylococcus aureus; identical to SEQ ID NO: 405075

SEQ ID NO: 418355 - DNA, 741 bp, Staphylococcus aureus; identical to SEQ ID NO: 413365

SEQ ID NO: 418356 - DNA, 1488 bp, Staphylococcus aureus; identical to SEQ ID NO: 415479

SEQ ID NO: 418357 - DNA, 327 bp, Staphylococcus aureus; identical to SEQ ID NO: 413366

SEQ ID NO: 418358 - DNA, 1110 bp, Staphylococcus aureus; identical to SEQ ID NO: 415483

SEQ ID NO: 418359 - DNA, 687 bp, Staphylococcus aureus; identical to SEQ ID NO: 405043

SEQ ID NO: 418360 - DNA, 1176 bp, Staphylococcus aureus
atgtttattggcaagaatttagaatacgtgagaaagcttaatgctctaagtagaaaagaattatcagaaaaaataaatgtgagtgaacaagcaatttggcaatatgaaacaaaaaatatgatgccagaaattagtaaaatttatgatatgacatctatttttaatgttaaatctagctactttattagcgagcagcccgaagagctcctaataaattctgtcgataaacatagtatagcttttagagcaaaaaattataaagtatctacgaaactattaaataagcaatattatcaagcaatgtatttatctaatttaactagctacttattttcttttgtaacgataccggataatattattttatctttaataaataatttagatgaattgttgaatggcaatttagaatcactaaataaaaaagaaagcataaaagaaattgctaaagttgtgagggctaaaattcttcaagatgaaagcaacgaagcactattatttatgcttgaaaaagcgggtatagttatatacgaaaagcgaattaatgatagcatagacgcatatagtttttggagtaaagatcagacaccttttattatactgggtacaaatagggggggagcagttagaaggaattttgatcttgcacatgagctgggacatctcgttctacatcgtcatattcaattcgacttattatctcctgaagaatataagacaattgaacatgaggcagatattttcgcctctgaatttttactacctgaagaagcgtttaaaaaagactttgatcaaatgaccaaaaaatcaaatcctgattatttagctgtattgaaagaaaaatggtatgtttctatacaagcaattgcaatgagagcttattatctaggcctaatgtctagtactcagtacagatatttttgggcatcattaaataaaaaaggctataaaagtaaagagcctttagacgacgtgattgaaatgtcacgtcctgtcaaaatgaatagtttattaaagttgtattttgatagaaatatactgacaccacaaaaattattgaattatttaaaagtcgatgaaacatttttgaatcatctagcaggtattaatttaaaactctttaaggattatgttaatgaaaatagagaatataatataacgaatctatataaataa

SEQ ID NO: 418361 - DNA, 1536 bp, Staphylococcus aureus; identical to SEQ ID NO: 415485

SEQ ID NO: 418362 - DNA, 261 bp, Staphylococcus aureus; identical to SEQ ID NO: 408717

SEQ ID NO: 418363 - DNA, 210 bp, Staphylococcus aureus
atgaaagctaaggaaattagagacttaaccacttcagaaatcgaagaacaaatcaaatcttcaaaaggagagctttttaacctacgctttcagttagctacaggtcaattagaagaaactgcacgtattcgtacagtaagaaaaacgattgcacgtctaaaaactgttgctcgtgaaagagaaattgaacaaagtaaggctaatcaataa

SEQ ID NO: 418364 - DNA, 126 bp, Staphylococcus aureus
atggtagataaaaacaaaaaacaagaaactactcgtagtaacccattaaacaaaagttttgaaaagtcaggcgccagccaaaaattaaaaagcactttatcagaaaaagctaagaaaaaagattag

SEQ ID NO: 418365 - DNA, 672 bp, Staphylococcus aureus
gtgtgcttacctgcatctgagtctgaatcactgtctgaatctgagtcgctatctgagtctgagtcgctatctgaatctgaatcactgtctgagtctgagtcgctgtccgaatctgagtcgctgtctgaatctgaatcgctatctgagtctgagtctgaatcgctatctgaatctgagtctgaatcgctatctgaatctgagtcgctgtctgaatctgaatcactgtctgaatctgaatcgctgtctgaatctgagtcgctatctgagtctgagtcgctatctgagtctgaatcgctgtctgagtctgagtcgctatctgagtctgaatcgctgtccgaatctgagtcgctatctgagtctgagtcgctgtctgaatctgagtcgctgtctgagtctgagtcgctgtctgaatctgaatcgctgtctgagtctgaatcgctatctgaatctgaatcgctatctgagtctgagtcgctatccgaatctgaatcgctgtctgagtccgaatcgctatctgaatctgagtcgctgtctgaatctgagtcgctatctgaatctgagtcgctgtctgagtctgagtcgctatctgattctgaatcgctatctgaatctgagtcgctatctgatgtatcttcttcgaagtatccgttatcaagtgtgaaatcatcatga

SEQ ID NO: 418366 - DNA, 618 bp, Staphylococcus aureus
ttgagcatttctaatcattattcctttaggtttttcgagtcgtcgattaccctctactataaaatgataaatatattctggataattaacttcttggctagaaattgtgtactttatagttgttacatctttccaaatcggaacttttttattatttttttcgttattatcactgtcgtcttcgggtttaggtgccggcgtagatttctccggatgatatggtggtctaacaaaatatttaactcctccacctggtccatcatgataagagtgtttgattttatacggcggacttcctgttgcattatttgtataccagttttgatccacaccataccaatagtcttttgtgcatggtcctactactatattcacgtgtcctgcccaaccaccagtccaaacaccccagtcgcctggttgtggtacaaaatcttttgtgtttctaattatcttgaaatctctacctctataattagatttttgagccatagcatcagcatttccccatgttctaaaaccccaatatttatcaagcaagtaattaggcaagtcccaacattgcgctcccattccagaaccaggtacatcaatagctattttgtttttagcgatatataa

SEQ ID NO: 418367 - DNA, 378 bp, Staphylococcus aureus
atgaaaataacagtaaacgataaaaacgaagttatcggatacgttaatactggcggtttacgcaatagtttagatgtagatgataacaatgtgcctatcaaattcaaagaagagtttgaacctagaaagtttgttttcactaacggcgaaattaaatataacagcaattttgaaaaagaagacgtaccgaatgcatcaaaccaacaaagtgaatcagatttgagtgatgaagaacttcgcggaatggttgcaagtatgcaaatgcaggtgacgcaagtaaacattttggcgatggaattaaagcaacaaaacgctatgttaacacaacagttgactgaactaaaagctggtaaaacaaatacagagggggacgtttaa

SEQ ID NO: 418368 - DNA, 330 bp, Staphylococcus aureus
gtgatttcttctttcgattcacctttactaataatttctccagttaatggattttttagtgttggcgtcgttattgtcttctcacctttttgtccttctcttgttactttttctgtccctggtgctaaatcaggattaaatttacgttctttcttgaatggaatttcttctttttctacaatcgagtctccttttacaggtccatattttgttacgctatcgaccggtggtctaactacgtctcctgtttctggattcttaattcctggtttacctggaacttcttctttctctcctgttggtaacttcggatcaaattcgtctcgatga

SEQ ID NO: 418369 - DNA, 735 bp, Staphylococcus aureus; identical to SEQ ID NO: 414361

SEQ ID NO: 418370 - DNA, 477 bp, Staphylococcus aureus; identical to SEQ ID NO: 407374

SEQ ID NO: 418371 - DNA, 297 bp, Staphylococcus aureus; identical to SEQ ID NO: 408223

SEQ ID NO: 418372 - DNA, 297 bp, Staphylococcus aureus
atggcagaagttgatatttctatattaagtatggttccaagagaatattttcatcctaaacctaaagtgaatagctcacttatcagattaaacagaaaaaaatcaagaatatcacacaaagataaacagaagtataattatttcgttatgaaatgggttaacaaagaatacaagaaaatatttacaaaaaatcaatttaacaattccttaaaacatgcaggaattgacgatttaaacaatattagctttgaacaattcttatctcttttcaatagctataaattatttaataagtaa

SEQ ID NO: 418373 - DNA, 1275 bp, Staphylococcus aureus
atgaaattaaaaccttttttacccattttaattagtggagcggtattcattgtatttctattattacctgctagttggtttacaggattagtaaatgaaaagactgtagaagataatagaactacattgacagatcaagtactaaaaggcacactcattcaagataagttatacgaatcaaacaagtattatcctatatacggctctagtgaattaggtaaagatgacccatttaatcctgcaattgcattaaataagcataacgccaacaaaaaagcattcttattaggtgctggtggttctacagacttaattaacgcagttgaacttgcatcacagtatgataaattaaaaggtaagaaattaacatttattatttcaccacaatggtttacaaaccatggtttaacgaatcaaaactttgatgctcgtatgtctcaaactcaaattaatcaaatgttccagcagaaaaacatgtctactgaattaaaacgtcgttatgcacaacgtttattacagtttccacatgtacacaataaagaatacttgaaatcttatgctaaaaaccctaaagaaactaaagatagttatatttctggttttaaagagaatcaattgattaaaatagaagcgattaaatcattgtttgcaatggataaatctccattagaacatgttaaacctgctacaaaaccagacgcttcttgggatgagatgaaacaaaaagcagttgaaattggtaaagctgatactacatcgaataaatttggtattagagatcaatactggaaattaattcaagaaagtaagcgtaaagttagacgtgactacgaattcaatgttaattctccagaattccaagatttagaattacttgtaaaaacaatgcgtgctgctggtgcagatgttcaatatgtaagtattccatcaaacggtgtatggtatgaccacataggtatcgataaagaacgtcgtcaagcagtgtataaaaaaatccattctactgttgtagataatggtggtaaaatttacgatatgactgataaagattatgaaaaatatgttatcagtgatgccgtacacatcggttggaaaggttgggtttatatggatgagcaaattgcgaaacatatgaaaggtgaaccacaacctgaagtagataaacctaaagatattgatttagttgtatggacagcaggaattcaacctgttgaagttgttcgtaacttgccgattgatataaatagtaatatgcgcttggatatgtggcaataa

SEQ ID NO: 418374 - DNA, 1617 bp, Staphylococcus aureus; identical to SEQ ID NO: 411080

SEQ ID NO: 418375 - DNA, 414 bp, Staphylococcus aureus
atgcaacgtgattatttaattcgagtagaaactgagagtatgtcagatttcaaaaggctcaatggtttaatgattggttttgttattaaaggtgaggcgcatatttatgatgaaaataatatgacgcaatgcaacagtggcgatattttcattattaaccaccgcgacttgtatcgatttcaacttcaacaagatggcatcatatgttatatccaattccaaatgaaatatttagcagacaagtttgatgatgtgcattgtctatattttcacttaacagatgcgaccacaaccaagaatatacatcaactgagaaatataatggcaagactggtttcaacacacattcgacataatgagttgtctaaattgactgagcaacaacttgtgattcagttgcttatgcgcatatga

SEQ ID NO: 418376 - DNA, 216 bp, Staphylococcus aureus
atgaaaaagaattttattgggaaatcaattttaagcatagctgctattagtttaacggtatcaacgtttgccggtgaatctcatgcacaaactaaggttgaaaaatataacgagtatcaaacaaactttaaaaaacaagtaaataaaaaaagttatggacgcacaaaaagctgtaaacttgttcaaacgtacaagaactgttgcaacacaccgtaa

SEQ ID NO: 418377 - DNA, 558 bp, Staphylococcus aureus
atggcttcagcatttttaatatttacaattataataatgtttattgctgggacaggtaaatctggattgggagaaaaaggaactgtagatgcatttgtcaatggcgcatcaagtttagtaggtgtatctttaattattggcttagctcgaggtattaatttagtgttgaatgaaggtatgatttcagatacaatcttacacttttcatcatctttagttcaacatatgagtggaccattatttatcatcgtattactatttattttcttctgtttaggttttatcgtgccatcatcttctggattagcggtattatcaatgcctatctttgcaccactagctgatacagtaggtataccaagattcgtcatcgttacgacatatcaatttggtcaatatgcgatgttattcttagcgccgactggacttgttatggccacactacaaatgttaaacatgcgatattcacattggttccgatttgtatggccggtagttgcttttgtattgattttcggtggcggagtactaattacgcaagtactaatttattcataa

SEQ ID NO: 418378 - DNA, 465 bp, Staphylococcus aureus
atgacgaaaccatttgacacctttgacggcatagaaaaagtaacttctggatatatgggcggacatattgaaaatcctacttacgaacaagtaaaatcaggtacgagtggtcatttagaaactgttgaaattcaatatgatgttgcattattctcatacaataagttattagaaatatttttctcagtcattgacccattagatacaggtggtcaatatcaagaccgtggtcctcaatatcaaacagctattttctacactaatgatcatcaaaaagaactcgctgagacttatatcgagcagcttaaaaatacgattaatgctgataaggcaattgcaacaaaaatattacccgcgtcacaattttacaaagccgaagactatcaccaagatttttataagaaaaatccagagcgctatgcagaagaacaaaaaatacgccaagaatacaaaaataagcaataa

SEQ ID NO: 418379 - DNA, 204 bp, Staphylococcus aureus; identical to SEQ ID NO: 418035

SEQ ID NO: 418380 - DNA, 282 bp, Staphylococcus aureus
gtgacatatcatgagcgtgttttagcattaagagcagaaagtaaaagaaccgcatttgattttcgattcgaagatttatttagcaaagaagaatggttaaatatgtcgcttgcagaaagacaaaaagctgaaaaagcatttcgacacgaagttaaaaatatggacgatgtaagaatgcccttctcaagtgtccatgacgcccaagtaaaattatataatgttgtatattcttataacggcattaaacgtaattttaaacaagttgaaaatgaaggattctaa

SEQ ID NO: 418381 - DNA, 258 bp, Staphylococcus aureus
atggaatttaaaaccattcaatctgtcaaagatccacattacaacgaagcacttaaactttacgatactaagttaaatttatctttaactgaagataaacgtatcatcaaacgctcattagaaaacaacaaaaccgaaaacgattatgtctttatcgtaggcttagaaaacgatgttgttgtcagtctagcaactgcaagccacaaccaattcagcatttttaatttatttattcgcaaaagacctacccaaccatga

SEQ ID NO: 418382 - DNA, 1731 bp, Staphylococcus aureus
  misc_feature (1675)..(1723): n is a, c, g, or t
atgaaagggagtagtccaatgagaaaaaagagtggtccaattaacaagcgtgtagattttctctctaaccgattgaacaaatattcgattagaaaattcactatcggtacagcttcgattttagtaggttctacgttaatttttggtattggtagcggtgaagctaaagctgacgaaaaagtttacaccaataatgaaaatggtactaaaagtaagcatgaaaagagcgaagtagaaagcgcaccggaagcgaaagctactgaaagtgtgcaagaaacgaacaaagtagaaagcgcaccggaagcgaaagctactgaaagtgtgcaagaaacgaacaaagtagaaagcgcaccggaagcgaaagctacagaaagtgtgcaagaaacgaacaaagtagaaagcgcaccagaagcgaaagctacagaaaatgtgcaagaaacgaacaaagtagaaagtgcacaacaacaagataaaggaaaatcagtagaggcaaatgaaaagtctttttatgatttaagtaaaaaaattgatcaagcagttaataaaaaagaagttgtggaaaagcaagttaaaaagcaattttcgagtgtattatctgaaaaaaaaataagagaaatattagatgataaaaatattacatttgacacaatgagtggagaagagattgtttccgaagtttacaaggaaatatttaaagaaatttcattaaatattgataaaaattctttgccaccagtaattactaatagattttttgctattgatagtttaagtgatgctgagtctataaataatcaacaagaaaacagctcaaaattagttacgctagaatcttataaaatatacgggccacatcaaactggtacattaaatgcatctgatcccaatacaaaagaaaatcaagctattaagttggttcctggtccaggtattgggaataaggaaaagaatagaacagctatatatgctccaaatactatagattttagaaaagactttaatatgaattttgatattgcgctatggccccaaggcatgtcttcaagacctgatggattaggattcatgttttcaaaatctacccctgaagaatatcttagtcaaggtggcattctaaatgatagtggtgtgtcaaatgcttttggattcaaaatagatacctataataatggtaatgtggacaatttagaaaaagatttttctaaagaaaaaggtgcttcgccgaaagcttatggaacgtttgtttataacgatgctaatggaacaactcatagttatactaagtacccgttagataatcaaaataggcaacaaaaaaacaatttatttaatggtttcactcaagcttttaatggctttagaggccaacaatataatactgtaaatattaattataatgctgatagcggtaagttgaccgtgaactatgctggactaacatggacagcactattatcagatattggagcagacaaaaatagtagatataatttcggaattatatcaagtaaagaaacagatagaaatgttccaggtagttatcatacagttaaagttaattctgcctcaataacttataccccaggttcaaatgatgcgcaagataatacaccaggatatgaagatggaagaacgaaaccaggtcaaaaagtagatattccgcaaacaggagatnnnnnnnnnnnnnnnnnnnnnnnnnnnnnnnnnnnnnnnnnnnnnnnnncgggataa

SEQ ID NO: 418383 - DNA, 561 bp, Staphylococcus aureus
atgaaagacgttacaatcattggtggcggtccgtctggtttgtatgcaagcttttatgctggattgcgagatatgtctgtaagattaatagatgttcaatctgaattagggggtaagatgagaatttaccctgaaaaaattatttgggatattggcggcattgccccaaaaccttgtcatgaaattttaaaagatacaattaagcaaggattatattttaaaccggaagttcatttgaatgaacgtgtggtagatattaggaaaaaggcagaacgtcatttcgaagttgaaacagaagcgggagaaatatatacatcgaaagcagttatcattgcaattggtgcgggtattattaatccaaaacaattagatgttaaaggtgtagagagatatcaattaactaatttacattatgttgtacaaagttacagacgttttaaagataaagatgtattaatatcaggtggaggaaatacagcattagattgggcgcatgatattgccaagattgctaaaagcgtgacagttgtttatcgaaaagaagatgtaagtgggtcatga

SEQ ID NO: 418384 - DNA, 486 bp, Staphylococcus aureus
gtgggtcatgaagcgatgaaaacactggtgacagatttaaatgtgaaactatgcccgaaaacacgtattaaatacttggtcggcaatgatgatgaaacgcatataagtgaagttgttttggaacatgttgaaagtggtgatacgcatacagttaaatttgacgatgtcattattagtcatggttttgatcgttgtaatacattattgagtgaaacatcttcaaagctagatatgcatgatgattgtcgtgttaaaggatttggtaatacgacaactagtatacctggtatctatgcgtgtggagatattgtttatcatgatgcaaaatcacatctaattgcaagtgcatttagtgatggtgcaaatgcagcgaaccttgctaaaacatatatccaaccagatgcgaatgcagagggttatgtttcaagtcatcatgaagtgtttaaagaagcgaataagactattgtaaataaacatttatactag

SEQ ID NO: 418385 - DNA, 186 bp, Staphylococcus aureus
atgaaaaatggccaacttaagccaggatacaatttacaaatagcgacaaattctcaatttgttttatcctatgacctatttcaaaatccaacagatactggaacattaattccattttcaacactcaaaattggaaatatgacgaacttaatgatgaatttatatgtcctaataacaaaagaatag

SEQ ID NO: 418386 - DNA, 264 bp, Staphylococcus aureus
atgtataaaaattataacatgacccaacttacactaccaatagaaacttctgttagaattcctcaaaatgatatttcgcgatatgttaatgaaatttttgaaacgatacctgatagcgaattcgatgaattcagacatcatcgtggcgcaacatcctatcatccaaaaatgatattaaaaatcatcttatatgcatatactcaatctgtattttctggtcgtagaatagagaaattacttcatgacagtattcgaatgatgtag

SEQ ID NO: 418387 - DNA, 123 bp, Staphylococcus aureus; identical to SEQ ID NO: 412320

SEQ ID NO: 418388 - DNA, 600 bp, Staphylococcus aureus; identical to SEQ ID NO: 417572

SEQ ID NO: 418389 - DNA, 243 bp, Staphylococcus aureus
atgagtaataaaagtaattcagaaataatcgcaggagtattagaaatgagtaaaagcgatatatatatttgggatgtattaagcgagtttgacagtgaacaagaggaagaaatactcgattttatagatgagaacattgaagaatttgaaatattcctcaataccgcactaattcatattgttgaaagattgaaattgagaatagcgtttgctacagctaaggaggacaacgataatgaataa

SEQ ID NO: 418390 - DNA, 1026 bp, Staphylococcus aureus
atgattaatcaagtatatcaattagttgcacctagacaatttgaagttacgtataacaacgtagatatttacagtgactatgtcattgtacgtcctttatatatgtcaatttgtgctgccgatcaaagatattatactggtagccgtgatgagaatgtcttatctcagaaattgccaatgtctttaattcatgaaggtgttggtgaggtcgtatttgacagtaaaggtgtgtttaataaaggtacaaaagtagttatggtaccgaatacgccgacagaaaaagacgatgtcattgctgaaaactatttaaaatcgagctacttcagatcaagtggacatgatgggtttatgcaagattttgtgttgctaaatcatgatagagctgtaccactacctgatgatattgatttaagtattatttcatatacagagcttgtaacagtaagtttgcatgctattcgtcgttttgaaaagaaatctatttcaaataaaaatacatttggtatttggggtgatggtaacttaggttacattacagccattttattacgtaaattatatccagagtctaaaatatatgtctttggtaaaacagattataaattgagtcacttctcatttgttgatgatgtcttctttattaataaaatacctgaaggcttaacatttgatcatgcatttgagtgtgtgggtgggcgtggtagtcaatcagccataaatcaaatgatcgattacatttcaccagaaggaagcattgcactgttaggtgtaagtgagttcccagtagaagttaatacacgtctagtattggaaaaaggactaacgttgattggtagtagtcgaagtggttcaaaagatttccaagatgttgtagacttatatattcaatacccagatattgtagataaattagcgttgttaaaaggtcaagaatttgaaattgcaacaattaatgatcttacagaagcttttgaagcagacctgtctacatcttggggtaaaacagtattaaaatggattatgtaa

SEQ ID NO: 418391 - DNA, 1755 bp, Staphylococcus aureus
gtgctatcgctaacaatgttattacttgagcgtgtaggtttaattattattttggcctatgtgttgatgaatattccatattttaaaaacttaatgaatcgtcgacgtacatggaaagcacgttggcaattatgtattattttcagtttgtttgccttaatgtctaatttaactggtatcgtcatcgatcatcaacatagtttgtcaggaagtgtgtacttccgtttagatgatgatgtatctttagctaacacacgtgtattaacgataggtgtcgcaggattagttggtggtccttttgtaggtctatttgttggcgttatttcaggtattttcagagtgtatatgggtggggcggatgcacaagtttatcttatctcatctatatttatcggtataattgctggttattttggcttacaagctcaaagacgcaagcgttacccgagtattgcgaaaagtgccatgattggaattgttatggaaatgattcaaatgttgagcattttaacattttcccacgacaaagcatatgcggttgacctcatatcattaattgcactaccaatgattattgttaatagcgttggtacggcgatttttatgtctattatcatttcaacattaaagcaagaagagcaaatgaaggctgttcaaacacatgacgtactgcaattgatgaaccagacattgccgtattttaaagaaggattgaatagagaatcggcacagcaaattgcgatgattattaaaaatttaatgaaagtatctgccgtagcaattacaagcaaaaatgaaatcttatcgcatgtaggtgcaggtagtgatcatcacataccaacaaatgaaatattaacaagtctgtctaaagatgtattgaaatcaggaaagttgaaagaagttcatactaaagaagagattggttgtagtcatccgaattgcccgcttagagcagctatcgtgataccacttgagatgcatggttctatcgtcggtacattgaagatgtattttacaaaccctaatgatttaacttttgtggaacgtcaacttgcagaaggattggcaaatatttttagtagccaaattgaacttggtgaagccgaaacgcaaagtaagttattgaaagatgctgagattaagtcattacaggcacaagtgagtccacattttttcttcaattcaattaacacgatttcagctttagttagaataaatagcgaaaaggcacgagagttactattagaattgagttattttttcagagcgaatttacaaggctcaaagcaacatacgattactttagataaagagttaagtcaagtgcgtgcatacttatcactcgaacaagcacgttatccaggaagatttaatatcaatattaatgttgaagacaaatatcgcgatgtgcttgtaccaccatttttaattcaaattttagttgaaaatgccatcaaacatgcgtttacgaatcgaaagcaaggtaacgatattgacgtgtcagtgattaaagaaactgcaacacatgtacgtattattgtacaagataatggtcagggtatttctaaagataaaatgcatttgttgggagaaacatctgtagaatcagaatctggaactggtagtgctttagaaaatttgaacttacgcctaaaaggattatttggaaaatccgcagcattacaatttgaatcgacatcgagcggtaccactttttggtgtgtacttccttatgaaagacaagaggaggaataa

SEQ ID NO: 418392 - DNA, 741 bp, Staphylococcus aureus; identical to SEQ ID NO: 415516

SEQ ID NO: 418393 - DNA, 216 bp, Staphylococcus aureus; identical to SEQ ID NO: 405670

SEQ ID NO: 418394 - DNA, 636 bp, Staphylococcus aureus
gtgctacgattagccattgcattttacatcttagcagcaatattaggtttgtttttagctgctaactcttcattttggttattaccagttggattagtatgtatggctgttggttacctatatacaggtggccctttccctatttcatggacgcctttcggtgaattattctcaggcgtatttatgggtatgtttattatcgttattgcattctttattcaaactggcaatattcaaagttatgtaatttggttaagtgtacctatagtaatcactatcggtttaattaatatggctaacaatattcgcgaccgtgtcaaagataaagcaagtggtcgcaaaactttacccattctattaggtaaaaatgcttctttaacatttatggcaatcatgtactttatcgcttatgcctttattgtacttacgatcattattaaacctggtggctcattattttacttacttgcgttgttatcattcccaatgcctgttaaagttatcagacgtttcaagaagaatgatacaccgcctacaatgatgccagcaatggctgctgctggtaaaacaaatacatttttcggtttattatatgcattaggtatttatattagtgcattatttgcaggcatttaa

SEQ ID NO: 418395 - DNA, 1266 bp, Staphylococcus aureus; identical to SEQ ID NO: 414975

SEQ ID NO: 418396 - DNA, 588 bp, Staphylococcus aureus; identical to SEQ ID NO: 416202

SEQ ID NO: 418397 - DNA, 705 bp, Staphylococcus aureus; identical to SEQ ID NO: 414062

SEQ ID NO: 418398 - DNA, 696 bp, Staphylococcus aureus
atgaaattaaaaacgttagctaaagcaacattggcattaggcttattaactactggtgtgattacatcagaaggccaagcagtccacgcaaaagaaaagcaagagagagtacaacatttatatgatattaaagacttatatcgatactactcatcagaaagttttgaattcagtaatattagtggtaaggttgaaaactataacggttctaacgttgtacgctttaaccaagaaaaacaaaatcaccaattattcttattaggaaaagataaagataaatataaaaaaggccttgaaggccagaatgtctttgtggtaaaagaattaattgatccaaacggtagactatctactgttggtggtgtgactaagaaaaataacaaatcttctgaaactaatacacatttatttgttaataaagtgtatggcggaaatttagatgcatcaattgactcatttttaattaataaagaagaagtttcactgaaagaacttgatttcaaaattagaaagcaattagttgaaaaatatggtttatataaaggtacgactaaatacggtaagatcactatcaatttgaaagacgagaaaaaggaagtaattgatttaggtgataaactgcaattcgagcgcatgggtgatgtgttgaatagtaaggatattcaaaatatagcagtgactattaatcaaatttaa

SEQ ID NO: 418399 - DNA, 1029 bp, Staphylococcus aureus
atgaagaaaaatgcgatgtctttaactatcattgcaattatttctgcagttacagtaactgtattgtgtttcgcggcattatctaaatcaaatacagatcaaacccttacatctatggcaccaaatgaatttaacgtggtcgctactcaagatgctaaacaatttgaaactaaactaagccaacaacaaattacattttctaaaaatgcttacgaaactattactgtagataatgttaaagatcaggttattactttggaaaatggtagtgattcaggtcgcacgaattcaatattaagtgcaaataacaaggtaacaggcaacaatgccatcattacaaatacaaaatcacttcctaacattattaatatccatttaaacaaagatttagtagtaaaaggaactaagaatgaaactttccgtgttacacaagaagacaaaggtagggtttatcctttaaatctaagcttcaactcacctgtcgtcgaagtaagtcctgaaaagtatcagcagttgaaaacacaaaataacgttcatactttttatggatatgatattaaacaaacatcacaaaaggaaaaagctcaagcaattgcaaaacagtttggagacaaagtcatcacttatgatgaaatgaaaaaagaggtcgatgctactaacggtattctaatatttgttacatcatttttaggattagcatttttagtagcagctggatgtattatttatattaaacaaatggatgaaactgaggatgaactaagtaacttcagaatattaaaacgcataggctttacgcatacagatatgcttaagggattattattaaaaattactttcaacttcggtttaccattattgattgctatattacatgcagtattcgccgcaatagcatttatgaaattgatgggtaatatttccttcatgccggttattgtagtaattgttgtatacaccctcatttacattacttttgctttaattgcttttgtacattcaaacaaattgattaagaaaaccatttaa

SEQ ID NO: 418400 - DNA, 396 bp, Staphylococcus aureus; identical to SEQ ID NO: 415839

SEQ ID NO: 418401 - DNA, 354 bp, Staphylococcus aureus; identical to SEQ ID NO: 415838

SEQ ID NO: 418402 - DNA, 315 bp, Staphylococcus aureus
atgattccgagtggaataataaatgctgcgacagatgatgcccaagcgatagatgatgttgctggccaacctacatcaatcacattcagactgacgcctaaatttttaaccatcgcttgtgctgctggccctaaatttttaactaataaatcgatgactaagaaaatccctacaaaagccacacctattgttaaaccagacctaaatgccgctccaattttctgcctaaagaataggccaagcaagaatatgacaaccggtaaaataacagttgcacctaaatctaaaaatccccttacaaaatcagtgaagtaa

SEQ ID NO: 418403 - DNA, 2061 bp, Staphylococcus aureus
gtggataatggtgacgttgatgatgcattaacacaaggtaaagcagcaattgatactattcaagtagatgctactgttaaacctaaagcgaaccaagctattgaagctaaagcagaagatacgaaagaatcaattgatcatagtgaccagttaactgctgaagaaaaaactgaagcattagcaatgattaaacaaattacagatcaagctaaacaaggtattactgatgcaacaacaactgctgaagttgaaaaagcgaaagctcaaggacttgaggcatttgataacattcaaattgactcaacagaaaaacaaaaagctatcgaagaattagaaactgcactagaccagattgaagcaggtgtaaatgtcgacgctgatgctacaactgaagaaaaagaagcgtttacgaatgctttagaagacattttatcaaaagcaactgaagatatttctgatcaaactacaaatgcagaaatcgctactgtcaaaaatagtgcgcttgaacaacttaaagcacaacgtattaatccagtagttaagaaaaatgctttggaagcaattagagaagtggttaacaagcaaatagaaataattaaaaatgcagatgcagatgcatcggcgaaagaaattgcacgtacagatttaggtagatattttgacagatttgctgataaattagataaaacacaaacaaatacagaggttgctgaattacaaaatgtaacgatacctgcaattgaagcgattgtgcctcagaatgatccagatgctaatgatactaataatggtacagataataatgatgcaacagcaaattcaaatgctaatgcaacaccagaaaacactggacaacctaacgtatctgagacgacagataatggcaaagcagacgcttctccgacaacaccaaataatagtgatgcggcaacaggtgaaacaacagtaacatcagcaactgatgatgcaaaggataaaccgcaagctaataacaattctagtgcagatgcatcaacaaacagtccgacaatggataacgatgtaactagtaaaccagaagtagaatcaactaataacggcacaactgataaacctgtaacagaaacagataatgcaacgccagcagaaagcacaacaaataacaatagtacaactacagcaacaaacgagaatgcaccaacaggatcaacagcaacggctccaacaactgcgagcacagaagcagcatcatctgctgatagtaaagataatgcatctgtaaatgattcaaaacaaaatgctgaagtaaataatagtgctgaatctcaatcaactaatggcaaggttgcacaaccaaaatctgaaaataaagctaaggcagaaaaagatggtagagattcaacaaatcaaagtatggttgaatcaacaactgaaacattgccttcagcagacataacagaaccaaatgtaccttctaatacatcaaaagataaagaagaaagtacgacaaatcaaactgatgcaggacaacttaagtctgaaactaacgttgcatctaacgaagcagataaatcgccaagcaaagctgatactgaagtttcgaataaaccatcaacatctgcatcttctgaagcaaaagataaaatgacttcaactaatgttagccaaaaagatgatacggcaacagcagatactaatgatacgcaaaaatcagttggcccagttgcaaacaataaagctaaagatatgcaaactaatgatacgcaaaaatcagttggttcagctgcaaacaataaagctacgcaaaacgacggtgccaatgcatctccagcaacagtttcaaatggtagtcatagtatgcatcaagatatgcttaatgtaactaagcctgaagaaaacaaagcaaatgcaaaatcagaccaacaaggaaaagttaataagcctaaacaacaagctaaaactttaccagatactggtatgtcacataatgacgatttaccatatgctgaattagctctaggtgcaggtatggcattcttaattagaagattcactaagaaagaccaacaaactgaagaataa

SEQ ID NO: 418404 - DNA, 984 bp, Staphylococcus aureus; identical to SEQ ID NO: 415381

SEQ ID NO: 418405 - DNA, 927 bp, Staphylococcus aureus
atgttagatgttcaagcaacagaagatttatggactaaactaattgaactttgggaagatcaaactgttgtaatcgttgaacataaagttaaacacatctggaatcatgtcgaccgcgtcattttgatggattataacggaaatatcattgccgatgaatgtcctgaaatcatattacagaagtatgttcatttactcagtgaatatggtgtgtggcatccacgtgcatgggaattcgcaccaagtcgtgttgactttccaacaacaaactcacacttattacaatttaaaaatggacgtattattcgcggtaaatcaacattgctctcattctcagatttagaaattggtctaggtgagtggattacaattacaggggcaaatggtagtggtaaaacaaccttgcttgaatcaattatgcaattgattaaatatcaaggtgatgtttattttgaaaatcagcgtttaacaaaaattaaacatgcagcaaaacacatgtacctagtttatcaaaacccagaattacaatttataacaaattcggtttatgatgaaattaacattcattttaatcacctttctaaagatcaaagtgatgatgaaacgatacaacttttaaaacttttagatttacaaaatgtaaaagatcaacatccttatgagttgtctattggtcaaaaacgacgccttagcgtagctaccgcactaagttctaaagctgatattatctttttagatgaaccgacatttggacttgatagccataatacattccagttgatcaaacttttccaaaagcgaattaatttgggacaaagtattgtcatggttacacatgacgatgaaataattgaacgttatccatcaagaagacttaaaatttcagatggtgcgttactagattgtgatggtgatacgaatgtatga

SEQ ID NO: 418406 - DNA, 894 bp, Staphylococcus aureus
atgactggttggataagtattgatcgctcaattcaaaatcattggctatttaaagaaaagagaacattttcaaagttcgaagcatggatatatttactcatggaagcgaatcattcagaggcaaaagtgcctataggaaaccaaattgtaaccgttgaaagaggacaaagattaacatctattttgaccttgtctgacctttttaactggtcacgatttaaagtgaaaaccttccttgacttactcgagagtgatggaatgttagaagtcaaaacaacatcaaaatatacccttataaccattgtcaattatgacttttatcaaagtgagcagggcaggaaccaacatcaaaacgacatcaaaccaacatcaaaacaacatcagtcaaacatcaacccaacatcaaaacaacatcaaaccaacacaaacaataatgataataaagataataatgaaaagaatgtgaataatgagaagaagaaggtaaccgccttcgacttcttccaagataacggattcggtttcataactccttacaatttagacgatttaaattactatcttgattcatttgaaaatgattcagatgaaatagttaccgcatcacttaaaatcgctaaagacagaaacaaggttacttggggatatgctaaaagcattttgaatacttggcttaatgcaaacttgaaatctattgaacaagtacgtgcatttgaaaagcaacaacttgaaagcaaaaaacaaaattataaacctttcgttaaacaatcaaaagaaaaaacacccaaatggctcacagacagcacgagagaaacgaaaacgccggaagtagatgaaaaccttgagaaagacagagaagcttttattaagcgtctaaatagcaaatgggagtga

SEQ ID NO: 418407 - DNA, 246 bp, Staphylococcus aureus; identical to SEQ ID NO: 407403

SEQ ID NO: 418408 - DNA, 630 bp, Staphylococcus aureus
atgaaattattaattgatcaagaaaaaaatcaagaaagaaaacaggcattactatatgaatggtctcgtataaactcgatgctggatacacagctgtatattactagattagaatctcaacgcaaagatatgtattttgattacgtgtcacttaaacgcatggtcattgatgaaatacaattaacaagacatattagtcaggttaaaggtattggttttgatgttgactttaaagtggatgattatgtttatacagatacaaaatggtgtcgtatgattattagacagattttgtcaaacgcattgaaatatagtgagaattttaatattgaaattgggacagaattaaatgatcaacatgtttcgttatatattaaagactatggcagaggtattagtaaaaaagatatgccgcgaatatttgaacgaggatttacgtcaacggctaacagaaatgaaacgacgtcttcaggtatgggtctatatttagtaaatagtgtaaaggatcaattaggtattcacctgcaagtcacgtcgactgttggtaaggggacaactgtcagattgattttcccattacaaaatgaaattgttgaacgcatgtcggaagtgacaaatttgtcattttaa

SEQ ID NO: 418409 - DNA, 399 bp, Staphylococcus aureus
gtgtggcaacaatcacaaatatcagaagaacaagcaacttcaacaacgtatatgttacaaaataaagagccacatatcgaagctaatcagcggcatgttacagtgctatatggttctgaatcaggtaatgccatgcgtttagctgaaattttttcagaacgtttaagtgatatcggacatcaagttgttttgatgtcaatggatgaatatgatacgacaaacatcgcacagttagaagatttatttattattacgtctactcatggtgaaggagaaccgcctgataatgcatgggatttctttgaatttttagaagacgataacgcacctaatttaaatcatgtgagatattcagtactagctttaggtgatcaaacatatgaatttttctgtctctaa

SEQ ID NO: 418410 - DNA, 219 bp, Staphylococcus aureus; identical to SEQ ID NO: 410529

SEQ ID NO: 418411 - DNA, 1050 bp, Staphylococcus aureus
atggatgacattattcaatttattaaagatttggtggatcaaggttatgcatatgaaagtggtggcgatgtttactttagaacacgtaaatttgaaggttatggtaaattaagtcatcaatccatagatgacttaaaagtgggtgctcgtatagatgcaggagagcataaggaagatgcacttgattttacattgtggaaaaaagcgaagcctggcgagattagttgggatagcccatttggagaaggtagaccaggatggcatattgaatgttctgtaatggcatttcatgagctaggacctacaattgatatacatgcgggtggttcagatttacaatttccacatcatgaaaatgaaatagcacaatcagaagcacataatcatgcgccatttgctaattattggatgcataatggtttcattaatattgataatgaaaaaatgagtaaatcactaggcaactttattttagttcacgatattattaaagaagttgatccagatgtactaagattctttatgattagcgtacattatagaagcccaattaactataatctagaattggtagaatcagcacgtagtggactagagcgtattcgcaatagttatcaattaattgaagagcgcgcacaaattgctactaatattgaaaatcaacagacatatattgatcaaattgatgcgattttaaatcgttttgaaacagttatgaatgatgattttaatacagctaatgcaattacagcttggtatgatttagcaaaaattgcgaataaatatgtactagagaatacaacatcaacagaagtaattgataaatttaaagcagtttatcaaattttcagcgatgttttaggtgtaccgttaaaatctaaaaatgcagatgaattattggatgaagatgttgaaaaattaatcgaagagcgtaatgaagcaaggaaaaacaaagattttgcacgagcagatgagattcgagacatgctgaaatcacaaaacattatattagaagacacacctcaaggggttagatttaaacgtggataa

SEQ ID NO: 418412 - DNA, 306 bp, Staphylococcus aureus
atggctgcatcaatgggatcattcttattagcagctggtgcaaaaggtaaacgtttcgcgttaccaaatgcagaagtaatgattcaccaaccattaggtggtgctcaaggacaagcaactgaaatcgaaattgctgcaaatcacattttaaaaacacgtgaaaaattaaaccgcattttatcagagcgtactggtcaaagtattgaaaaaatacaaaaagacacagatcgtgataacttcttaactgcagaagaagctaaagaatatggcttaattgatgaagtgatggtacctgaaacaaaataa

SEQ ID NO: 418413 - DNA, 588 bp, Staphylococcus aureus; identical to SEQ ID NO: 414978

SEQ ID NO: 418414 - DNA, 777 bp, Staphylococcus aureus; identical to SEQ ID NO: 414292

SEQ ID NO: 418415 - DNA, 231 bp, Staphylococcus aureus; identical to SEQ ID NO: 418133

SEQ ID NO: 418416 - DNA, 378 bp, Staphylococcus aureus
atggaacataatcaaattatcccaacgaagccaatacaagatgacaagttgaaaaaagaaattgaaaactttaaattttttgtacaatatggcaattttaaagatattaatgattataaagatggtgacatttcatataatccaaatgtgccaagttattcggcaaaatatcaattgaggaatgatgattataatgtgcaacagttaagaaaaagatatgacataccaacgaaacaagcaccgaaaatgttattaaaaggcgatggtgatttaaaaggctcatctgtagggtctaaagagttagaatttacttttgtcgaaaataaaaaagaaaacatctatttttctgatagtattaatttcaaacctactgaatag

SEQ ID NO: 418417 - DNA, 189 bp, Staphylococcus aureus; identical to SEQ ID NO: 407433

SEQ ID NO: 418418 - DNA, 189 bp, Staphylococcus aureus; identical to SEQ ID NO: 407433

SEQ ID NO: 418419 - DNA, 192 bp, Staphylococcus aureus
atgttgaacaattcatcaacatttgaaccatatttagatgctaaacgtcttgcaacatcttcatcaatgccgaatcctttagctacatctactttttgctctacaaacgcatcaaagttcttactgcctccaacatctccacctgaaattgcaaggcctttcgtattacatggactgaatgataaaccgtag

SEQ ID NO: 418420 - DNA, 186 bp, Staphylococcus aureus
atgaaaatcattaacacaacaagattaccggaagcacttggaccatattcgcatgcaacagttgtgaatggtatggtttatacttctggtcaaattccattgaatgttgatggacatatcgtaagcgctgatgttcaagaacaaacaaaacaagttttagataatctaaaggttgttttggaataa

SEQ ID NO: 418421 - DNA, 564 bp, Staphylococcus aureus
atgttactaaaccttaaagagttagatactttagttgtattaactaaagaacaaaaagatgatattataaaacaatttggtgattacaataatataaaggttattcctaatgctgtatcttttgaagagaatttaacacaaaatattcgagaaaaaaattctattattgtattacaaagatttgtagctatgaaaaatatcacacatatcatttccgctataaatattgtaagaaaaaaagtaaaggatgttaagttgcacatatacggtaccggtacgcaaaaagaaaattacacaaaacttattaaaaaacttaaattgcaagataatgtgttcatccatgattacgcatttgacatacgtggtctttatacaaaagcctctctaagtgtactgacatcagattatgaaggtctccctatgagtttactagaggccatgagttacggtgttccagtaatttcatatcctattaattatggccctaaatctataatccaaaataatataaatggaataataacaaaaaagaaggataatattaatgaattggcaaaaaaataa

SEQ ID NO: 418422 - DNA, 351 bp, Staphylococcus aureus
atgatgattccgagtggacctggtgttgtccatggtaagttcacactaaaactgttcattcctaacacttcaacgaaaagtttaaatatccatacgttcacaattggcgctaatacaaatggaataaagaacacaggattcaatactagtggtgccccgaataaaatcggctcgtttacaccaaagaatgttggtacaactgatgcacgtccaatcgctttgtttcgtttagatttcgtcatccacataaacataaatggcacgaccaatgttgcacccgtaccaccaaatgtaacgataaacatttgtgtacctgatgtaataattttatctgcgtgttcaccagcttga

SEQ ID NO: 418423 - DNA, 288 bp, Staphylococcus aureus
ttggaagcggtagacatcttgccaaatgaaaaagtagccatcgtgaataataataatggtgcacgttttgaaacatacgtaatagctggtgaaagaggtagtggtaaaatttgtttaaatggtgcagcatcaagacttgttgaagtaggcgatgtagtcataatcatgacttatgcacagttgaatgaagaagaaattaaacaccatgcacctaaagtagcagtaatgaatgaagacaatgtcattattgaaatgattcatgaaaaagaaaatacgatagtgttataa

SEQ ID NO: 418424 - DNA, 387 bp, Staphylococcus aureus; identical to SEQ ID NO: 407651

SEQ ID NO: 418425 - DNA, 342 bp, Staphylococcus aureus
atgaaagatattttagtaataggcgcaacagggaagcaaggtaatgcagttgtaaaacagttgttagaggatggatggtatgtaagtgcattaacaagaaataagaataatcgtaaactttcagacataggacatccgcatttatcaatcgttgaaggtgatctgagtgatagtgttagtttgcaatcagcgatgaaagggaagtatggcttatacagtattcagccaatcgttaaagatgatgttagcgaagaattaagacaaggtatgaagataattgaaatagctgagcaagaaaatattcaacatattgtgtatagtactgcgggaggggttaattga

SEQ ID NO: 418426 - DNA, 960 bp, Staphylococcus aureus; identical to SEQ ID NO: 411500

SEQ ID NO: 418427 - DNA, 693 bp, Staphylococcus aureus
atgaaagatttaccaattattgcattagattttgaatcaaaagaaaaagtaaatcaatttttagatttatttgatgaatcattattcgtaaaagtaggtatggaactattttaccaagaaggtcctcaattaattaatgagataaaagaaagaggccatgatgtatttttagatttaaaactgcatgatattcctaatacagttggtaaggcgatggaaggactagctaaattgaatgttgatctggtaaatgttcatgctgctggtggcgtaaaaatgatgtctgaggccattaaaggattaagaaaacataatcaacatacaaaaattattgcagtaacacagcttacgtcaacaacagaagacatgttacgacacgaacaaaatatacaaacatcgattgaagaggccgttttaaattatgccaagttagcaaatgcagctggtttagatggcgtagtttgttcacctcttgaaagtcgtatgttgactgaaaagttaggtacatcatttttaaaagtaactccaggcattagacctaaaggtgcatctcaagatgaccaacaccgtattacgacaccggaagaagcaagacagcttggttcgacgcatattgtagttggtagaccgattacacaaagtgccaatccagtcgaaagttatcataaaattaaagaaagttggttagtataa

SEQ ID NO: 418428 - DNA, 1896 bp, Staphylococcus aureus; identical to SEQ ID NO: 410222

SEQ ID NO: 418429 - DNA, 1263 bp, Staphylococcus aureus
gtgtataattatcatttattagaagatagggatgttctatgtattgaccaaaaaagtttttttgcgagtgtttcttgtattgaaaaggggctagatccattagaaacaaaattagctgttgttgcagatactaagcgtcagggttctgtagtattggctgcgacacctaaattaaaagaattaggcatcaagacaggatcgcgattgtttgaaataccacatagaaatgatatttacattatcaatccaagtatgcgtaaatatcttaatgtttcagttgctatttctaagattgcattgcgttatattccacctgaagatttacaccaatatagtattgacgaattttttatggatgttactgatagctatcatagatttagttctacagtacatgcattttgcgaaagacttaaacgtgaaatttatgaagaaacaggcatttattgtactgtgggcattggttctaatatgttattaagtaaaattgctatggatgttgaagcgaagcataatcaaaatggtatagctgaatggcgatatcaagatgtaccaacaaaattatggccaattcagcccttgcgagatttttggggtattaatcgtcgaacagaagctaaattgaataaaagaggaatttttactataggagatttagcgaaatatccatataaatttttaaaaaaagagttcggtattttaggtgttgatatgcatctacatgcgaatgggatagatcagagtaaagtacgtgaaaagcacaagatcagcaatccatcgatatgcaaaagtcaaatattaatgagagattatcattttgatgaagcaaaagtagtaatgcaagagttaattgaagatgttgctagcagagttcgagcaagaaaaaaagtggcaagaacgatacattttgcttttggctatagtgatgaaggcggtgtacataagcaatatactttgaaagatccaacaaacttagaaaaagatatttataaagtagtaatgcatttcgcagataaattatgtaataaacaagcactatatcgtacgttaagtatatctttaagtcaatttattaatgaggatgagcgacagttaagtttgtttgaagatgaataccaacgcaaacgtgacgaatgtctagctaaaacgatagatcaattacatttgaaatacggcaaaggtattgtgtccaaagcagtatcgtttacagaagcaggtacaaaacacggcagattaggtttaatggctggacataaaatgtaa

SEQ ID NO: 418430 - DNA, 417 bp, Staphylococcus aureus; identical to SEQ ID NO: 411503

SEQ ID NO: 418431 - DNA, 738 bp, Staphylococcus aureus
atgcaaccgaaaaaagaattgattggtaatattgctaaaacgattgaaatgatttctgaaaaagtggatgaaccatttataaatcaacaacatttagatgaattagaacaactaagaacacatattgatgaagaaactggtattaaagcgacacatgaagaaggtattctacatccagtcgaaattattgaatctatgcaaaaggtattaacagatgatactacagtaacagttgatgttggtagtcactatatttggatggcacgtaatttcagaagttataatccaagacatttattatttagtaacggtatgcaaacacttggtgtagcattaccatgggcaatttcagctgctcttgtacgccctaatacgcaagttgtatccgttgctggcgatggaggctttttattttcatcacaagatttagaaacggccgtacgtaaaaatctaaacattatccaacttatttggaatgatggaaaatataatatggttgaattccaagaagaaatgaaatataaacgttcatcaggtgtagacttcggtcctgtagattttgtaaaatatgcagaatcatttggcgcaaaaggtttacgagttactaatcaagaagaattagaagcggcaattaaagagggctatgaaacagatggtccagtattaattgatatacctgtaaattacaaagataatatcaaactttcaacaaatatgttacctgacgtatttaactaa

SEQ ID NO: 418432 - DNA, 1380 bp, Staphylococcus aureus
atggagaacaatgaactacaaaggggattgagtgcccgtcaaattcaaatgattgcacttggtggtacgattggcgtggggcttttcatgggtgccacaagtacaattaaatggacaggcccatcagttatccttgcatatttaattgcgggtatctttttatttttaatcatgagagcaatgggggaaatgatttatttaaaccctacaacaggatcatttgcaacatttgcaagtgattatatacatcctgcagcaggttatatgacagcatggagtaatatattccaatggattgttgttggtatgagtgaggtcatcgcagtaggagaatatatgaagttttggttcccggaattgccaacttggattcctggtattattgctattttattattaatggcagcgaatttattctcggtaaaagcgtttggagaatttgaattttggtttgctttaattaaagttgtaacaattattttaatgattattgctggttttggtcttattttctttggttttggaaatggtggccatgcggtaggtatttctaatttatggacaaatggcggatttatgccaaatggtattgttggtttcttctttgcattatcaattgtaattggttcataccaaggtgtggaactgataggtattactgcaggtgaaactaaagatcctcagaaaaatattgttaaagcagtgaatggtgttatttggagaattttaattttctatttaggtgctatttttgttattgtttcagtgtatccttggaatcaattaggagacattggaagtccgtttgttgcaacattcgctaaaatcggtattacatttgcagctggattaattaactttgtcgtattaactgcagcaatgtctggatgtaactcaggtattttcagtgcgagtcgtatgatttatacacttgctcataaaggtgaaatgccgaaaatatttactaaaatcatgagaaatggtgtgccattgtacactgttgttgcagtatctcttggtattttaattggtgctttattaaatgtaattttacctttatatatcgatggagcgaagagtattttcgtatacgtatatagtgcgtctattttaccaggtatgattccttggtttatgattttattcagtcacttacgttttagaaaattacaccctgaagaagtggaaggtcacccattcaaaatgcctggtggcgcagtaagtaactatttaacaatcttattcttaatattagtattggttggtatggtatttaatgttgaaactagaatatcagtgcttattggtgtcatcttcttaacgattgtaacgatttattattttattagatataataaaaataatgtaaaagcaaaatag

SEQ ID NO: 418433 - DNA, 660 bp, Staphylococcus aureus
atgagtaaagcactaacacatattattattgctgcttatatagaagaattagaaagtgttggttttttcttagtggacaggaatttgccgggagttgaaattgccgataattgggatgtattaggtatgcgagcgacagaaagtcatgatttaatattaaatgatgtaaaagtaccattaaaacatttagtggaaacagagaaaagtaaagcgccaaatggttggatattgcatataccaagctgttatttaggtatagcacaagctgctagaaattatgctgtagactttgcaatccaacatagccctaatagtattgaaggaacgattgcaacattgccaactgtgcaacaaaatttagggaaaatggaaacgctattgttatgtgcgagacaatttttatggagtacagcaaaaggctatcaacaatataaagatgacagtcagataagaaattcaacaagtgcgagtaaagtgatggtaatgaatcaagggcttgaagtgattgatttagcgatgagaatagttggtgctaaaagcttagaaatgaatcgaccattacaacgttactatcgtgacatgcgtgcaggattacacaatccacctatggaagatgcagcatacacaaatattgctaagagtattacagatacattttaa

SEQ ID NO: 418434 - DNA, 1158 bp, Staphylococcus aureus
ttggataaaaagtctgagaagcggggcattaaaatgacggtacaaagtgcatatatacatattccattttgtgtaagaatatgtacatattgtgatttcaataaatattttatacagaatcaacctgtagatgagtacttagatgcactaatcacagaaatgtctacagcaaaatataggaacttaaagaccatgtatgtaggtggcggcacaccaacggccctttctattaatcagttggaaagattacttaaagcaatacgtgatacgtttacaatcacaggtgagtatacatttgaagcaaatcctgatgagttaactaaagagaaagtccaactattagagaaatatggagtaaacagaatttcaatgggcgttcagacattcaagccggagttattgtctgttttaggtagaacgcacaatactgaagatatttacgcttcggtgttaaatgctaaaaacgcaggtattaaatcaatcagtttagatttaatgtatcatttaccgaaacagacgattgaagattttgaacaaagtttagatctagctttagatatggatattcaacatatttcgagttacggcttaatacttgaacctaaaacccaattttataatatgtatagaaaaggtttgctcaaacttcctaatgaggatttaggtgctgacatgtatcagttgctgatgtctaagatagaacaatctcctttccatcaatacgaaatatctaattttgcattagatggccatgaatcagaacataataaggtttactggtttaatgaggaatattatggatttggagcaggtgcaagtggttatgtagatggtgttcgttatacgaatatcaatccagtgaatcattatatcaaagctataaataaagaaagcaaagcaattttagtatcaaataaaccttctttgactgagagaatggaagaagaaatgtttcttgggttgcgtttaaatgaaggtgtgagtagtagtaggttcaaaaagaagtttgaccaatctattgaaagtgtctttggtcaaacaataaataatttaaaagagaagaaattaattgtagaaaagaacgatgcgattgcacttacaaatcgagggaaagtcattggtaatgaggtttttgaagctttcctaataaatgattaa

SEQ ID NO: 418435 - DNA, 513 bp, Staphylococcus aureus
atgaatgctggcgcttatggtggcgaagttaaagattgtatagactatgcgctttgcgtaaacgaacaaggctcgttaattaaacttacaacaaaagaattagagttagattatcgtaatagcattattcaaaaagaacacttagttgtattagaagctgcatttactttagctcctggtaaactgactgaaatacaagctaaaatggatgatttaacagaacgtagagaatctaaacaacctttagagtatccttcatgtggtagtgtattccaaagaccgcctggtcattttgcaggtaaattgatacaagattctaatttacaaggtcaccgtattggcggcgttgaagtttcaactaaacacgccggttttatggtaaatgtagacaatggaactgctacagattatgaaaaccttattcattatgtacaaaagaccgtcaaagaaaaatttggcattgaattaaatcgtgaagttcgcattatcggtgaacatccaaaggaatcgtaa

SEQ ID NO: 418436 - DNA, 315 bp, Staphylococcus aureus
atgcctaaagtttatggttcattaatcgatactgaaacacgctgtcgccattattttaccgaagaagatattattgctattaaatttaaatgttgtaataaatactatccatgctataagtgccataatgagtttgaaaagcacgccattaagcgttggtctgagccttcatttaatgaaaaagcaatcttatgcggtgtatgcaaacacgaattaacaatcaatgaatatatgatggttgagcgttgtccaaattgccaatctaggtttaacaatcgctgtaagtatcactatcatatttattttgaaatttaa

SEQ ID NO: 418437 - DNA, 828 bp, Staphylococcus aureus
atggcatacgcattagaagaaggtgatattacagcgccttattatagagatctagctttcgttacttatatgggtatctcagcgtatgatacgtttttatcagcgtttggaaagaaagacgatgttaactctggtggaaaacaaatgccatcacactttagtagtagagctaagaatattttgtcacaaagttcaccggtagcaacccaaataccccatgctgttggtgctgctttagctttaaaaatggatggtaagaagaaaattgcaacagcaactgttggtgaaggtagctcaaaccaaggtgacttccatgaaggtttaaacttcgcgggtgtacacaaacttccttttgtatgtgtcattataaataataaatatgcaatttcagtacctgattcattacaatacgcagctgaaaaattatcggatagagcacttggttacggtatacatggtgaacaagtagatggtaatgatcctttagcaatgtataaagcgatgaaagaagcaagagaacgagctatttctggacagggttcaacattgattgaagcagtaacttctcgtatgacagctcattcatcggatgatgacgaccaatatcgtacgaaagaagagcgtgaagcgcttaaaaaagcagactgcaacgaaaagttcaaaaaagagttgctttcagctggcattatcgatgatgcttggttgacagaaatagaagcagaacataaagacattatcaataaagcgacaaaggctgctgaagacgcgccatatccaagcgtcgaagaagcctatgcatttgtgtacgaagaagggagtcttaactaa

SEQ ID NO: 418438 - DNA, 588 bp, Staphylococcus aureus
atgaatttaattcctacagttattgaaacaacaaatcgcggtgaacgtgcatacgatatatactcacgtttattaaaagaccgtattattatgttaggttcacaaattgatgacaacgtagcaaattcaatcgtatcacagttattattcttacaagcacaagactcagagaaagatatttatttatacattaattcaccaggtggaagtgtaacagctggttttgcgatttatgatacaattcaacacattaaacctgatgttcaaacaatttgtatcggtatggctgcatcaatgggatcattcttattagcagctggtgcaaaaggtaaacgtttcgcgttaccaaatgcagaagtaatgattcaccaaccattaggtggtgctcaaggacaagcaactgaaatcgaaattgctgcaaatcacattttaaaaacacgtgaaaaattaaaccgcattttatcagagcgtactggtcaaagtattgaaaaaatacaaaaagatacagatcgtgataacttcttaactgcagaagaagctaaagaatatggcttaattgatgaagtgatggtacctgaaacaaaataa

SEQ ID NO: 418439 - DNA, 531 bp, Staphylococcus aureus
atggcaataatgattccattagcattaatgtttggtaagttagcggataaaataggtgaaaagaaagtatttctaattggtactggtgggctaacattatttagtatcatcgcatttatgttattacattcacaatcatttgttgtaatagtaatcggtatatttttattaggatttttcttatcaacttacgaagcgacaatgccagggtcgttaccaacgatgttttacagtcatataagatatcgaactttatcagtaacatttaatatctctgtttcgatatttggtggtacgacgccattagttgcaacatggttagttacgaaaactggagatccattagcacctgcgtattatttaacagcaatcagtgttattggctttttagttattacattcttacatttaagtacagcaggaaaatctctaaaaggttcgtatccaaacgtagataacgagcaagatagatcttattatgcagaacatccaaaagaagcattatggtgggttaaagaacgtaagaattag

SEQ ID NO: 418440 - DNA, 807 bp, Staphylococcus aureus
gtgttagactatggcgcattagatgtaatgaaagaaatgggcttatcagacaaagtaaaagcattacctaaaggggaaggcggcaagtcattaccgaatttcttagagtcatttaaagatgacaagtatacaaatgttggtaacttgaaagaagttaatttcgataaaattgcagcaacaaaaccggaagtaatctttatctctggccgtacagcaaatcaaaagaatttagatgaatttaaaaaagctgcaccaaaagcaaaaattgtttacgttggtgcagatgaaaagaatttaattagttcaatgaaacaaaacactgaaaatatcggtaaaatttacgataaagaagataaagctaaagaattaaataaagatttagataacaaaattgcttcaatgaaagataaaactaagaagttcaacaaatcagttatgtatttattagttaatgaaggtgaattatctacttatggacctaaaggtcgtttcggtggattagtttacgatacattaggtttcaacgcggttgataaaaaagtaagcaacagtaaccacggacaaaatgtctctaatgaatacattaataaagaaaatccagatgtcattttagcaatggatagaggacaggctgtaagtggtaaatcaactgcgaaacaagcattaaataatcctgtattaaaaaatgttaaagcaattaaagaagacaaagtttataatttagatcctaaattatggtactttgcagctggatcaactacaactacaattaaacaaattgatgaacttgaaaaagttgtaaaataa

SEQ ID NO: 418441 - DNA, 159 bp, Staphylococcus aureus
atgcctcttcaacacctgagagttcagctgttagttgctgttgctttaattgtaacgtttttaaatactcgtttaaatcaatatacgccaactttaacatggcgtggtcatcgtataacttttgcatttcttcaaagtatggtaactcacggaatttga

SEQ ID NO: 418442 - DNA, 459 bp, Staphylococcus aureus
atgaattgtttagaagcaccagcacatttatttacaacaggtgctaatccagttagttgtgaagctgcattagccacaattcaaatgattgaagatcagtcgcttcttcatgctagtgcggaaaaaggggaatatgttaggaaacgaatggatcaatgggtatctaaatacaatagtgttggcgatgttagaggtaaaggtctgagcattggtattgatattgtttccgacaaaaacctcaaaacacgtgatgctactgcggcacttaaaatctgtaattactgctttgagcatggcgtagttattatagctgtagcaggaaatgtgttacgattccaaccgccattggtgataacatatgagcaattagacacggcgttaaacactatagaagatgcactgactgctttggaagcaggtgacttagatcaatatgacatatctggacaaggttggtaa

SEQ ID NO: 418443 - DNA, 225 bp, Staphylococcus aureus
atgttccaacaaagttataaccatggtgctggttgtacatttgctgcggcaacaactgcatatttagctaacggtaagtcaccgaaagaagctgtgattagtgcgaaagctttcgtcgcttctgctattaaaaacggttggaaaatgaacgattttgttggtcctgtggatcacggtgcatacaaccgtattgaacatatcgatgttgaagtaacagaggtttaa

SEQ ID NO: 418444 - DNA, 225 bp, Staphylococcus aureus; identical to SEQ ID NO: 418443

SEQ ID NO: 418445 - DNA, 303 bp, Staphylococcus aureus; identical to SEQ ID NO: 410835

SEQ ID NO: 418446 - DNA, 288 bp, Staphylococcus aureus
atgttattgataaagatatcatttaataagcttatgttatttagcaaggcaagccactctagattcatggcttgccttattttattgtatatttttaattatcgttgctggactcaaggtatttttgcgagatggacagataatccaaatatcgaagatttgattcaagcacaacaagaacaccctctgttcgatgatttttggaaacagcgtcaagtgccattatcacaaattaaaacacctctactaacatgtgccagttggtttgcacaaccgtggctcttttga

SEQ ID NO: 418447 - DNA, 450 bp, Staphylococcus aureus; identical to SEQ ID NO: 417980

SEQ ID NO: 418448 - DNA, 723 bp, Staphylococcus aureus; identical to SEQ ID NO: 413380

SEQ ID NO: 418449 - DNA, 1071 bp, Staphylococcus aureus
atggcaaagcaaaaactagtaatgattggtaacggtatggcaggcattcgaacaatcgaagaaatattagagcgcgccaacgatttatatgatattacggtaataggtaaagaaccttatccaaactataaccgcatcatgctttcaaatattttacaaaataaaatgacagttgaagaaacaattatgaatccatatgagtggtatgaggaacatggtatcgagttaattacaaatgatcctgtaattgaagtagatagagcaaatcaatcagttactactgcaaatggtattgaagtatcatacgataaattgatttttgcgacaggttctaaagcattcgtcattccagttccaggttcgacattaccgagtgtaattggttggagaacgattgatgatactgaacaaatgatgaacattgcgaagattaaaaagaaagcaattgtaattggtggaggcttactaggtttagagtgtgcacgtggtttattagatcaaggtatggaagtaacggtgttacatttagctgaatggttgatggaaatgcagctagaccgtaaagctggaaatatgcttaaagcagatctagaaaagcaaggtatgaagtttgaaatgcaagccaacacaactgaaatcttaggaaaagatgatgttgaaggtgttaaattggctgatggacgcgagattccggcagacttagttgttatggcagtaggtattcgaccatacacagaagtagccaaagaatcaggtctagatgttaatcgtggtattgttgtcaatgatgtgatgcaaacaagtgatagcaatgtatatgcagttggtgaatgtgcagaacataacggcaaagtttatggactcgttgcaccactatatgaacaaggtaaagtattagctgatcatttaacaaataaagaaacgaacggatacaagggatcaacaacatttacgtcattaaaagtttctgggtgtgacttgtatagtgctggtcaaattgtagaaaatgcagaaattaaaggtattgaaatatttaatagtgttgataataactataaaaaatctttttaa

SEQ ID NO: 418450 - DNA, 348 bp, Staphylococcus aureus; identical to SEQ ID NO: 418307

SEQ ID NO: 418451 - DNA, 348 bp, Staphylococcus aureus; identical to SEQ ID NO: 416921

SEQ ID NO: 418452 - DNA, 762 bp, Staphylococcus aureus
atggcttatatttcattaaactatcattcaccaacaattggtatgcatcaaaatttgacagtcattttaccggaagatcaaagcttctttaataacgatacaactgctaaaccattaaaaactttaatgttgttacatggattatcaagtgatgaaacgacatatatgagatatacaagcatagaaaggtatgcgaatgaacacaaattagctgtgattatgcccaatgtggatcatagcgcatatgctaacatggcatatggtcatagctattatgattatattttggaagtatatgattatgttcatcaaatatttccactttccaaaaagcgtgatgacaattttatagcaggtcactctatgggaggatatggcacaattaaatttgcattaacacaaggcgataaatttgccaaagctgtaccattatctgctgtgtttgaagcgcaaaatttaatggatctagagtggaatgatttttcaaaagaggccatagttggcaatctttcaagtgttaaaggaactgaacatgatccgtattatttgctagacaaagctgtagctgaagataaacaaattccaaaattgctcattatgtgtggtaaacaagactttttatatcaagacaacttagattttatcgattatttatcacgcaaaaatgttccttatcaatttgaagatggaccaggagatcatgattatgcatattgggaccaagcgattaagcgtgctataacatggatggtgaatgattaa

SEQ ID NO: 418453 - DNA, 456 bp, Staphylococcus aureus
atgtcgaccaataaaaacgattatgagcatatgttgttttattttgcatataaaacgtttattactaccgctgatgaaattatagagaagtatggtatgagtcgtcagcatcatcgttttttgttttttatcaataaattacctggtattactattaaatcattactagaaatattagaaatttctaaacaaggatcacatgcaacacttcaaaaattaaaagagcaaggtctcattattgaaaaagttttagagactgatcgacgtgtcaaaaaattatattcgacggataaaggcgatcaactcattgctgaattgaacaaggcgcaagatgaattattgcaaaatatatatcaacaagtcggttcggattggtatgatgtgatggaagcattggctaaagggcgacttggctttgattttattaagcatttgaaagatgaaaaagaaagctag

SEQ ID NO: 418454 - DNA, 1425 bp, Staphylococcus aureus
atgttatcagttaaaaaagccacaaaatttgcagttgctaaccttattatcgtgtcaacagttttcagttctatcacacctgcaattgcgcaatccgataaaagttctaaagatgaaagtttcgcggttggtaatactaaaaatcctaaaaatgttatctttttagttggcgatggtatgggtccatcatttaacacagcttatcgttattataaaaatgatccacatgccaaagaaatgacccctactgcttttgattcatatttaaaaggcacaaatcgtacatattcaaatgatccaaaacagaatattactgattctgcagctggcggaacagcctttagttctggccataagacatataatggtgccatcggtgttgacagtaacaagcagaaagtaaagacggtgcttgaacgtgcaaaagaaaaagggaagtcgactggtcttgtttcaacagctgaattaacagatgcaacaccagcagcatatgctgcacacgtgacttctagagatgataaaaacgaaatcgctaaacaattttataaagataaaatcaacggaaagcataaagttgatgttttattaggcggtggcgctaaatatttcggtaaaagtaatggcaatttagataaaaaattcaaaaaagatggttacgaccttgccacgaacagtaaggagttatcaaaatctgataaagataaagttcttggtttgtttgcagataaaaatatgccacttgcaatagatgcttctaaagacgaaccatcattagctgatatgcaacaaagtgcacttagtaagcttgagcgtaataaaaaaggtttctttttaatggtcgaaggtgcttctatagataaatcagcgcattctaacgatattacaggcgttatgtctgaaatggaaggttttgaaaaagcattcgatgacgccattcaatatgctaagaaacataaagatacacttgtcgttgcaacagcagatcactctactggtggtctaacaattggtaaagataaaggatacgaatggaatcctcaaccgattaaatcgatgaaacactctggatcatatatgacagaaaaaatggctaaaggtgaagaccctgaaaaagttattaatgaaggttatggctttgaattttcacaagatgatatgaaaaaggttaaaaaagagaataaaaagttgcaaaaattacttaaaaaaaataaagatgaaaaatctgcagatgtagaaaaacaaacaaaagccttacaacacgctattcagaagccagtaaatgataaatcttatacagggtggacttccgatggacatacaggcgaggatgttaatacctacgcttatggacctagatcagaatcatttagtggtaatatcgaaaatacagaaagcgcaaaaataatatttgatatattcaagtaa

SEQ ID NO: 418455 - DNA, 201 bp, Staphylococcus aureus; identical to SEQ ID NO: 417795

SEQ ID NO: 418456 - DNA, 1236 bp, Staphylococcus aureus; identical to SEQ ID NO: 409865

SEQ ID NO: 418457 - DNA, 216 bp, Staphylococcus aureus; identical to SEQ ID NO: 405670

SEQ ID NO: 418458 - DNA, 528 bp, Staphylococcus aureus
atgactaacatcctacaagtaaagctattatcagaagacgctagaatgccagaacgaaatcataagacggatgcaggttatgacatattctcagctgaaactgtcgtacttgagccacaagaaaaggcagtgatcaaaacagatgtagctgtaagcataccagagggctatgtcggactattaactagccgtagtggtgtaagtagtaaaacgcatttagtgattgaaacaggcaagatagacgcgggatatcatggcaatttagggattaatatcaagaatgatgcacaagtatatttaacaactaacgaacagtgttttgatatacaaggagaaatggaaaattcttttgtaaataatgctaagaaaaaaccttttactataaatgattattacgaaatatataaaggcgacaaactagctcaattggttatcgtgcctatatggacacctgaactaaagcaagtggaggaattcgagagtgtttcagaacgtggagaaaaaggcttcggaagtagcggagtgtaa

SEQ ID NO: 418459 - DNA, 174 bp, Staphylococcus aureus; identical to SEQ ID NO: 411576

SEQ ID NO: 418460 - DNA, 390 bp, Staphylococcus aureus; identical to SEQ ID NO: 408590

SEQ ID NO: 418461 - DNA, 138 bp, Staphylococcus aureus
ttgaaagaacgtaatgcgattatgacagatattgcgcaagatattactaatgatttaaattctgaagatattgaaaatgtaaggcaagtattagaagtcatcaatcatcgcattaaaacatatagcaatcataaatag

SEQ ID NO: 418462 - DNA, 186 bp, Staphylococcus aureus; identical to SEQ ID NO: 408593

SEQ ID NO: 418463 - DNA, 966 bp, Staphylococcus aureus
ttgtacagactaattcaaatggtagttgttttatttgttatttcaacactaactttcattttgatgaaattatctccaggaaatcctgttgataaaatacttcaccttgatgtgtcacatgtgtcggcagaacaaataaatgcaactgaagaaaaattgggtttaaagaattcaatcatatcgcaatggtggcaatggatgcaacaattgcttcaattaaatttaggacgtagtttcgaaactaaagaaccagttacacagtcactatttgagtatgcaccaccaactttgcttatatctttttcaacattagttttgtcattagcgatatcgataccactaggtgtgctttcagcaagacactatcacaaactgactgataaagtgattagaactgtatcaacattgtcaattagcttgcctgcgtttttcatcggcattattttattattcattttcaccaatttattaaatattgatagtgccttatggaatcagattgtattacctgtttttacattgtcattaggtatgtgtgcgtatattattcgattaattcgttcaaatttactttcgctatatcaaagcaatatcgttaaatcatcacgattacgcggtatgagcgaacgatatattttgatgcatgatttattgaaaccaacgcttttacctattattccattgttaggtatttctctaggtagtcttattggcggtacagttgttattgaaaatttatttgatatacctggcattggttacttattgatggatagtattaaatctcgggattatccaatcatacaagggtgtgtattgtttataggattttttgtggtgttaatcaattcaattgctgacttactggctctattgtttgatccaaaacaacgtttacattttaaaaatcaaaaaaataattcaaacgtatcatcaatcttagaaagtggtgatctacgtgcttag

SEQ ID NO: 418464 - DNA, 534 bp, Staphylococcus aureus
ttgaataacaacatattgcctgccataagaaacattaaagatctagagaaactgattaaaacagattataaaatgtgtgtgcttctagatatgcatataggacatattaaaagtattatggaattgctgaagcaaaatcatatagagtgttttattcatatagatttgataaaaggtttaagtcacgatgaatttgcaagtgaatttattattcagcaatacaagccaaaaggtattgtatcgactaaatctaaagtaataaaaaaagcgaaatcattaaatactttaacgatttttagagtttttattattgatagtcaagcattgaaacgcagtatagatttgataaaaaaagttgaacctgattttgttgaagtacttccaggtgttgcgagtaaagcgattcatcatattcagaaagaaacaaacacacaagtcattgcaggtggcctaattaatacaatagatgaagttaatgtagctgttaaaaatggagcgaaatatgtaacaactagttatgataaactttggtaa

SEQ ID NO: 418465 - DNA, 495 bp, Staphylococcus aureus
atgatcacagcattcggtacaggaatcggtggcgactttgatctagcgaaagcaagatatcacaaaatcgtcattatgactgatgccgatgtggatggagcgcatattagaacattgttattaacattcttctatcgatttatgagaccgttaattgaagcaggctatgtgtatattgcacagccaccgttgtataaactgacacaaggtaaacaaaagtattatgtatacaatgatagggaacttgataaacttaaatctgaattgaatccaacaccaaaatggtctattgcacgatacaaaggtcttggagaaatgaatgcagatcaattatgggaaacaacaatgaaccctgagcaccgcgctcttttacaagtaaaacttgaagatgcgattgaagcggaccaaacatttgaaatgttaatgggtgacgttgtagaaaaccgtagacaatttatagaagataatgcagtttatgcaaacttagacttctaa

SEQ ID NO: 418466 - DNA, 480 bp, Staphylococcus aureus
atgacttggttaaatgataaatatgatgtaatgacaactttacgcgctgcatctaccccttctacatcatcagttggatccgcttcagcaaaaccaagtcttttcgcttcatcaagtgcttcctcaaatgtcgtttgctctttggtcattttagataaaataaaattagaggtaccatttaaaattcccataaattttgaaatattattcgcattcaaaccattatttatggcatttacgatcggaataccacctgctacactcgcttcaaactttaaagctacaccattttcttctgctaaatcttctaaaagtttaagatgtactgctaataaatctttatttgcggtaataacatgttttttatttttaagtgctgttcttaaccaatctacagttggttcaattcctcccatgacttcaacgataatatctaatgaatcatcatttaaaatttcattaacatcttcagttaaatga

SEQ ID NO: 418467 - DNA, 1338 bp, Staphylococcus aureus; identical to SEQ ID NO: 407534

SEQ ID NO: 418468 - DNA, 417 bp, Staphylococcus aureus; identical to SEQ ID NO: 411503

SEQ ID NO: 418469 - DNA, 1878 bp, Staphylococcus aureus; identical to SEQ ID NO: 410552

SEQ ID NO: 418470 - DNA, 342 bp, Staphylococcus aureus
atgaacaaattaattaaagatactgttttacgtccaagaccatataatcatttagccgttgatacaggcttttcatttccgagtggacattccaacgccagcacattattatatttcgccttaatgatcattattatttcagttgctgctaagacaataacaaaagtgttgagtgcgctggttatgggaatattatggcttagcatattattttgtcgcctttattttcatgcgcattacttttcagatgtcattggcggcacgtcactagcaatcatttgggtagcgttattcctaatggtatacccatactttattaatcatcgacgacaacgcgtttag

SEQ ID NO: 418471 - DNA, 819 bp, Staphylococcus aureus
atgaatgtatatttagcagaattcctaggaactgcaatcttaatcctttttggtggtggcgtttgtgccaatgtcaatttaaagagaagtgctgcgaatggtgctgattggattgtcatcacagctggatggggattagcggttacaatgggtgtatatgctgtcggtcaattctcaggtgcacatttaaacccagcggtgtctttagctcttgcattagacggaagttttgattggtcattagttcctggttatattgttgctcaaatgttaggtgcaattgtcggagcaacgattgtatggttaatgtacttgccacattggaaagcgacagaagaagctggcgcgaaattaggtgttttctctacagcaccggctattaagaattactttgccaactttttaagtgagattatcggaacaatggcattaactttaggtattttatttatcggtgtaaacaaaattgccgatggtttaaatcctttaattgtcggagcattaattgttgcaattggattaagtttaggcggtgctactggttatgcaatcaacccagcacgtgatttaggaccgagaattgcacatgcgattttaccaatagctggtaaaggtggttcaaattggtcatatgcaatcgttcctatcttaggaccaattgccggtggtttattaggtgcggtagtatacgctgtattttataaacatacatttaatattggttgtgcaattgcaattgttgtagttattattactttgattttaggttacattttaaataaatcatcaaaaaaaggtgatatcgaatcaatttactaa

SEQ ID NO: 418472 - DNA, 282 bp, Staphylococcus aureus
atgacgcttgaaagacatccgcatttaaaaaataacttttatggattaaaactggaagaagcaaagtatgttagtgttaaattcggttgggaagatggacatatttatggttatacaattaacgatataacttggtcaggacatgaatttttagataatatccgagacaatcacacttggaaagaagttaaaaaagtcgcaaacaaaaccactagtatgtccgtaacattgctaagcaaattagcttttaattatctaacacaaaaatttaatctaacttaa

SEQ ID NO: 418473 - DNA, 294 bp, Staphylococcus aureus
ttggctacttatttctttcatagccatttacttccaccttacttacaattagacactgaacatttagctgatttaaatcctgaacgcatgattattatgacagatcatgcaaaaaaagattctgctgaattcaagaagttacaagaagatgcaacatggaaaaaattgaatgcagttaaaaataatcgcgttgatattgttgaccgtgatgtttgggcaagatctcgtggcttaatttcttctgaagaaatggctaaagaacttgttgaattatctaaacaagaacaaaagtaa

SEQ ID NO: 418474 - DNA, 903 bp, Staphylococcus aureus
atgaataaaattaatgatagagatttaactgagttaagtggttactgggtttatcaagatataaatacaaataaagaaattaaagttaatggaaaacgatttatgcaagtagatagttacaatgatgataaaaataggaatttgaatggtgctgctgatattaaaatatatgagttgttagatgataaaagtaaaccaacaggccaacagactatcgtctatcaaggaacttctaatgaggcaattaatcctaaaaacccacttaggtctaaaaatatcggtgatgattggatacaaaacatcaaattaatgaatgattcaaatatgtccacacaatatttgaatcaagcggatgaattttcaaatcaatataagaaaaaaatagaagatgcaaataaattatcaaaaagtgaatttcttagaaaatataatacaaatcctaaaaattacaagcacaaaagcattgtagctgacggtggtaattccgaaggtggcgcaggagcaaaatatcatggggccaaacatcaaaatgaaaatatagttgcttctaatcctgctatgttaccatatgcttcatgggaacaatataaaaattcaaaatttaaaaatatgattagttttcatagtacaaatgacttactatcatggttacaagatccatttgcgaaagaaatgccaggtaaaagaattaatataagagatggtgttccaactttaaatggattaattgatagtcatcttggttttaaaagggaattcaattcgaaaactaatgaatataaggatatacctgttcataaaatagaatcggtcaaggatacagagattaaaaatggaaaagaagtgaaaaaggttataaatataaatctagacatggatggtagaattccaataaatgtttga

SEQ ID NO: 418475 - DNA, 213 bp, Staphylococcus aureus
atgtataaaaattataacatgacccaacttacactaccaatagaaacttctgttagaatccctcaaaatgatatttcacgatatgttaatgaaattgttgaaacaatacctgatagcgaattcgatgaattcagacatcatcgtggcgcaacatcctatcatccaaaaatgatgttaaaaatcatcttatatgcatatactcaatctgtttaa

SEQ ID NO: 418476 - DNA, 294 bp, Staphylococcus aureus; identical to SEQ ID NO: 408498

SEQ ID NO: 418477 - DNA, 189 bp, Staphylococcus aureus; identical to SEQ ID NO: 407433

SEQ ID NO: 418478 - DNA, 303 bp, Staphylococcus aureus; identical to SEQ ID NO: 416179

SEQ ID NO: 418479 - DNA, 168 bp, Staphylococcus aureus
atgaggagattactcagtctattactagctagtacaatgattttagtcgcatgtgggaatgctaacaatgaaaataagaaaaaggaagacgaaaaaaaatcagaagtaaaaaaaaagctacgaaaaataatgataaaccaaagaacgaaaagaagaatcaagatataa

SEQ ID NO: 418480 - DNA, 1392 bp, Staphylococcus aureus
atggaaaagccgtcaagagaggcatttgaaggcaataataagttgttaataggaattgttttaagtgtaataacgttttggctatttgcacaatcattggttaatgttgtaccaatacttgaagatagtttcaatacagatattggaacggttaatatcgccgttagtataactgctttattttcaggaatgtttgttgtaggagcaggtggtcttgctgataaatatggcagaattaaactcacgaacattggtattatcttaaatatattgggttcattattaatcattatttcaaatattcctttattacttattataggaagattaattcaaggactttcagcagcatgtattatgcctgcaactttgtctattattaagtcatattacattgggaaagatagacaacgcgctttaagttattggtcaattggctcatggggcggctctggtgtttgttcattttttggaggtgcagttgcaacacttttaggttggcgttggattttcatcctatcaattataatttcattaattgcgctgtttcttattaaaggcacacctgaaactaaatctaaatcgatttctctaaataaatttgacattaaaggtctggttcttttagtcattatgctcctcactttaaatattttaattactaaaggatcagaattaggtgtaacctcacttctttttatcactttattagcaattgcaattggatcttttagtttatttatagttcttgaaaagcgtgctacaaatcctttaatcgattttaaattatttaaaaataaagcttatacaggtgcaacagcttcaaactttttgttaaatggtgttgcgggaacattaatagtagccaacacatttgttcaaagaggtttaggatattcctcattgcaagcaggaagtttatcaatcacttatttagtaatggtactaattatgattcgtgttggtgaaaagttacttcaaacactcggatgcaagaaaccaatgttaattggaacaggagttcttattgtcggagaatgtctcatttcattaactttcttgccagaaatattgtatgtcatttgttgtattataggttatttattctttggtttaggactaggaatatatgctacaccatcaacagatacagcaattgcaaatgcaccgttagaaaaagtaggagttgctgcaggtatctataaaatggcttctgcattaggtggagcatttggcgtcgcattgagtggtgcagtttatgcaatcgtatcaaatatgacaaacatttatactggtgcaatgattgcattatggttaaacgcaggtatgggaatattatcattcgttatcattttgttacttgtgcctaaacaaaacgacactcaattatga

SEQ ID NO: 418481 - DNA, 453 bp, Staphylococcus aureus
atgggtaaaaaggcattagagtcaatcattgataacgctgatgaaacaactcaagagcgtttacgttcaggatatgaagatgctgtagattataaccgttatgtcggtaatatttatactggatcattatatttaagcctaatatcattacttgaaaatcgtgatttacaagctggtgaaacaatcggtttattcagttatggctcaggttcagttggtgaattttatagtgcgacattagttgaaggctacaaagatcatttagatcaagctgcacataaagcattattaaataaccgtactgaagtatctgttgatgcatatgaaacattcttcaaacgttttgatgacgttgaatttgacgaagaacaagatgctgttcatgaagatcgtcatattttctacttatcaaatattgaaaataacgttcgcgaatatcacagaccagagtaa

SEQ ID NO: 418482 - DNA, 405 bp, Staphylococcus aureus
gtggcactacctacatcttttttatttttagctctactagaaaaaattactgcaccttcgataccgataaacacccaaactgtcactagcatcgtacttttaacttggctcattgtgctcgcccaactaaatggcaatacaccctctgacgtcataccgaaaaagcctgttttaaaagtgtcaaaattgaatgcaattatcatgcatatgattacaagtaaaatcgggattaactttgcaacagtaacaatactattgataaatgctgctgtttcaacgccttttaaaatcaagaaatggacaccccagagtagtaacgaggcgacaataatacttggtaatgtgttgcctcctttaaaaatcgggaaaaagttacctactgctgacatcaatagtgttgcatag

SEQ ID NO: 418483 - DNA, 867 bp, Staphylococcus aureus
atggggaaaaaacagaacagaaaaactggaaactctaaaaatcagagcacctctcctcctccaaagggacacagctcctcaccagcaacggaacaaagctggacggagaatgactttgacgagttgagagaagaaggcttcagaaagttggtaataacaaacttctccgagctaaaggagcatgttctaacccaatgcaaggaagctaagaaccttgaaaaaaggttagaggaattgctaactagaataaccagtttagagaagaacataaatgacctgatggagctgaaaaacacagcacgagaacttcatgaagcatacacaagtatcaatagccgaatcaatcaagcagaagaaaggatatcagagattgaagatcaacttaatgaaataaagcatgaagacaagattagagaaaaaagaatgaaaagaaatgaacaaagcctccaagaaatatgggactatgtgaaaagaccaaacctacgtttgattggtgtacctgaaagtgatggggagaatggaaccaagttggaaaacactcttcaggatattatccaggagaacttccccaacctagcaagacaggccaacattcaaattcaggaaatacagagaacgccacaaagatactcctcaagaagagcaaccccaagacacataattgtcagattcaccaaggttgaaatgaaggaaaaaatgttaagggcagccagagagaaaggtcgggttacccacaaagggaagcccatcagactaacagcggatctctcggcagaaccctacaagccagaagagagtgggggccaatattcaacattcttaaagaaaagaattttcaacccagaatttcatatccagccaaactaa

SEQ ID NO: 418484 - DNA, 1893 bp, Staphylococcus aureus
atggtaaagggatcaattcaacaagaagagctaactatcctaaatatatatgcacccaatacaggagcacccagattcataaagcaagtccttagagacctacaaagagacttagactcccacacattaataatgggagactttaacaccccactgtcaacattagacagatcaacgagacagaaagttaacaaggatatccaggaattgaactcagctctgcaccaagcggacctaatagacatctacagaactctccaccccaaatcaacagaatatacattcttctcagcaccacaccacacttattccaaaattgaccacatagttggaagtaaagcactcctcagcaaatgtaaaagaacagaaattacaacaaactgtctctcagaccacagtgcaatcaaactagaactcaggattaagaaactcactcaaaactactcaactacatggaaactgaacaacctgctcctgaatgactactgggtacataacaaaatgaaggcagaaataaagatgttctttgaaaccaatgagaacaaagacacaacataccagaatctctgggacacatttaaagcagtgtgtagagggaaatttatagcactaaatgcccacaagagaaagcaggaaagatctaaaattgacaccctaacatcacaattaaaagaactagagaagcaagagcaaacaaattcaaaagctagcagaaggcaagaaataactaagatcagagcagaactgaaggagatagagacacaaaaaacccttcaaaaaatcaatgaatccaggagctggttttttgaaaagatcaacaaaattgatagaccgctagcaagactaataaagaagaaaagagagaagaatcaaatagatgcaataaaaaatgataaaggggatatcaccaccgatcccacagaaatacaaactaccatcagagaatactataaacacctctatgcaaataaactagaaaatctagaagaaatggataaattcctggacacatacaccctcccaagactaaaccaggaagaagttgaatctctgaatagaccaataacaggatctgaaattgtggcaataattaatagcttaccaaccaaaaaaagtccagaaccagacggattcacagccaaattctaccagaggtacaaggaggagctggtaccattccttctgaaactattccaatcaatagaaaaagagggaatcctccctaactcattttatgaggccagcatcatcctgataccaaagccgggaagagacacaacaaaaaaagagaattttagaccaatatccttgatgaacatcgatgcaaaaatcctcaataaaatactggcaaaccgaatccagcagcacatcaaaaagcttatccaccatgatcaagtgggcttcatccctgggatgcaaggctggttcaatatacgcaaatcaataaatgtaatccagcatataaacagaaccaaagacaaaaaccacatgattatctcaatagatgcagaaaaagcctttgacaaaattcaacaacccttcatgttaaaaactctcaataaattaggtattgatgggacgtatttcaaaataataagagctatctatgacaaacccacagccaatatcatactgaatgggcaaaagctggaagcattccctttgaaaactggcacaagacaaggatgccctctctcaccactcctattcaacatagtattggaagttctggccagggcaatcaggcaagagaaagaaataaagggtattcaattaggaaaagaggaagtcaaattgtccctgtttgcagacgacatgattgtatatctagaaaaccccatcgtctcagcccaaaatctccttaagctgataagcaacttcagcaaagtctga

SEQ ID NO: 418485 - DNA, 573 bp, Staphylococcus aureus
gtgcaaaaatcacaagcattcttatacaccaacaacagacaaacagagagccaaatcatgagtgaactcccattcacaattgcttcaaagagaataaaatacttaggaatccaacttacaagggatgtgaaggacctcttcaaggagaactacaaaccactgctcaatgaaataaaagaggacacaaacaaatggaagaacattccatgctcatggataggaagaatcaatatcgtgaaaatggccatactgcccaaggtaatttatagattcaatgccatccccatcaagctaccaatgactttcttcacagaattggaaaaaactactttaaagttcatatggaaccaaaaaagagccctcattgccaagacaatcctaagccaaaagaacaaagctggaggcatcacactacctgacttcaaactatactacaaggctacagtaaccaaaacagcatggtactggtaccaaaacagagagatagatcaatggaacagaacagagccctcagaaataacgccgcatatctacaaccatctgatctttgacaaacctgaaaaaaacaagtaa

SEQ ID NO: 418486 - DNA, 357 bp, Staphylococcus aureus
ttggtcatccatgctggtgcttatgccaaggatggagaagtctttatccttgatatgggcaaaccagtcaagatttatgacttggccaagaaaatggtgcttctaagtggacacaccgaaagcgaaattccaatcgttgaagttggaatccgcccaggtgaaaaactctacgaagaactcttggtttcgaccgaattggttgataaccaagttatggataagattttcgttggtaaggttaatgtcatgcctctagaagccatcgatcaaaagattgaagagttccgcactctcagtggagatgagttgaagcaagctattatcgcctttgccaatcaaaccacccacgttgaataa

SEQ ID NO: 418487 - DNA, 282 bp, Staphylococcus aureus
atgggacgcagtcttaaaaaaggacctttcgtcgatgagcatttgatgaaaaaagttgaagctcaagctaacgacgaaaagaaaaaagttattaaaacttggtcacgtcgttcaacgatcttcccaagtttcattggttacactatcgcagtatacgatggacgtaaacatgtacctgtttacatccaagaagatatggtaggtcacaaacttggtgaatttgcaccaactcgtacttacaaaggtcacgctgcagacgacaagaaaacacgtagaaaataa

SEQ ID NO: 418488 - DNA, 318 bp, Staphylococcus aureus
atgttcggtgaagagcgtcagattcgtctgcgtccatcttatttcccattcacagagccatctgttgaggtggatgtttcttgcttcaagtgtggtggagaaggctgtaatgtatgtaagaaaacaggttggatcgagattatgggtgccggtatggttcacccacgagtccttgagatgagtggtatcgatgcgactgtttactctggatttgcctttggtcttggtcaagagcgtgtagctatgctccgttacggaatcaacgatatccgtggattctaccaaggagatgtccgcttctcagaacagtttaaataa

SEQ ID NO: 418489 - DNA, 204 bp, Staphylococcus aureus
atgcaacgtgccaaaatcattacagaaggtgcaggagctttacctacagcagctattttaagtgggaaaattgataaaaaatggctagagggtaaaaatgtcgttgcattagtttcaggaggaaacgttgacttaactagagtttctggtgtcattgaacatggcttaaatatcgcggatacaagtaagggtgtggtaggttaa

SEQ ID NO: 418490 - DNA, 258 bp, Staphylococcus aureus
atgctcaaacgagaccaaaagagtcaggaagactttgttgtccgtggtatccttgatggctatctactttacgaggataaaatcgttctgttcgactataagacagaccgctatgatgaaccaagtcaactcatagaccgttatcgtggtcagttatccctatacggagaggctttatctcgagcctattcgattgaaaatattgacaaatacttgattttactcggtaaagacgaagttcaagttgtaaaagtataa

SEQ ID NO: 418491 - DNA, 261 bp, Staphylococcus aureus
ttggcctacgctatcggtgttgcccaacctgtttctgttcgtatcgatacctttggtacaggaagtgtagctgaaagcaagctcgaaaaagcaactcgtcaaatctttgaccttcgccctgcagggattatccaaatgctggaccttaagcgtccaatttaccgtcaaacagcggcttatggacacatgggacgtacagatattgatcttccatgggaacgtttggacaaggtagatgctttgaaagaagcagtcaaataa

SEQ ID NO: 418492 - DNA, 264 bp, Staphylococcus aureus
atgcaaaccgctaagattacagaaaagaacggttctcttgcaggtcttttgactgttaaaggtgatgaagacctgatgattatcactgatacaggtgtcatgattcgaaccaacgttgccaatatttcacaaacaggacgctcaactatgggagttaaagtaatgcgtctggatcaagatgctaaaattgtaacctttactacggttgcagcggcagaaaaagaagaagttgggacagaaaacgaaacagaaggtgaagcataa

SEQ ID NO: 418493 - DNA, 288 bp, Staphylococcus aureus
atggaacggactcgaatggaatggactggaatggaatggattgaacggaatggactggagaggaatggactcgaatggaaaggaaacgagtggaatggaatggagtggaatggcttgaaatggataagaaatgaaaagaatgtaatggaatcggatggaatggaattgaatgtattggagtcgagtagaacagaattgaatggaatggcatcaaatggaatggaaacgaaaggaatggaattgaatggactcaaatgttatggaatcaaagggaatggactcaagtag

SEQ ID NO: 418494 - DNA, 156 bp, Staphylococcus aureus
atggcccaacgcaataacgagaaatgttgccaacagctctcagagcgaatccgcgaaaatttcccacaggcggatattaaaattctcccaacatctggtctctgcagtttttatgcagaagatggtggtttgctgatgggatatgaaattgattaa

SEQ ID NO: 418495 - DNA, 264 bp, Staphylococcus aureus
atgacaaaacaaaaaattaatcgaatcgtaggttctattggtgcctttattggaattatagtatttattgcctacatacctcagattatcgctaatttacagggaaataaagctcaaccatttcaacctttatcagctgcaatatcttgcttaatctgggttatttatggatggacaaaggaacctaagaaggattggatactaatcattccaaattcagctggtgttattttaggtggaatcacttttttgacttcactctaa

SEQ ID NO: 418496 - DNA, 294 bp, Staphylococcus aureus
atggactggaatggaatggacacgaatggaatggactggagtggaatggacacgaatggaatggaagcgaatggaatggaatggaatgaaatggaatggaatggaatggaatggaatgcccttgaattaaatggactggaatggaatggactcgaacagagtggaatggaaagtgttgagatagaatggaatggactcctttggaatggtctagtatgcaatgcaatcgactggcagggaatcaaaaggaatgtaatggaatggattggactcgaatgcaatggactcgaatag

SEQ ID NO: 418497 - DNA, 132 bp, Staphylococcus aureus
atgttgtcagaagaagcagaaaaagaacgaatttttttagagttgcaggcagaaataaaggcaaatcttgaagcctacgaaagaggggaatatattaccctagaggaactggaggagattttgaagaaataa

SEQ ID NO: 418498 - DNA, 198 bp, Staphylococcus aureus
atgaaatggaacgaagtggaatcgagtggaatggaatcgaatggagtgaaatggaatggaatggacgcgaaaggaatggactggaacaaaatgaaatcgaacggtaggaatcgtacagaacggaaagaaatggaacggaatggaatgcactcgaatggaaaggagtccaatggaagggaatcgaatggaatgaaatag

SEQ ID NO: 418499 - DNA, 144 bp, Staphylococcus aureus
atggaatcgaatggcaagaaatcgaatgtaatggaatcgcaaggaattgatgtgaacggaacggaatggaatggaatccaaaggaatggaatagaatggaatggaatcgaatggaaaggactcgaatggaaatcactcgaatag

SEQ ID NO: 418500 - DNA, 150 bp, Staphylococcus aureus
gtgatttatcaagaagcggcagaaaaagtatttgcccaaggaattgttgcgggaattgctaatggtgtatctgtagctattgcaggaactcttctcttgcttgcctatgcaggaactcaaactcgtgcaggaagtttgaaaaaggactaa

SEQ ID NO: 418501 - DNA, 180 bp, Staphylococcus aureus
gtgggacgcccaattccttaccgcatcgtagaacgtcgcccaggtgatattgcagcctgctattcagaacctgcaaaagccaaagcagaactcggctgggaagcagaactcggcatcacccaaatgtgtgaagatgcatggcgttggcaaagtaagcatccaaatggatttgaagactaa

SEQ ID NO: 418502 - DNA, 177 bp, Staphylococcus aureus
atggattttatacatgtcgatatacttcaaaaagctatagcgagtaaattaaaagcgtctgagggctttatgacgttggtttggtatattgcttatggattaccttatattcttgcaataggtgggtttatttatctttatgagtggattagaaagaaattcgaagtctttttataa

SEQ ID NO: 418503 - DNA, 150 bp, Staphylococcus aureus
atgacacaagacatgaaagagaaacgtgataaacgtgtaaactttaaagccactgaaactgaattaaaacaatatcaagaattagcagataagaagggcttaacattgagtgcatatcttcgcctcttattatctgaacagttaaattaa

SEQ ID NO: 418504 - DNA, 180 bp, Staphylococcus aureus
atgcaatggaatctaatgaaatggaaaggaaaggaatggaatggaatgggctggaatggaaaggaatcgaaacgaatggaatggaatcgaactgaagagactggaatggaatgcactggaatggaagggagtgtaatggaaggttctcgaaaaaaatggaatggaatggaatggaattga

SEQ ID NO: 418505 - DNA, 2403 bp, Staphylococcus aureus
ttgtcagaagctacagaattactgaatagcgagtacttagtagataatgatttgaaagcggacttacaagcaagtttagacgctgtgattgatgtttataatcaaattaaaaataatttagaatctatgacacccgaaactgcaacgattggtcggttggtagatacacaagctttatttcttgagtatagaaagaaattacaagatgtttatacagatgtagaagatgtcaaaatcgccatttcagatagatttaaattattacagtcacaatacactgatgaaaaatataaagaagcgttggaaataatagcaacaaaatttggtttaacggtgaatgaagatttgcagttagtcggagaacctaatgttgttaaatcagctattgaagcagctagagaatccacaaaagaacaattacgtgactatgtaaaaacatcggactataaaacagacaaagacggtattgttgaacgtttagatactgctgaagctgagagaacgactttaaaaggtgaaatcaaagataaagttacgttaaacgaatatcgaaacggattggaagaacaaaaacaatatactgatgaccagttaagtgatttgtccaataatcctgagattaaagcaagtattgaacaagcaaatcaagaagcgcaagaagctttaaaatcatacattgatgctcaagatgatcttaaagagaaggaatcgcaagcgtatgctgatggtaaaatttcggaagaagagcaacgcgctatacaagatgctcaagctaaacttgaagaggcaaaacaaaacgcagaactaaaggctagaaacgctgaaaagaaagctaatgcttatacagacaacaaggtcaaagaaagcacagatgcacagaggaaaacattgactcgctatggttctcaaattatacaaaatggtaaggaaatcaaattaagaactactaaagaagagtttaatgcttctaaaagaacactatcaagattgttagcagacatcactgtaaatgctatgaaaggcatctatttaaggtatgacgaaaatggggcgattacttcacatactattgataaagatggcgtgaaaattagtggcgataaagttgatataacagcgaatagagaatttaatgtagtcgcaaataatattaataacaaagttggtaaaaatgacattgttaatagcctaaacttatcaaatgaaggtcttgacatcaatgtgaatagaattggtattaaaggcggaaatgctaaccgttatgtacaagttcaaaatgattttattgaacttggcggaatcgtacaacgaacttggaaaggcaaacgatcaaccgatgatatattcacacgtcttaaagatggacatctaaggtttagaaataataccgcaggcggttcactttatatgtcacattttggtatttcaacatatattgatggagaaggcgaagacggaggttcatccggtactattcaatggtgggataaaacttacagtgatagtggtatgaatggcataacaatcaattcttatggcggtgtagtcgctttaacatctgactacaatcgaattattatcgattcatatgcttcagctaatattgaaagtagagaagcgccgatatatttatctccgaacaccaaaaataaacctggtttaaaccgattcgcattcacattatcaaacgctgatagtgcatacgaaactgacggttatatcatgtttggttcagatgaaaactataagtacggtgctggattaagattttctaaacgtagcaataaaggattggttcaagtcgttaatggtgactatgctacaggcggagacactacaattgaatcaggtatgggcaaattcaacttagttaaacgaagagatggaaatagttacgttagcattcaaagttatgatttattggcggtaggttctgataatgctggcgatagagtcgcttctaattctatttataagcgtacttattcagcacctgctaacttacacattacttctgctggaacaattgggcgtgctacttctgccaaaaagtataaaatttcaatcgaaaaccaatacatcaatgaagacgatcagttcagtcattcaaaagagattttaaagcttccaattcgtacatggtttgacaaatatgaatcggaaataatggctaaagaattggaaagtggtaaaaagttatctgatgatacttttaaacttagtcgacatactggcttaatagcggaagaggttgaagaattaggatttaatgaatttgttatttatgatgacaacggagaaatcgaaggtatcgcatacgatagactttgggttcatttaatacctattattaaaaaccagcaatcaaaaatcgaaaaactggaggaattaataaatgaatga

SEQ ID NO: 418506 - DNA, 255 bp, Staphylococcus aureus
atgcatgacaaatattgggttgatgaaagtgttattagaatcattttccctgaagttagtgtgcatattgaagatttaagaagttatgaaatcgccggaaaaaattatatagatattgcctggttggcacggaagaaaggttatcaagttaccttaaaggatgacagtttatacttaactgatgaaacatatcattcagtgaaagcaaacacaaatgcatactatagatatgatcgagatagtatcacaagataa

SEQ ID NO: 418507 - DNA, 480 bp, Staphylococcus aureus
atggtagtagaaaaaagaaacccaatcccagttaaagaagcaattcaacgtatcgttaatcagcagagttcaatgccggcaattacggtagcacttgaaaaaagtctaaatcatatcttagcagaagatattgtagctacttatgatataccaaggtttgataaatcaccttatgatggttttgcaattcgcagtgttgattcacaaggggcaagtggtcagaatcgcattgagtttaaagtgattgatcatattggtgcaggttcagtttctgataaattagttggggatcacgaagcggtgcgtattatgactggagcacaaataccaaatggcgcagatgctgttgttatgtttgaacaaacgattgaactagaagatacatttacaattcgtaaaccattttcaaaaaatgaaaatatatctttaaaaggtgaagaaacaaagacaggcgatgttgttctaaaaaaggacaagtaa

SEQ ID NO: 418508 - DNA, 624 bp, Staphylococcus aureus
atgattcgtgccttagcagaaaaattaggtcttgaagttggtatttacaaaacacaaaaagatgatttagatagtggcatccaagtcgttaaagaagctatggaaaaacacgatatcgttattacaacgggtggagtttctgttggagactttgactatttacctgagatttataaggctgtaaaggcggaagtgttatttaataaagtagcaatgcgtcctggtagcgtaacaacggttgcatttgcagatggaaagtatttgtttggattatctggaaatccatcagcttgttttacaggatttgaactatttgtgaaaccagctgttaaacatatgtgtggcgcactagaagtcttcccgcaaataattaaagcaacattaatggaagattttaccaaggcaaacccattcacacgatttatacgtgctaaagcaacgttaacaagtgctggagctactgtagtaccttcaggattcaataaatcaggtgcggttgtagcgattgcacatgctaactgtatggtcatgttaccaggagggtcacgtggttttaaagcggggcatacagtagatattatattgactgaatctgacgctgctgaagaggaacttcttttatga

SEQ ID NO: 418509 - DNA, 246 bp, Staphylococcus aureus
atggatttattaatttttttagttccaattatttacacaataatattgcttgtagcagtttcttattcaattagttatatactattcatttacacttcgttattgagcggtaatggatttaaaaacacttttaaagttagttttattgctccttttatcgacaacaccacacgtacattttttattttaataatattattattgttattactatcaatgttgggactagttagtatttatatttaa

SEQ ID NO: 418510 - DNA, 726 bp, Staphylococcus aureus
atgcaaaacaacgatatgataagtaagattaatattctattacaaagcgatattcaaacaaatcaaattgctaatgacactggaataagcaaagtgactatctctaatttaagaaggaaaactgcggacatttctaaagcgacttttgaaactgtaaacaaattgtataactattatttagatagaaaagattacttagaactagctaaaacgattgaaaaagacattttaaacgtaaaacttccaaaagatgttcaaatttttataacaaaattaaaagaagcagttgataatataaacgatataacaaagtcactacatattagtgagataacgttagaaaaaagcttcacaatgtcaaaagataaaaaaagtacaaaactcatttctaaaataaaattagacgagctaattccgattcaaattaaacggaatacatttgcttatagtttaaaaatttcaagtgattttgtggaagataaaacgcctcttgataacataacagattttcaaattgatttttcttataatgatctagaaatcgatttaaaaagacatattcatcttggaaatagagtcgtattaataacttctaatttaaatgaacttggagaatctcaaactggaatatatgtgaacggaaataacggtgggtataattacgaattaaattttataagcatttctatttttagtaatgacagaaagggggataagtatgaataa

SEQ ID NO: 418511 - DNA, 990 bp, Staphylococcus aureus
atgaataatatagatgcttttaactctttggtttttacttttttaacaattttttcaatagtttatatttcggtaaattgttttaatcctaatttctttaaacatgatactagatatattccattgaacagagtattaaagttaggaattctcaactctttatatctaataataggaatatggcttttatctaaattctatagcgctttaattaactcgcatatttcacttgaaaagttaggagacgatagttttattattgctacctttttaacatcatcaatattgatatcattatttattttatcgttgtttttagttgtacttaaaactatcaaaatgttatttgtatatattaacttaaagaaagacaatatacctaataacttaagacacgtcttatataagaaaaactttgaaacagttattaacaattacaaactacttaaaatgagtgatgagaaagtatcgctctctgataaagaaattctacagttatctgctgttttatcaaatgctggtatgaacgaagatgtgcaggagatactaaaaataaaactatttaaacagaacacattctgggacgatatgttttctgtttttcctaaccaagcaaattacagcgtacaatgtagctctgaatatatatcttataatgaacagtttaaaacagccttacaaaagcacgctaaggttttcagatatatatatgtacctataattataatagctataattcaaatatacttcccaatattcaatttaattattaatacaagccctacaacaagagaaagaataatcgttttagtaattagtattatcataaatattatgcttataataaaatacaagacattaaaacgtatacacaaaaattccctaaatatagctaatgtaaaaattaaagcaagcaataccgataaagcgatatttacagctcaatgtatacttgcagtaacaactattatctgtttattaataagttaa

SEQ ID NO: 418512 - DNA, 222 bp, Staphylococcus aureus
atggctattcaaactgtaaatatctctttttcatcactcgtatttgtgggcattctatgtcttttaatatttgcaataaataaattgaagtggtgggggggtaaaaaattattttttatcgtatggaatatcatttctgcaatctttattctattaggaactatagtagctttgatcttcatagtatttacagcaatgctttttgcaagtggaaaagattaa

SEQ ID NO: 418513 - DNA, 447 bp, Staphylococcus aureus
atgaaaaatatagttggattcgtaatttttctaaccgtgatattacttttgtcgggttgttcaaaatctggaatagaagaaatatcacctaaggaagcacatgataaattaaaaaatcctaagaatgaatatgttatcgcaattagtgatttgagtagggctggagaagaacatatttataattctaaaaagattctagaaaaagtggcagaagaacaagggattaaaatttattacacgatttataatgtcaagaacgataagcatcaaaaagattggaatgagaatggggagtttttaggtgatacttcacgattatatttcgcaaaaaaaggcaagaaaatagatgatatggattatcaagatttagcagtgaaagacacgtccaacattgagttggcaatttcaaaattaaataagttcattgaaggaatagaaaagaggtag

SEQ ID NO: 418514 - DNA, 627 bp, Staphylococcus aureus
atgtcgttgtcgcaactaaccgttgtaccgcctttttctacttctcctaatgatttcatattactttttacagttggaacccaacgcgcattcatattacttggatcattagcagcacctacaggtgcatatttagatcctattttttcaggtgttgttaaccctttagagatgtataagtcatataaatttcttgcgccatcttctaatccgtcttctatagttttatatgttgaatcttgtattgatttgttacccattacagatagtgggttgttttgtcttgtcgcatttgcgccttttccccatccggattcagaagctataatcgccataaaaagtgaaggtggtattttgttctttttagcaatttcaacaattttttctgacttaccttctaacgcgccacctttagcgtttttttcaaatgtttgtagtcctccttcttttaggttacctcctacaacttcacaaccttttgacgatgatgtagcttgctcctgtttgtccttttctactctaaccgcagttataattgtcccaacaataacaatcgttaataaaatagaaaataacacagcacccaataatagccatatcttccataaagcaatattcgctttatga

SEQ ID NO: 418515 - DNA, 960 bp, Staphylococcus aureus; identical to SEQ ID NO: 415576

SEQ ID NO: 418516 - DNA, 972 bp, Staphylococcus aureus; identical to SEQ ID NO: 415573

SEQ ID NO: 418517 - DNA, 645 bp, Staphylococcus aureus; identical to SEQ ID NO: 415567

SEQ ID NO: 418518 - DNA, 1242 bp, Staphylococcus aureus; identical to SEQ ID NO: 415565

SEQ ID NO: 418519 - DNA, 1455 bp, Staphylococcus aureus; identical to SEQ ID NO: 415557

SEQ ID NO: 418520 - DNA, 600 bp, Staphylococcus aureus; identical to SEQ ID NO: 408072

SEQ ID NO: 418521 - DNA, 222 bp, Staphylococcus aureus; identical to SEQ ID NO: 408076

SEQ ID NO: 418522 - DNA, 444 bp, Staphylococcus aureus; identical to SEQ ID NO: 408078

SEQ ID NO: 418523 - DNA, 579 bp, Staphylococcus aureus; identical to SEQ ID NO: 415542

SEQ ID NO: 418524 - DNA, 840 bp, Staphylococcus aureus; identical to SEQ ID NO: 415540

SEQ ID NO: 418525 - DNA, 2139 bp, Staphylococcus aureus
atgaaaaagcaaataatttcgctaggcgcattagcagttgcatctagcttatttacatgggataacaaagcagatgcgatagtaacaaaggattatagtaaagaatcaagagtgaatgagaaaagtaaaaagggagctactgtttcagattattactattggaaaataattgatagtttagaggcacaatttactggagcaatagacttattggaagattataaatatggagatcctatctataaagaagcgaaagatagattgatgacaagagtattaggagaagaccagtatttattaaagaaaaagattgatgaatatgagctttataaaaagtggtataaaagttcaaataagaacactaatatgcttactttccataaatataatctttacaatttaacaatgaatgaatataacgatatttttaactctttgaaagatgcagtttatcaatttaataaagaagttaaagaaatagagcataaaaatgttgacttgaagcagtttgataaagatggagaagacaaggcaactaaagaagtttatgaccttgtttctgaaattgatacattagttgtaacttattatgctgataaggattatggggagcatgcgaaagagttacgagcaaaactggacttaatccttggagatacagacaatccacataaaattacaaatgagcgtataaaaaaagaaatgatcgatgacttaaattcaattatagatgatttctttatggagactaaacaaaatagaccgaattctataacaaaatatgatccaacaaaacacaattttaaagagaagagtgaaaataaacctaattttgataaattagttgaagaaacaaaaaaagcagttaaagaagcagacgaatcttggaaaaataaaactgtcaaaaaatacgaggaaactgtaacaaaatctcctgttgtaaaagaagagaagaaagttgaagaacctcaattacctaaagttggaaaccagcaagaggttaaaactacggctggtaaagctgaagaaacaacacaaccagtggcacagccattagtaaaaattccacaagaaacaatctatggtgaaactgtaaaaggtccagaatatccaacgatggaaaataaaacgttacaaggtgaaatcgttcaaggtcccgattttctaacaatggaacaaaacagaccatctttaagcgataattatactcaaccgacgacaccgaaccctattttagaaggtcttgaaggtagctcatctaaacttgaaataaaaccacaaggtactgaatcaacgttgaaaggtattcaaggagaatcaagtgatattgaagttaaacctcaagcaactgaaacaacagaagcttctcaatatggtccgagaccgcaatttaacaaaacacctaagtatgtgaaatatagagatgctggtacaggtatccgtgaatacaacgatggaacatttggatatgaagcgagaccaagattcaacaagccaagtgaaacaaatgcatacaacgtaacgacaaatcaagatggcacagtatcatacggagctcgcccaacacaaaacaagccaagtgaaacaaacgcatataacgtaacaacacatgcaaatggtcaagtatcatacggtgctcgcccaacacaaaaaaagccaagcaaaacaaatgcatacaacgtaacaacacatgcaaatggtcaagtatcatatggcgctcgcccaacacaaaaaaagccaagcaaaacaaatgcatataacgtaacaacacatgcaaatggtcaagtatcatacggagctcgcccgacatacaagaagccaagcgaaacaaatgcatacaacgtaacaacacatgcaaatggtcaagtatcatatggcgctcgcccaacacaaaaaaagccaagcaaaacaaatgcatataacgtaacaacacatgcaaatggtcaagtatcatacggagctcgcccgacatacaagaagccaagcgaaacaaatgcatacaacgtaacaacacatgcaaatggtcaagtatcatatggcgctcgcccgacacaaaaaaagccaagcgaaacaaacgcatataacgtaacaacacatgcagatggtactgcgacatatgggcctagagtaacaaaataa

SEQ ID NO: 418526 - DNA, 2262 bp, Staphylococcus aureus
atgacaattaataaagtaaccgttcttggcgcaggcacgatgggcgctcaactggcagcactctttgtgaatgctggacttaaagtaaaactattagatattgtagtggacaaaaacgatccaaatctcattgcgaaaaaatcttacgataaaattacagataagaaacggccgctactattcgacttaaatctagtgagtcatttaacatatggtaattttgatgatgacttggtaaatgatgatgctgatttatatatcgaagcagtcaaagaagatattgaaattaagcatgctgtttggcaacaagttctacaacatgctaaagaagatgctttatttgctacaaatacatcaggtattccaattaatgcgattgctcaagcatttaacgagaaggatcaagaacgattctttggtctacatttctttaacccaccacgtattatgaaattagtggagttaatacctacgtcacacacgaaggaatctatcatattagatgtaaaaaatttcgcgcaaaatgtattaggtaaaggtgtcattgtcgtcaatgatgtgcctggctttgtcgcaaatagagtcggcacgcaaacaatgaatgatattatgtatcgcgccgagcaacacaagttaagcattgtagatgtggatgctttaactgggcaagcgattggtcgtcctaaaacaggtacatatgccctatccgacctagtcggtttagatattgcagtgtctgtaattaaaggcatgcaacaagtacctgaagaaacgccttattttcatgatgtcaaaattgtaaatacgttgtttgacaatggcgcactcggacgtaaaacgaaacaaggattttacaaaaaggataaagaaactaaagctcgacttgtttacgatgttgaaaaacaagattatgtacctgtatcgcaaccacaattaccaattttaaatgaatttaataaagacttagtgcataaccttgatgtcatattcaatgcgcaagacgaagcgggactatttttatgggagacattacgtaataatttctattactctgctatcaatgtacctaaagctaccgatgatttccgagacatagaccgtgcgcttgtctgggggttcaactggaaacttggtccattccaattatgggatgcaatgggatacgaacgtgttaaaacacgtatggaagacgaacttggagacttaccacaatggattagtgatttagatggtggcttttataaacaagatgagaccattgaatatgcaacacctgtttctcacttcgtaaaagatgaactttgggataaaggtgatgccaaactttccgtaactcatgatgatcaactgttactgaaattacaaagtaaaaataatgtcattaccgatgaattcaacgatgcgttagttgatgccattgatttactggaaaatgaccattacacaagtatggtcatttatgcagatggtaataatttcagtgtgggtgctaaccttttcttaatgaaaaaggcgcatgaagacggtcttgtagatgatgtcgttgcacaatcaattgataaattacattatagctttaatcgtttgaagtatagtttgaaaccagtagtcacagctgttcaaggtcgtgccttaggcggtggctgtgagcttgtactttactcacctattgttgtcgctgcaagtgaaacatatataggtcttgttgaagcaggcgttggcttattaccgagtggcggtggccttgcagaaatggctgatcgcatattacgcacatcgcataagtttgatgacaaacaagcttccatgacaaaagtactgacgaatatcgcatttgcgaaagtctctacaaatgcctttgaggcacgtcgttatggttatttacgtgatacagatacgattattttcaatacagcacaacgtgtcgaagttgcgctcaaacgtgcgaaatatgaagcagaaacaaactatattccgaatcctagacatcaatatatcgctttaggtgaagacttcaaagcattgatccaaggacaattagatgcgcaaagacgggggcattttattagcgaccatgattatcatatcgccttaaatatcgccacaattttagcgggtggtgatttaccaagaaatacatttataaatcaacgttacattcaatcgttggagaaaattggctttattgacttactaaaatctaaaaaatcatatgaaagaattgcacatatgttaaaaactggtaagccattacgtaattaa

SEQ ID NO: 418527 - DNA, 1230 bp, Staphylococcus aureus; identical to SEQ ID NO: 415474

SEQ ID NO: 418528 - DNA, 1146 bp, Staphylococcus aureus; identical to SEQ ID NO: 415523

SEQ ID NO: 418529 - DNA, 2097 bp, Staphylococcus aureus; identical to SEQ ID NO: 415521

SEQ ID NO: 418530 - DNA, 147 bp, Staphylococcus aureus; identical to SEQ ID NO: 413354

SEQ ID NO: 418531 - DNA, 1167 bp, Staphylococcus aureus; identical to SEQ ID NO: 415508

SEQ ID NO: 418532 - DNA, 294 bp, Staphylococcus aureus; identical to SEQ ID NO: 405170

SEQ ID NO: 418533 - DNA, 4440 bp, Staphylococcus aureus; identical to SEQ ID NO: 408083

SEQ ID NO: 418534 - DNA, 696 bp, Staphylococcus aureus
ttgtctgagtccgaatcgctatctgaatctgagtcgctatccgaatctgaatcgctgtctgaatctgagtcgctgtctgagtctgagtcactgtctgaatctgagtcgctgtctgaatctgagtcgctatctgagtctgagtcgctatccgaatctgattcgctgtctgaatctgagtcgctgtccgaatctgaatcactatctgagtctgagtcgctatctgagtctgaatcactgtctgaatctgagtcgctatctgagtctgaatcgctgtccgaatctgagtcactatctgagtctgaatcgctgtctgaatctgagtcgctatctgagtctgagtcgctatctgaatctgaatcactgtctgagtctgagtcgctgtccgaatctgagtcgctgtctgaatctgaatcgctatctgagtctgagtctgaatcgctatctgaatctgagtcgctgtctgaatctgaatcactgtctgaatctgaatcgctgtctgaatctgaatcgctatctgagtctgagtcgctatctgagtctgaatcgctgtctgagtctgagtcgctatctgagtctgaatcgctgtccgaatctgagtcgctatctgagtctgagtcgctgtctgaatctgaatcgctgtctgagtctgaatcgctatctgaatctgagtcgctatctgatgtttcttcttcgtag

SEQ ID NO: 418535 - DNA, 327 bp, Staphylococcus aureus
atgattagtaaacaaataaaggatttacgaaagcaacataattatactcaagaagagctagctgaaaaattaaatacttcaagacaaacaatttctaaatgggaacaaggtatttcagaaccagacttaattatgcttatgcaattgtcacaattattttctgttagtacagactatctcattacaggaagtgacaatattattaaaaaagataataaaagctattatgaaatgaatttttgggcatttatgtctgaaaaatggtgggtaattattattatagtaatcataatttgtggaacaataggacaaattttttcaaactaa

SEQ ID NO: 418536 - DNA, 834 bp, Staphylococcus aureus
atgaaaatcaaaaaattattaaagacattattaattattttattatgttttgtattgtctgttattgtgcaaaatatttcaatgctatggcatattgtgagcatttggagtgttgaatatattttacatgcattaacttatatagtactttcatacttttcagtaaaatggttcattgaaattgtgcttaaaagcaatatgaaagattatagaataataccggtgaaatttttcaagtcttgttttcttataggattaattttgatattagtaattgatttaatatatctattatttattcctggtaaattgataatacctcattattcaacaagcgttggatttatggagatgttctttagcgcatttttaattactggtattgctgcgcctatatttgaagagatggtatttcgaggaatactaatgagatactttgaaaaacaatatggaattttatttggaattataataccctcgattttattttctcttgttcatctatttaatggagagttaaagggagaaaatttattattactacttataggtggctcaattgctggaataatgtatgcagtgactgcatggacgtttaatagtatatgggcctctgctatattacatatgctttggaatataaatggtttattaaatatcacaactcaagatgatcattggggagtatatcagtacatattagaaacaaaaaatgtactgattacaggtggggattatggtatggatacatcattactttcaatatgtagttatattgcagttattatagttatgattgttactaaaagacactttaactttttactaaagtaa

SEQ ID NO: 418537 - DNA, 165 bp, Staphylococcus aureus
atgaatatctatcaaacctatgcatgcttagtcataggaataatcgttaatagtactactactatactaaaaagaaaaaaattaatttcaaatattaaacaactttggaaaagtaaaaagactttagaagaatttatacgttcaaattcgagatttgattattag

SEQ ID NO: 418538 - DNA, 774 bp, Staphylococcus aureus
atgaatgatttgttaaaaatttatgaaaaattgaaaaaagatattgaaaacaggtggttaataccatttcattatgtggtttttggattagcattagttgtatattttctggaaattcctatttataaattggtgaataacttagataaagagcttgttgataaggttttatatgctttttcattagtgtatgatcacattgtattgatatttatattaattataattatcattttgatagtttatttattctttgatgtgtttaatatgaatcgttttgttccatcgcctacaacttatgtagatggtagtgaaagttctataaactatgtaagtgctattaaaagattgataaactttatgatattaattatcacaaagtactggataacttactttattgtaaacttaatatttcataatgataaattactgtatttaaacaatgattcaaaacatttgtataagtgtctcttgtttttaaatatctgtatctttatagtgcatatattaaaatcaatttttataataaaaattatggcagatgattcgctaagacttattaatgaaaatgatttaactgatttttacataacattaaataaaaatgatgaatatcgtatggtaaaacctaaatatagaaaaatagataattttattattattaaaaaaagtgaagatttcactaattcaaatgagtataaagttattaataaaagtaaaaattttgaggaaataatttatcattttgacaatcttacttcaaatcattga

SEQ ID NO: 418539 - DNA, 360 bp, Staphylococcus aureus
gtggaaaatacaaatagtaatatgcataaaaatgacaatagttacgttttatcagcattgagttatttaagtatctttttcgcacctgtcattttacctttatttgtatggatacttgctgatgagccaacatcaggacatggtaaaaaagcattagggaatcatattatgacatggattagtttttgtgtaggcagaggaatttttattttttcaaaaggagtctttgataaaccgtttgatcatcaattattaatatttgttattgctttaatcattgctattgtattctttttaattgctttaatattatatattctcaacattatcagaggaattaaaattttattaaaaaaataa

SEQ ID NO: 418540 - DNA, 1359 bp, Staphylococcus aureus
ttgaaacgatcaacgaatcaagaaaaatttcttgatacactaattagacttaatactaagattgaagaactaggaaagataaatattttaaataatcatatatattccgaatatttttttagagacctgttaaatattgtatatgggtattcacttgagaatcataataaaaaacaaaaaaatgcaccagcatttgatcttatagataatacgaataaaattattattcaagttaccgcaacgtgtaaaaagcaaaaaatagaggacactctaaaaaaagagtatttaacaaataaaatggaagaaggttatcgattaaagtttatatttattggaaatcaaaataataatattaaaaataagaatttttcaaatccacataatatattattcgatagtaaaaaagatattattttaactcaagacttatgcgaagagtttttgaatttaaacataaataagcaagatcacgctattgaattattaaaaaaagaattatctccgcttttatttgaagattctttgtcatatttaaaagaagaatttattaatgaaaaattagaatttaatatatcgaatttagcttcacgatatactgcgaataatgatgtcgatactattaataataaaattatagaaggtatttctattaccaataattttaaatatactaatatttcatatctaaaagaattaaaaggttatatcgaaaatgatattttagataagatgaaatcaaaatacgcaaagaatatttatttgaatttcaaaaaaatattctctaatttagaacaatcagtcaataattatttggaactggaagaagagtttgaagaaaagaaaaaatacttaagtgaaatttatgaattgatagacgaaattaatattgacccttatatttttctgacagaacataatgaatgtaatatatacaaaataagtgagaatgaaaaattagaacttcaaacttatatgagtaaaatcgaaaaagtattattaaaatatcaaacgtatttaaaagaaacatgtaaagaatgcttgttttatccttatttgctagttcaaggtgaagctggcataggaaaatcacaccttttagcgcatctatctaaaaaacttagagatgaaaatcatattatttatctgtttttgggacaattttttactaaaaatgaagatccatggcatcaaatacttaatgatttagaagttacaaattctgttgataattttttaaggtcaataagtaataaggccaaagaaacaaaaaaagagcttttattattattgatgcgcttaatgaaggtgaaggtaaaaggttatggggaaattattttcaaagctttatcaaccatataa

SEQ ID NO: 418541 - DNA, 546 bp, Staphylococcus aureus
atggaagaaaagaactcacaagaacaacataggcaacaatgggagcaatttcaagagtatcaaaagcaacaagatgaggaaaagaagaaaaagcgcaaaaaaggttggttatttggctgtggtggctgtctagtcttattaatattaattataataggaatttctgcttgcactggcgctttagtaaacgatgtaaataatggcggaagtgatagtaattcagaaactaaaattgataaaaatgctacacgtgagcaaaaatctgctttaaacaaagctaaaacatattctagtgtgatgcatatgtctaaagatggcatttataatcaattaatatctgaagctgatggttttaaagaagctgacgctaaatatgctgttgataatttgaaagcagactataaaaagaacgctttagcaaaagctaaagattatgcaaaaacacaaaacatgtctaatgatgccatttacaatcaacttacttcaagtgttgaaggattcacagaagaacaggcacgttatgcagtagataatttagataaataa

SEQ ID NO: 418542 - DNA, 732 bp, Staphylococcus aureus
atgggtattggtgaaggtttaaagaagctaagaaaaaataaaaatatgactatggaacaattagcaactgatcttaataataaatatcccgacttaatgaaattaacgaaaggcaagatatcaaaatgggaaaatgaaaaggaagaacctcgattatcaactgccaaaattttggctgagtacttcaatgtgaagattaatgatttgtatagtgaatcaaatactacatacaaagacgataacgacatcacttccatatacaataaactcacacctccaagacaaagcaatgtactaaaatatgcgactaatcaattagaagagcaaaataatgacagtgataatctggtagatttcaattcttacattcaagaaaaatccgaagtggatatatatggttgtgcgtctgctggtattggtgaaagattatataacgagcctatttcaaaagaattcgtaagaggttatgtccccgcacatgatatagctttaaaagtaaatggagactcaatggagccgttatttaaaaatggacaaattatattcattgaaaaatctcacactatcaaagatggacaaataggcgtctttattataaatggagatgcttacgtaaagaaggtttatgtagaagataacagattaacgttggtttctttaaataaaaagtataaagatttacatttttatgataatgaaagtgtgaggttagttggaaaagttattttatag

SEQ ID NO: 418543 - DNA, 213 bp, Staphylococcus aureus
atgtttgaaggaatgaaatattatccatctcaatttgccgctgcgtatatccaaaccttgccacatgcattgaggattgaagactttgatacagatgatgaattcaaagaatatcttgaaaatagacgtgagtcttatttttatgagtatctaaagtctcttgaatttgctaaaagtttttctaaacgagaagatgaaacgatagaagaataa

SEQ ID NO: 418544 - DNA, 402 bp, Staphylococcus aureus
atgaaaatcaaagtaaaaaaagaaatgaaactagatgaattaattaagtgggcgcgagaaaatccagggttatcaaagggcaaaaaattttttacaacaggtaacggcgatggcatcgttcgttttcaaaaggacacaaatgattgtacgccatcagtctgtgtgccacttgatgctcttttcgaagtcgaatatgaagaggaaatcacagaagaaacggtatttgataagttgtttgaagtgtacgagtttcaagaaggagattataccgctatatcacacgctaatattagtataaacaaacgtttagatgaacattgtttccctatcaaagcattctatatcttaaacgatgacctaactatgacgttaatctggaaagatggggagttgattaaataa

SEQ ID NO: 418545 - DNA, 276 bp, Staphylococcus aureus; identical to SEQ ID NO: 412438

SEQ ID NO: 418546 - DNA, 1578 bp, Staphylococcus aureus
atgacgtttcttacagtcatgcaatttatagttaacattatcgttgtaggcttcctgcttacggttattgttatcgggcttatttggttaattaaagataaaagacaatcacaacatagtgtattaaggaattatcctttactagcacgtattagatatatttcagaaaaaatgggaccggaattacgtcagtatttattttctggggataatgaagggaaacctttttcacgtaatgattataaaaatatcgttttggctggaaaatataactctcgtatgaccagcttcggtactactaaagattatcaagacggcttttacatacagaacacaatgtttccgatgcaacgtaatgagatttcagtagataatacaacattgttatcaacattcatttataaaatcgcgaatgagcgtttatttagtcgtgaagaatatcgtgtaccgacaaagattgatccgtattacttaagtgatgaccatgcaataaaattaggtgaacatttaaaacatccatttattttaaaacgtatcgtaggacaatctggtatgagttatggcgctttaggaaaaaatgccattacagctttatctaaaggtctagctaaagcgggcacttggatgaatacaggtgaaggtggcttatcagaatatcatttaaaaggtaatggggatatcattttccaaattggtcccggtttatttggtgttcgtgataaagaaggtaattttagtgaaggtttatttaaagaggtcgcacagttatctaacgtacgcgcatttgagctgaagttggcacaaggtgctaagactcgtggtggtcatatggaagctgaaaaggtaaacgaagaaattgctaaaatccgaaatgttgaaccttataaaacaatcaattcacctaaccgttacgaatttattcataatgctgaagatttgattcgtttcgtcgatcagttgcagcaattaggtcaaaaaccagtaggattcaaaattgtagtaagcaaagtttcagaaattgaaacacttgtacgtacgatggtggaactagataagtatccaagctttattacgattgatggtggtgaaggtggtactggtgcaacattccaagaattacaagatggtgttggcttaccgctatttacagctctacctattgtgtctggcatgttagaaaaatatggtattcgagataaagtgaaattggcggcatctggtaagttagtgacaccagataaaattgcgattgcactaggtttaggtgcagattttgtaaatatcgcacgtggcatgatgattagtgtcggttgtattatgagtcaacaatgccatatgaatacatgtcctgtaggtgttgcaacgacagatgcgaaaaaagaaaaagcattgattgttggagaaaagcaatatcgtgtcacaaactatgtaacaagtttgcatgaaggcttattcaatattgcagcagctgttggcgtatccagtcctacagaaattactgctgatcatattgtatatcgaaaagtcgatggtgagttacaaacgatacatgattataaattgaaattgattagttga

SEQ ID NO: 418547 - DNA, 456 bp, Staphylococcus aureus
ttgaaaaaattatgttcattaattgtagtagcattaatttgtatcattgcattatcagcttgtggtaaagaacaaaccaaaacatatgaaggtgatgttagtggtaaacatgtactaacttctatcacatataaagatgataaggttttaaaacagtctacaatcaacacaattaaatatgacgatctaggtatggataaagacgaagccaaaaagttattcgccaaatctgaaagtattttcaaagaccttaaaggcgtaaaatacaaagtagactataaagataaaaaagcaattgaacacttagacatagattacacagaagttgacatgaaaaaattaaataaacgtcttggtgtttcaactaaagaaaataaagatattagttttgaaaaacttgaaaagcaattaaagcacagaggtttaaaagaaaaagataaaatggacgacaaatag

SEQ ID NO: 418548 - DNA, 1188 bp, Staphylococcus aureus; identical to SEQ ID NO: 416042

SEQ ID NO: 418549 - DNA, 1227 bp, Staphylococcus aureus; identical to SEQ ID NO: 415077

SEQ ID NO: 418550 - DNA, 636 bp, Staphylococcus aureus; identical to SEQ ID NO: 415078

SEQ ID NO: 418551 - DNA, 696 bp, Staphylococcus aureus; identical to SEQ ID NO: 404955

SEQ ID NO: 418552 - DNA, 852 bp, Staphylococcus aureus; identical to SEQ ID NO: 415080

SEQ ID NO: 418553 - DNA, 1410 bp, Staphylococcus aureus
atggcaagaaaattgcatagagagttgaataacagacacatccaattgatagcaattgggggcgcaattggaactgggttattcctaggatcaggtcaaacaatatctttaactggtccatcactgttattcacatacatgattattggggttgtactattctcttttatgcgcgcattaggcgaattgttgttgagcaatacaagatttaattcatttgttgatattgcaaatgaatatttaggcccttttggtggctttgtcattggctggacttactggttatgttggattgtatcaagtatgtcagacctaactgcgatgggacaatactttgcattttggtatccacaagtcccaaattggattaccgtgctatttattgttttaatcttgattagcttcaacttattaggtgccagattatttggtgaactggagttttggttctctattattaaagttgtcacaattattgcgatggttatcgttggtcttgtattaatctttttctcatttaaaacacattatggacatgcatcattcacaaacttaatcagtcacggcggcatgttccctggaggaacatttggtttcctaatgtcattccaaattgctgtatattcattcattggtattgaacttataggtgtaactgctggtgaaacgaaagatcctgaaaaaaccttaccgaaagcaattaataatgtacctatccgtattttattattctatatcggtggtctattagtaattatgtcagtcataccttggaatgatatcgatccaaatagtagccctttcgttaaactctttacattaatcggcgtgccatttgcagcaggcgtcgttaactttgtcgtgctaactgccgcggcctctgctacaaatagtggtatctattcgaatagtcgtatcttattcggactgtcacaacaagggttaggtcctaaagttttaaataaaacgaatagtcatggcgtgccttatttatcaatattagtttcatcaattgcattacttatagcagccttgttaaactacattttccctaatgcaattcaactattcatatacgttacaacgttatcaactgtgttgtttttagttgtttgggcaatgattattgtcgcttatctaatgtatttgaaaaagcatcctgaggcacataaaaacagtaaatttaagttgattggtggtaagcctattgcttacattattctagcgttcttcttctttgtattcattttattattctttagtgacgaaacaagagcagctatttatatttcaccattctggtttatatttttatttttcttttataaaaaatacaaaacgaatgctgaaaagctcgcgtatgaacaacgacaaaatgacagcggtcatttcagatatgacaatcaataa

SEQ ID NO: 418554 - DNA, 657 bp, Staphylococcus aureus; identical to SEQ ID NO: 415085

SEQ ID NO: 418555 - DNA, 474 bp, Staphylococcus aureus; identical to SEQ ID NO: 413346

SEQ ID NO: 418556 - DNA, 1212 bp, Staphylococcus aureus; identical to SEQ ID NO: 415086

SEQ ID NO: 418557 - DNA, 1764 bp, Staphylococcus aureus; identical to SEQ ID NO: 415090

SEQ ID NO: 418558 - DNA, 978 bp, Staphylococcus aureus; identical to SEQ ID NO: 415096

SEQ ID NO: 418559 - DNA, 948 bp, Staphylococcus aureus; identical to SEQ ID NO: 410070

SEQ ID NO: 418560 - DNA, 1311 bp, Staphylococcus aureus; identical to SEQ ID NO: 416344

SEQ ID NO: 418561 - DNA, 1440 bp, Staphylococcus aureus; identical to SEQ ID NO: 416343

SEQ ID NO: 418562 - DNA, 729 bp, Staphylococcus aureus; identical to SEQ ID NO: 404986

SEQ ID NO: 418563 - DNA, 1251 bp, Staphylococcus aureus
atgaactttgtaacgttgacttcggatgagttcaatgcgtttacaacaaagcatttttcacattacacacaatcagctattcattacaatcatagagttgatttaaaaggcgatgtgcatcttgtaggggttaaagatgacaatggtcaagtgattgcaggatgcttattgacagaagcacgcacacttaaatttttcaaatatttttatacacatcgcgggccagtgatggattatacaaatcaatcattagtagcatttttctttaaagcattaacgtcatatttaaagaaacacaattgtttatatgtccttgtagatccatatttaattgaaaatttacgcaatgcagacggtgaaattgttaaatcttatgataaccgagcatttgttagaacaatggataaattaggttataaacaccaaggtttccctgtaggttatgattcaatgagccaaatccgttggctgtcagtgttagatttaaaagataagactgaagaccaacttttaaaagaaatggattatcaaacgagacgtaatattaaaaaaacatatgatattggtgtcaaaactaaaacgttaacgattgatgaaacgcaaacttttttcgacttattccatatggctgaggaaaagcacggtttcaaattccgtgagttaccatactttgaagaaatgcaaaagttatacgatgaccacgccatgttaaagttggcgtatattgatttaaacgagtatttaaaaacgttacaattaaagcaacaacaattaacagctgaactctcaggtgttgaagaagcattggaagaaagtcctaattcaaagaaaaataaaacgaaacgcacacagctagaacaacagctaaatagcaataagcgtaaaatcgacaatacaatagaacaaattgaacaagatggtgcagtcttaaacttagcttctgctttatttatctacaatgagcatgaagtttattacttatctagtggttcaaaccctaaatataatgcttatatgggtgcctaccatttgcagtgggaaatgattaagtttgctaaagcgcatcatattgatcgctataatttttatggtattaccggtgactattcagagtcatcagaagactatggcgtccaacaattcaaaaaaggttttaacgcacatgtagaagagtatatcggtgactttattaagcctatcaaaccattactatataaggtacaaacgtacttaaatcataaacgtcgttaa

SEQ ID NO: 418564 - DNA, 600 bp, Staphylococcus aureus; identical to SEQ ID NO: 415104

SEQ ID NO: 418565 - DNA, 267 bp, Staphylococcus aureus; identical to SEQ ID NO: 414968

SEQ ID NO: 418566 - DNA, 732 bp, Staphylococcus aureus; identical to SEQ ID NO: 415109

SEQ ID NO: 418567 - DNA, 453 bp, Staphylococcus aureus; identical to SEQ ID NO: 405006

SEQ ID NO: 418568 - DNA, 1035 bp, Staphylococcus aureus; identical to SEQ ID NO: 415117

SEQ ID NO: 418569 - DNA, 915 bp, Staphylococcus aureus; identical to SEQ ID NO: 415120

SEQ ID NO: 418570 - DNA, 1170 bp, Staphylococcus aureus; identical to SEQ ID NO: 415340

SEQ ID NO: 418571 - DNA, 366 bp, Staphylococcus aureus; identical to SEQ ID NO: 415123

SEQ ID NO: 418572 - DNA, 384 bp, Staphylococcus aureus; identical to SEQ ID NO: 415125

SEQ ID NO: 418573 - DNA, 624 bp, Staphylococcus aureus; identical to SEQ ID NO: 415128

SEQ ID NO: 418574 - DNA, 336 bp, Staphylococcus aureus; identical to SEQ ID NO: 415131

SEQ ID NO: 418575 - DNA, 1005 bp, Staphylococcus aureus; identical to SEQ ID NO: 417804

SEQ ID NO: 418576 - DNA, 516 bp, Staphylococcus aureus; identical to SEQ ID NO: 415132

SEQ ID NO: 418577 - DNA, 1599 bp, Staphylococcus aureus; identical to SEQ ID NO: 415134

SEQ ID NO: 418578 - DNA, 1479 bp, Staphylococcus aureus; identical to SEQ ID NO: 415135

SEQ ID NO: 418579 - DNA, 456 bp, Staphylococcus aureus; identical to SEQ ID NO: 415136

SEQ ID NO: 418580 - DNA, 555 bp, Staphylococcus aureus; identical to SEQ ID NO: 415145

SEQ ID NO: 418581 - DNA, 900 bp, Staphylococcus aureus; identical to SEQ ID NO: 413338

SEQ ID NO: 418582 - DNA, 327 bp, Staphylococcus aureus; identical to SEQ ID NO: 406338

SEQ ID NO: 418583 - DNA, 1662 bp, Staphylococcus aureus; identical to SEQ ID NO: 415162

SEQ ID NO: 418584 - DNA, 1314 bp, Staphylococcus aureus; identical to SEQ ID NO: 415164

SEQ ID NO: 418585 - DNA, 531 bp, Staphylococcus aureus; identical to SEQ ID NO: 406321

SEQ ID NO: 418586 - DNA, 1380 bp, Staphylococcus aureus; identical to SEQ ID NO: 415170

SEQ ID NO: 418587 - DNA, 873 bp, Staphylococcus aureus; identical to SEQ ID NO: 414990

SEQ ID NO: 418588 - DNA, 777 bp, Staphylococcus aureus; identical to SEQ ID NO: 416317

SEQ ID NO: 418589 - DNA, 1083 bp, Staphylococcus aureus; identical to SEQ ID NO: 415183

SEQ ID NO: 418590 - DNA, 1398 bp, Staphylococcus aureus; identical to SEQ ID NO: 415184

SEQ ID NO: 418591 - DNA, 837 bp, Staphylococcus aureus; identical to SEQ ID NO: 415189

SEQ ID NO: 418592 - DNA, 1716 bp, Staphylococcus aureus; identical to SEQ ID NO: 415193

SEQ ID NO: 418593 - DNA, 909 bp, Staphylococcus aureus; identical to SEQ ID NO: 415197

SEQ ID NO: 418594 - DNA, 771 bp, Staphylococcus aureus; identical to SEQ ID NO: 413324

SEQ ID NO: 418595 - DNA, 798 bp, Staphylococcus aureus; identical to SEQ ID NO: 415200

SEQ ID NO: 418596 - DNA, 234 bp, Staphylococcus aureus; identical to SEQ ID NO: 415210

SEQ ID NO: 418597 - DNA, 351 bp, Staphylococcus aureus; identical to SEQ ID NO: 414457

SEQ ID NO: 418598 - DNA, 1212 bp, Staphylococcus aureus; identical to SEQ ID NO: 415212

SEQ ID NO: 418599 - DNA, 441 bp, Staphylococcus aureus; identical to SEQ ID NO: 409580

SEQ ID NO: 418600 - DNA, 129 bp, Staphylococcus aureus; identical to SEQ ID NO: 415048

SEQ ID NO: 418601 - DNA, 285 bp, Staphylococcus aureus
ttgatttcaataacaggtgttactactttaccttgttccactggtttagaaggctttttaggttcttcttttgcgggtggtactggtttaccaggttcagctggtacctctggtgttggcggtgttggtgtttctggctcactcggcacttctggtgtcggtggtgttggtgtttccggctcacttggtacttccggagtcggtggtgttggtgtttccggctcacttggtacttctggtgtcggtggtgttggcggcgttgtatcttcttcaatcgtttgttga

SEQ ID NO: 418602 - DNA, 276 bp, Staphylococcus aureus; identical to SEQ ID NO: 412438

SEQ ID NO: 418603 - DNA, 1266 bp, Staphylococcus aureus; identical to SEQ ID NO: 414975

SEQ ID NO: 418604 - DNA, 156 bp, Staphylococcus aureus; identical to SEQ ID NO: 409125

SEQ ID NO: 418605 - DNA, 189 bp, Staphylococcus aureus; identical to SEQ ID NO: 407433

SEQ ID NO: 418606 - DNA, 147 bp, Staphylococcus aureus; identical to SEQ ID NO: 407426

SEQ ID NO: 418607 - DNA, 534 bp, Staphylococcus aureus
atgatttcacacttgataatggctactacgaagaagaaacatcagatagcgactcagattcagatagcgattcagactcagacagcgattcagattcagacagcgactcagactcagatagcgactcagattcggacagcgattcagactcagatagcgactcagactcagacagcgattcagactcagatagcgactcagactcagatagcgattcagattcagacagcgattcagattcagacagtgattcagattcagacagcgactcagattcagatagcgattcagactcagactcagatagcgattcagattcagacagcgactcagattcggacagcgactcagactcagacagtgattcagattcagatagcgactcagactcagatagcgactcagattcagacagcgattcagactcagatagtgactcagattcggacagcgattcagactcagatagcgactcagattcagacagtgattcagactcagatgcaggtaagcacacacctgttaaaccaatga

SEQ ID NO: 418608 - DNA, 300 bp, Staphylococcus aureus
atgacagatggtccaattaaagtaaatagcgaaattggagctttaaaaactgtgttacttaagcgtcctggaaaagaattagaaaatttagtacctgattatttagatggattactatttgatgatattccatatttagaagtagctcaaaaagagcatgaccattttgcgcaggtgctaagagaagagggtgttgaagtactttaccttgagaagttagcagctgaaagtattgaaaatcctcaagtaagaagtgaatttattgatgatgtattagcagagtctaaaaaacaatattag

SEQ ID NO: 418609 - DNA, 870 bp, Staphylococcus aureus
atgtcaggggtacgtaaggaagaaattaatccgaaatgtacacatctagtagagtacatggatgataagtatccattctatttagatccaatgccaaacctttattttactagagatccacaagcctcaataggacacggtataacaatcaatcggatgttctggagagcacgacgacgagaatcaatatttattcaatatattgtaaagcatcatcctagatttaaagatgcgaatattccaatctggttagatcgagattgcccattcaatattgaaggcggcgatgaacttgttttatctaaagatgtcttggctataggcgtttcagaacgtacatctgcacaagctattgaaaagttagcgcgacgtatttttgaaaatccgcaggcgacgtttaaaaaagtagtagcaattgaaattccaactagtcgaacttttatgcacttagatacagtatttacaatgatagattatgacaaatttacaatgcattcagccattttaaaggcagaaggcaatatgaatatatttattattgaatatgatgacgtaaataaagatattgccatcaaacaatctagtcatttaaaagatactttagaagacgtactaggtatagatgatatccaattcattccaacaggaaatggtgatgtcattgatggtgctagagagcaatggaatgatggctcaaatacattatgtataagaccaggcgttgtagtgacttacgatagaaactatgtatcgaatgatttattgagacaaaaaggcataaaagtcattgaaatatctggtagcgagctggtacgtggacgtgggggccctagatgtatgagtcaaccactattcagagaagacatttaa

SEQ ID NO: 418610 - DNA, 612 bp, Staphylococcus aureus; identical to SEQ ID NO: 407203

SEQ ID NO: 418611 - DNA, 1059 bp, Staphylococcus aureus
atgaaagaacaacttaatcaactatcagcatatcagcctggtttatctccaagggcattgaaagaaaagtatggcattgaaggagatttatataaacttgcatcaaatgaaaatttgtatggaccatcgcctaaagttaaagaagcgatatcagcacatttagatgagttatattattatcctgaaacaggatcaccgacattaaaagcggcgattagtaaacatttaaatgtagatcaatcacgcattttatttggtgcgggattagatgaagttatattaatgatttctagagcagtattaacgccaggggatactattgttacaagtgaagcgacattcggtcaatattatcacaatgcgattgttgaatcagctaatgtgatacaagtacctttaaaagatggtggcttcgatttagaaggtattttaaaagaagttaatgaagatacgtcattggtatggttatgtaatccaaataatcctacaggtacatattttaatcatgagagcttagattcgtttttatctcaagtacctccacatgtaccagtaattatagatgaagcttattttgaatttgtgacagcagaggactacccggatacacttgctttgcaacaaaaatatgacaatgctttcttattacgtacattttcaaaggcgtatggattagcgggtttacgtgtaggatatgtggtagcaagtgaacatgcgattgaaaaatggaacatcattagaccaccatttaatgtgacacgtatatctgaatacgcagcagttgcagcacttgaagatcaacaatatttaaaagaggtaacacataaaaatagtgttgaacgcgaaagattttatcaattacctcaaagtgagtatttcttgccaagtcaaacgaattttatatttgtaaaaacaaagcgggtaaatgaactttatgaagcacttttaaatgtagggtgtattacgcgaccatttccaactggtgttagaattacaattggttttaaagaacaaaatgataaaatgttagaagttttatcaaattttaaatacgaatag

SEQ ID NO: 418612 - DNA, 327 bp, Staphylococcus aureus
atgatgaatgaagtggttggcaatccattactggataagtttatgaaagatttaattattcaaatattagcaatggtttcagaacaagagagaaatgaaagtaaacgtcgacaagcgcaaggaattcaagttgcgaaggaaaaaggcatatataaagggcgccccttactttattcaccaaatgctaaagatccacagaaacgtattatttatcatcgcgttgtagaaatgttagaagaaggccaatcaattagtaaaattgcgaaagaagtaaatataacaaggcagacgatttacagaattaaaaacgataatgatttgatttaa

SEQ ID NO: 418613 - DNA, 201 bp, Staphylococcus aureus
atgaatgctttaatcaactttacaaaacatgaaggtattatacctgcaattgaaagtgcacatgcactgagttatgttgaaagactagcgcctacgatgtcgaaagaagatattattgtagtaactatttctggacgtggcgataaagatatggaaacaattagacaatatatggcagagcgaggtcttgcaaatgactaa

SEQ ID NO: 418614 - DNA, 189 bp, Staphylococcus aureus
ttgaataaagacacagtgttagataaaggttacgttatagcaactattttaaatgttttctttttacttggattaatttttatatctcattttgtaaatttatatatattaattctgtatgttattttgatgggaataaatgctatttatttggttgttaaggttttgaatttcaaaaagaataattag

SEQ ID NO: 418615 - DNA, 147 bp, Staphylococcus aureus; identical to SEQ ID NO: 407426

SEQ ID NO: 418616 - DNA, 201 bp, Staphylococcus aureus; identical to SEQ ID NO: 414461

SEQ ID NO: 418617 - DNA, 639 bp, Staphylococcus aureus; identical to SEQ ID NO: 418275

SEQ ID NO: 418618 - DNA, 723 bp, Staphylococcus aureus
atgaacaaaaacgtagtcatcaagagtttagcaacattaacaattttaacatctgtaacaggtattggaacaacattggttgaggaagtacaacaaactgccaaagcagaaaataatgtcacaaaagttaaagatactaatatttttccatatactggtgtagttgcttttaaaagtgcaactggatttgtagttggaaagaatactattttaacaaataaacatgtgtcgaaaaattacaaagtgggcgatcgtattactgcacatccaaatagtgataaaggtaatggtggtatttattcgattaaaaagattattaattatccaggtaaagaagatgtatcagtcattcaagttgaagagcgtgcaatagaacgtggaccaaaaggctttaattttaatgataatgtaacgccattcaaatatgcggcaggggctaaagctggtgagcgaattaaagtgattggttatccacacccatacaaaaataaatacgttttatatgagtcaactggccctgtgatgtcagtagaaggtagcagtattgtatattcagcgcatactgaaagcggaaactctggatcacctgtattaaacagcaacaacgaattagttggtattcattttgcttctgatgtaaaaaatgatgataacagaaatgcatatggcgtctactttacaccagaaattaaaaaattcattgcagaaaacatagataaataa

SEQ ID NO: 418619 - DNA, 399 bp, Staphylococcus aureus
atgtcattaacaattaaagaacttcataatattttaggaggtaatctccttgatgctgaaggtaaagaggacaatgttataaataattttgagaattggttcccctttattcataataaaagcacagcctacatatcgcccaataagcatacatggagacgttttggtagagatgcaaacgcaaaagaaggtaatgaatatataaagaaggataaggaagatttaggattaattattactgaaacctatgttcctgacatgaagtttaaaactcctcaattagttatcaatgattctgcaaacacactaactaaattagctgaagaaatgagactacagtataaacaccctgttgttgctataacaggatcaatgggaaaagttcaactagaatgctga

SEQ ID NO: 418620 - DNA, 1659 bp, Staphylococcus aureus
atgctgataagtgctggtcttaaagattattatcctcttcaaaatagatttaataataacataagatccgcagtatatttattattatgcaaaatgattagacaaccaaattttgctgttttagaagtatcattaaacgcattaaatgcagttggtaattcatcatatttaataaaaccaaatattgctatagttactggtataggtgctgctcatatgtctacatttaaagatattctaaatattgtagaagtgaaagcaagtatttttgatggtttaactcctgagggagtagcaataattaataaagatacattacattcagatatattaatcgaacgcgccaaacaaaatacaagtaatgttattacttatagtacacatgactctagcgcaacaatttgtcctaaatctattcaatatagtaaaggctatacagttataacaattgattttaacggacaaaaatatacttatagaattaattcaataagtgacggtatggttgaaaactctctagccacatttgctacattatcgcatttagatataccactagaaagagccttagagaacttaagtacatttaaaccatttgaaaaagttttaaacctaaaagaagttgaaacacctaactataaagttaacttaatagatgatacacacaacgcttcattaccagcaatgattaatgctataaaagcatttaatactcaaacaaaattttttaaaggtaataaaattattgcgattgggcaaattagtgacttaggtaagcactctaaatcattgcatttgcaattagttgatgttctagaaaatagtaatgcagattatattctatgtatggatgatgctttaaagagtgtcgttataggagtaaaaagcaaaaatataacatggtattctaatagacatctattagaaaaagatttattgtacctaaataaaccagattcattaactctattaaaatcatcagcaggtggtacagaatttccaaaattagcaaaagaattacctgagaaattaaataaatataatattaataattcgaacacttctttatttgatggtcaatccttgaacggtcgcagttatatgattattgatgaaaattataatgtcattgaatctcataacagagaacattcaggtacaattgaaggcttaggccctatctttaattatttaaaagctatagatgataatgtatcagaagatactatttttattgctaactgggcaacaaataacaaactttattatgaaggaaaagaaacgacaacttacgaattgatgaaagccatgcttaattcacctatgtatacaccttcttatgaattatctaagtatttatttgaaaacggtccaaagcgcgatgaatatatcaattcaaaaatagaacatttaagtctttcaaattctgtagcaataaatttaactggacgtcatactatgagagaacgacaaaacttcactgttgacgacttatttaaaattttaaaagcatataaaaataccctatttaaatttactaacgaaataattattggcaggaaatataatagcggtattataaaagataaagataaatttattatatttacctcttacccaaacttaaatgaaattaaaaataaactaaataataaataa

SEQ ID NO: 418621 - DNA, 1512 bp, Staphylococcus aureus
atgatatattcagtagggaataggttaggaaataaattaaccggaattgaaaaagcgatgattaatagacacaacttatttaaaaatcactcgataactagtaaattgatttttgcatcgtggtcacctcgtttacattttaatgcaagtctatttcaaattgaagatgacgatatattaagcttatatgatgtgctacaagacagtataaatataaaaagcatccataaggactggatcactcattggactaaagagtgtaattatacgctaaaatttattgaaaataccaatgatataaagatatatgaaaaaagcaactatagaatgtatgtccattttaatgatagtaattaccaacatttggattacataaatcattttgatgtaaatcaacgtaaaatacgtcgagatctatatgattcaagaggctttttaagttgttcaagaactttaacaacaaatcaaaaagtagtttgtgaacattattacactcctgaaggtactataaagttccaaaaattttttaatccagaacttgaaaattcacaatcacaacttattatttataacaccgattctcaacttaagtattttaataatgatcaggaattactagcatttgcaattgaaaaattgtataaaaatggagatattttcctgagtgataaaaatataaatactgcaccaatattcaataatactagtgaaacaatacctgttttagctgttttgcatagtactcatgtcaagaatattgacatggtatatgaatcggacatcaaaaatacttataaacatgtttttaacaatctaaatagatactctgggataattgtatcgactaaacagcaacaattggatatatcagctcgaataaataatgaaatccctgttcatactataccagtaggatatattgatgaacattttactaatttaaaaagaaataatcatagtataaataataataaaattatttccgttgcacgttattctcctgaaaaacagttgaatcatcaaattgaattagtttctaaattaattaaagaatttcctaacatccaactacatttgtatgggtttggtaaagaagaagaaaaatacaagcaactaatcactgaatataatttagaaaacaatgtgtttttacgagggtttagaagaaatttaagtgctgagattcaagatgcttatatgtctctaattactagtaatatggaaggatttaatttaggtttattagaaactataactgaaggcatacctccagttggctataattcgaagtatggtccttccgaattaatattaaataatgaaaatggttatttaattaacaaaaatgataaagatgaattatataatcgagtgcgaaacctattattagataagactttaagagatactttttctcaagaatgtatcaagcactctaaagctttttcaagtaaaattgttatgaagttatgggaagatagattttctacaattaattcaagttatgaatag

SEQ ID NO: 418622 - DNA, 2862 bp, Staphylococcus aureus
ttgaaaaagaaattggactttttacctaataagttgaataagtattcaattagaagatttacagtaggtacggcatctatattagtaggatctactctattatttggtattgggaatgaggcacatgcagcagaagagcatcaaaaatcaaacactacagaaaatgtagctgacagtaatgcaagcgaagcaccaacaaaagaagaagcgccaagcaatgaagcaacaagcgaagcaccaacaaaagaagaagtgccaagcaatgaagcaacaagcgaagcaccaacaaaagaagaagcgccaagcaatgaagcaacaagtgaggcaccaacaaaagaagaagcgccaagcaatgaagcaacaagtgaggcaccaacaaaagaagaagcgccagcagctgaagaaacagacaaagcaacagaagaagcaccaaaaactgaagaaacagacaaagcaacaaaagaagaagcgccagcagttgaagaaacaagcaaagcagcaacagaagaagcgccagcagctgaagaaacaaacaaagcagcaacagaagaaacaccagcagttgaagacacaaatgctaagagcaattcaaatgctcaaccatcagaaactgagagaactcaagttgtagatacagttgctaaagatttatataaaaaatctgaagttacagaagcagaaaaagctgaaattgaaaaagtattaccaaaagatatttcaaacttatctaatgaagaaattaaaaaaatagctttaagtgaagtacttaaagaaacagctaacaaagaaaacgcacaaccaagagcaacattccgttcagtaagcagcaatgctagaacaacaaatgttaactattcagcaacagcattaagagcagctgcacaagacacagttactaaaaaaggaactggtaactttactgcgcatggagatataatccataaaacttataaagaagaattccctaatgaaggtaagctaactgcattcaatacaaacttcaatcctgatacaggaactaaaggcgcattagaatataatgataaaatagattttaataaagactttacaattactgttccagtagcaaacaacaaccaaggcaatacaacaggagcagatggctggggcttcatgtttactcaagggaatggccaagacttcttaaaccaaggtggtattttaagagacaaaggtatggcaaatgcatctggttttaaaattgatacggcatataataatgttaatggtaaagtcgataaactcgatgcagataaaacaaacaatctaagtcaaattggcgcagcaaaagttggttacggtacatttgttaaaaatggtgcagatggtgtgactaaccaagttggtcaaaatgccctaaatacaaaagataaacctgtaaataaaataatttatgcagataatacaactaatcatcttgatggtcaattccatggccaaagattaaatgatgtagtattaaattatgatgcagcaacaagtacaataactgctacatatgcaggaaaaacatggaaagctactacagatgatttaggaattgataaatcacaaaaatataatttcttaattacttcaagtcatatgcaaaatagatattctaatggaattatgagaacaaatcttgaaggtgtaacaattacaacgcctcaagctgatttaattgatgatgtggaagtaacgaaacaaccaattcctcataaaactattcgtgagtttgatccaactctagaaccaggctcacctgatgttattgtacaaaaaggtgaagatggagagaaaacaacaactacaccaactaaagttgaccctgatacaggagatgtagttgaacgtggtgaaccaacaacagaagttacaaaaaatccagttgacgagattgtacactttgcacctgaagaagtaccacaaggtcataaagatgagttcgatccaaacttaccaattgacggtacagaagaagtaccaggtaaaccaggcattaagaacccagaaacaggtaaagtggtaacacctccggttgacgatgtcacaaaacatggtccaaaagcaggcgaaccagaggttactaaagaagaaattccatatgaaactaaacgcgtattagatccaacaatggaaccaggtagtcctgataaagtagctcaaaaaggtgaaaatggtgaaaaaacaacaacaacaccaactacaattaatccattaacgggagaaaaagtaggcgaaggcgaaccaacaacggaagtaacgaaagaaccaatagacgaaattgttaactatgcacctgaaattattcctcatggtacacgtgaagaaattgatccaaacttaccagaaggtgaaactaaagttatcccaggtaaagatggcttgaaagatcctgaaactggagaaatcattgaagaaccacaagatgaagtaatcatccatggtgctaaagatgattcagattctgatgcagacagcgactcagacgcagatagcgattcagatgcggacagcgactcagacgcagatagcgattctgatgcggacagcgattcagacgcagatagcgattcagattcagatagcgattctgatgcggacagcgattcagacgcagatagcgattcagattcagacagcgattcagacgcagatagcgactctgatgcggacagcgactcagacgcagatagagatcataatgacaaaacagataaaccaaataataaagagttaccagatactggtaatgatgctcaaaataatggcacattatttggttcactattcgctgcgcttggaggattattcttagttggcagacgtcgtaaaaacaaaaataatgaagaaaaataa

SEQ ID NO: 418623 - DNA, 234 bp, Staphylococcus aureus
atggaacatatcaacaaagataaaaatgatgaaaaaagtacagagctagatgaaagattaggaattaatggttattacaaaactgatttagatttagagattgaaaaagaactactagaatctccaaatgaatccagtagttcagtagctaaacgtatacgtataataagtatgattcctttaattattttattaattttagcatttattcggataatcaaaactttcatatag

SEQ ID NO: 418624 - DNA, 381 bp, Staphylococcus aureus
atgcaacgtgattatttaattcgagtagaaactgaaagcatgccagatttcaaaaggctcaatggtttaatgattggttttgttattaaaggtgaggcacatatttatgatgaaaataacatgacgcaatgcaacagtggcgacattttcatcattaaccaccgtgacttgtatcgatttcaacttcaacaagatggcatcatatgttatatccaattccaaatgaaatatttggcagacaagtttgatgatgcgcattgtctatattttcacttaacagatgcgaccacaaccaagaatatacatcaactgagaaatataatggcaagactggtttcaacacacattcgacataatgagttgtctaaattgactgagtaa

SEQ ID NO: 418625 - DNA, 576 bp, Staphylococcus aureus
gtggatagttacttagagtggttaaatcaaggaattactaaagaaagtattacgacatttattgaacgatacgctcaagcattaatcccgcctttaattgcttttattcaaaattatggaattgcattagaagcacacatgcaaaatacagtagtgaacttggggccacattttgacattcaatttttagtgagagatttaggtggttctagaattgatttagaaacattacaacatcgtgtatcagatattaaaattacaaatgatagtttaatagctgattctatagatgcagtgattgcaaaattccaacatgctgttattcaaaatcaaatggcagaattaatccatcattttaatcagtatgattgtgttgaagaaaccgaattatttaacatagtacagcaagtagtagcgcatgctattaacccaacactaccacatgcaaatgagttaaaagatattttgtttggaccaacaattactgtcaaagcgttgttaaatatgagaatggaaaataaagtaaagcaatatttaaatattgagttagataatccgataaaaaaagaggtgtag

SEQ ID NO: 418626 - DNA, 2913 bp, Staphylococcus aureus
atgatgcaatggaaacatttagttgacaatgaaattccaaatgcagagcaaactgtcaattaccaaaacgctgacgataatgctaaaacaaacttcgatgatgccaaacgtctagcaaatacattgctaaatagtgataacacaaatgtgaatgatatcaatggcgcaatccaagcagtcaatgatgcaatccataatcttaatggtgatcaacgactacaagatgctaaagacaaggcaattcaatcaattaatcaagctttagctaataagctaaaagaaatcgaagcttcaaatgcgacggatcaagacaagcttattgcgaaaaataaagcagaagaattggcaaacagcatcatcaacaacattaataaagcaacaagtaatcaggctgtatctcaagttcaaacagcaggcaaccacgcgattgaacaagtgcatgctaatgaaataccaaaagcaaaaattgatgccaataaagacgttgataagcaagttcaagcattaattgacgaaattgatcgaaatccaaatctaacagataaggaaaaacaagcacttaaagatcgtattaatcaaatacttcaacaaggtcataacggcattaacaatgcactgactaaagaagaaattgaacaagctaaagcacaacttgcgcaagcattacaagacatcaaagatttagtgaaagctaaagaagatgcgaaacaagatgttgataaacaagttcaagcattaattgacgaaatcgatcaaaatccaaatctaacagataaggaaaaacaagcgcttaaagatcgaatcaatcaaatactgcaacaaggtcataacgacattaacaatgcactgactaaagaagaaattgaacaagctaaagcacaacttgcgcaagcattacaagacatcaaagatttagtgaaagctaaagaagatgcgaaaaatgcaataaaagccttagctaatgcgaagcgtgatcaaatcaattcaaatccagatttaacacctgagcaaaaagcaaaagcgctcaaagaaattgacgaagctgaaaaacgagcactacaaaacgttgagaatgctcaaactatagatcaattaaatcgaggattaaacttaggtttagatgacattagaaatacacatgtatgggaggttgatgaacaacctgctgtaaatgaaatttttgaagcaacacctgagcaaatcttagttaatggtgaactcattgtacatcgtgatgacatcattacagaacaagatattcttgcacacataaacttaattgatcagctttcagcagaagttattgatacaccatcaactgcaacgatttctgatagcttaacagcaaaagttgaagttacattgcttgatggatcaaaagtgattgttaatgttcctgtaaaagttgtagaaaaagaattgtcagtagtcaaacaacaggcaattgaatcaatcgaaaatgcggcacaacaaaagattgatgaaatcaataatagtgtgacattaacactggaacaaaaagaagctgcaattgcagaagttaataagcttaaacaacaagcaattgatcatgttaacaatgcacctgatgttcattcagttgaagaaattcaacaacaagaacaagcgtatattgaacaatttaatccagaacaatttacgattgaacaagcaaaatcaaatgcaattaaatcgattgaagatgcaattcaacatatgattgatgaaatcaaagctcgtactgatctaacagataaagagaagcaagaagctattgctaagttaaatcaattaaaagaacaagcaattcaagcgattcaacgtgcgcaaagcatcagtgaaataactgagcaattggaacaatttaaagctcaaatgaaagcagctaatccaacagcaaaagaactagctaaacgcaagcaagaagctattagtagaattaaagacttttcaaatgaaaaaataaatagtattcgaaatagtgaaattggcacagctgatgaaaaacaagcagcaatgaatcaaattaacgaaattgtgcttgaaacaattagagatattaataatgcgcatacattacagcaagttgaggctgcattgaacaatggtattgctcgaatttcagcagtacaaattgtaatatctgatcgtgctaaacaatcgtcaagtactggaaatgaatctaatagccatttaacaattggttatggaactgcaaatcatccatttaacagttcgactattggacataaaaagaaacttgatgaagatgatgacattgatccacttcatatgcgtcactttagtaataatttcggtaatgttattaaaaacgctattggtgtggtgggtatctctggcttactagctagtttctggttcttcattgccaaacgtcgtcgtaaagaagatgaagaggaagaattagaaataagagataataataaagattcaataaaagagactttagacgatacaaaacatttaccacttttatttgcgaaacgtcgcagaaaagaagatgaagaagatgttactgttgaagaaaaagattcgctaaataatggcgagtcactcgataaagttaaacatacgccgttcttcttaccaaaacgtcgtcgtaaagaagatgaagaagatgtggaagttacaaatgaaaacacagatgaaaaagtgttgaaagataacgaacattcaccactcttattcgcaaaacgacgcaaagataaagaggaagatgttgaaacaacaactagtattgaatctaaagatgaggacgttcctttattattggctaaaaagaaaaatcaaaaagataaccaatccaaagacaaaaagtcagcatcaaaaaatacttctaaaaaggtagcagctaaaaagaagaaaaagaaatctaagaaaaataaaaaataa

SEQ ID NO: 418627 - DNA, 1335 bp, Staphylococcus aureus; identical to SEQ ID NO: 415504

SEQ ID NO: 418628 - DNA, 903 bp, Staphylococcus aureus; identical to SEQ ID NO: 415507

SEQ ID NO: 418629 - DNA, 1524 bp, Staphylococcus aureus; identical to SEQ ID NO: 415387

SEQ ID NO: 418630 - DNA, 993 bp, Staphylococcus aureus; identical to SEQ ID NO: 418337

SEQ ID NO: 418631 - DNA, 882 bp, Staphylococcus aureus; identical to SEQ ID NO: 415467

SEQ ID NO: 418632 - DNA, 438 bp, Staphylococcus aureus; identical to SEQ ID NO: 405148

SEQ ID NO: 418633 - DNA, 1056 bp, Staphylococcus aureus; identical to SEQ ID NO: 415518

SEQ ID NO: 418634 - DNA, 936 bp, Staphylococcus aureus; identical to SEQ ID NO: 415471

SEQ ID NO: 418635 - DNA, 954 bp, Staphylococcus aureus
atgaacaaatttaaagggaacaaagttgtattaataggtaatggtgcagtaggttcaagctacgcattttcattagtgaaccaaagcattgttgatgaattagtcatcattgatttagacactgaaaaagttcgaggagatgttatggatttaaaacatgccacaccatattctccaacaacagttcgtgtgaaagctggcgaatacagtgattgtcatgatgcggatctagttgtcatctgtgctggtgctgcacaaaaacctggagaaacacgtttagatttagtatctaaaaacttgaaaatattcaaatcaattgttggtgaagtaatggcatcaaaatttgatggtattttcttggtagctacaaatcctgttgatattttagcgtatgcaacatggaaattctctggtttacctaaagaacgtgttataggttctggtacaattttagactctgcacgctttagattattgttaagcgaagcgttcgatgttgcgccacgtagcgtcgatgctcaaattattggtgaacatggtgacactgaattaccagtatggtcacacgctaatattgcgggtcaacctttgaagacattacttgaacaacgtcctgagggcaaagcgcaaattgaacaaatttttgttcaaacacgtgatgcagcatatgacattattcaagctaaaggtgccacttattatggtgttgcaatgggattagctagaattactgaagcgattttcagaaatgaagatgccgtattgactgtatcagcattattagaaggcgaatatgatgaagaagatgtttatattggtgttccagcagtcatcaatagaaacggtattcgcaacgtcgtagaaatcccattaaacgacgaagaacaaagcaagttcgcacattcagctaaaacattaaaagatattatggctgaagcagaagaacttaaataa

SEQ ID NO: 418636 - DNA, 1563 bp, Staphylococcus aureus; identical to SEQ ID NO: 416083

SEQ ID NO: 418637 - DNA, 1185 bp, Staphylococcus aureus; identical to SEQ ID NO: 413356

SEQ ID NO: 418638 - DNA, 969 bp, Staphylococcus aureus; identical to SEQ ID NO: 418346

SEQ ID NO: 418639 - DNA, 495 bp, Staphylococcus aureus; identical to SEQ ID NO: 405107

SEQ ID NO: 418640 - DNA, 1593 bp, Staphylococcus aureus; identical to SEQ ID NO: 413362

SEQ ID NO: 418641 - DNA, 159 bp, Staphylococcus aureus
atgactcaaaaggagctagcaaataaagttggagtaactagacaaacaatatctcttatagaaaagggtgtacataacccctctctatcactatgtaaaaatatttgttcggtgttgaataaaaatttggatgagatatttggagagaaaccacaataa

SEQ ID NO: 418642 - DNA, 177 bp, Staphylococcus aureus; identical to SEQ ID NO: 408080

SEQ ID NO: 418643 - DNA, 732 bp, Staphylococcus aureus
gtggttataaatgatcaagtagcaaaaactgtattcaataataatgctattggtaaatcgctatatattgagggacggggatttgaagtcataggaattacggataaactatattctgactcatctaccgttataatgcctgaaaatacattcaactactatatgggacacttacatcaaggtctgcctaccttacagataattattgaagatggttacaataaaaaaactgtagttaaaaaagtagaatcactattaaataaaaaaggatcgggctctgttttaggtgagtatacatatacagacactgaagaaattatcaaaagtattgataaaatttttgatagtattacttattttgtagcagctgttgccggtatttcactttttattgctggtattggagttatgaatgtcatgtatatatctgtagctgaaagaacagaagaaattgcgatacgacgtgcatttggtgcaaaaagtcgagatattgaactacaatttttaatagagagcattttaatatgtgtgacaagtggttttattggacttattttaggtgttgtgtttgcaacaataattgatgtattaacaccagattatattaaaagtgtagtaagtttgagttctgtcataattgcggttagtgtgtcgatattaattggacttctttttggatggataccagctcgcgcagcatctaagaaagagctcatagatattataaaatag

SEQ ID NO: 418644 - DNA, 372 bp, Staphylococcus aureus; identical to SEQ ID NO: 409074

SEQ ID NO: 418645 - DNA, 600 bp, Staphylococcus aureus; identical to SEQ ID NO: 408072

SEQ ID NO: 418646 - DNA, 1641 bp, Staphylococcus aureus; identical to SEQ ID NO: 415561

SEQ ID NO: 418647 - DNA, 1035 bp, Staphylococcus aureus; identical to SEQ ID NO: 415564

SEQ ID NO: 418648 - DNA, 1242 bp, Staphylococcus aureus; identical to SEQ ID NO: 415565

SEQ ID NO: 418649 - DNA, 1251 bp, Staphylococcus aureus; identical to SEQ ID NO: 415569

SEQ ID NO: 418650 - DNA, 1026 bp, Staphylococcus aureus; identical to SEQ ID NO: 415570

SEQ ID NO: 418651 - DNA, 1035 bp, Staphylococcus aureus; identical to SEQ ID NO: 415681

SEQ ID NO: 418652 - DNA, 972 bp, Staphylococcus aureus; identical to SEQ ID NO: 415573

SEQ ID NO: 418653 - DNA, 513 bp, Staphylococcus aureus; identical to SEQ ID NO: 415574

SEQ ID NO: 418654 - DNA, 204 bp, Staphylococcus aureus; identical to SEQ ID NO: 414932

SEQ ID NO: 418655 - DNA, 1488 bp, Staphylococcus aureus; identical to SEQ ID NO: 415479

SEQ ID NO: 418656 - DNA, 327 bp, Staphylococcus aureus; identical to SEQ ID NO: 413366

SEQ ID NO: 418657 - DNA, 1146 bp, Staphylococcus aureus; identical to SEQ ID NO: 415580

SEQ ID NO: 418658 - DNA, 1263 bp, Staphylococcus aureus; identical to SEQ ID NO: 415480

SEQ ID NO: 418659 - DNA, 558 bp, Staphylococcus aureus; identical to SEQ ID NO: 415482

SEQ ID NO: 418660 - DNA, 1206 bp, Staphylococcus aureus
atgagtgaaaaaaagattttgattttatgtcagtatttttatccggaatatgtatcttctgcgacgttaccaactcaattggcggaagatttaattgcgaatcacattaatgtcgatgtcatgtgtggatggccatatgaatatagtaatcataaacaggtttctaaaaccgagatgcatcgtggaattcgcattcgacgtctcaagtattcgaggtttaataacaaaagtaaggttggaaggatcatcaatttctttagtttattttcaaaattcgtgattaatatacctaaaatgttgaaatatgatcagattcttgtttactctaatccaccaatcttgccattaataccagacgttttacacagactgcttaagaaaaaatattcttttgtggtgtatgatatagcacctgataatgcgattaagacaggtgcaactcgtccaggtagcatgattgataagctgatgcgttacattaatagacatgtctacaagaatgctgaaaatgtcattgtccttggtacggaaatgaaaaactacttactaaatcatcaaatttctaaaaatgctgacaatatccatgtgattcctaactggtatgacatgcgtcaattacaagacaatcgtatctataatgacacatttaaagcttaccgtgagcaatacgacaaaattttattgtatagcggtaatatggggcagttacaggatatggagacacttatctcatttttaaaattaaataaggatcagcctcaaacgttaacaatactttgtggtcatggtaagaaatttgcagatgtcaaaacggcaatagaagaccatcgtattgaaaatgttaaaatgtttgagtttttaacaggtacagactatgctgacgtattaaaaattgcggatgtatgtattgcatcgctgattaaagaaggcgtcggtttaggcgttccgagcaagaattatggctaccttgcagctaagaaaccgttggtactcatcatggataagcaatctgatatcgttcaacatgttgaacaatatgatgcgggtatccaaattgataatggcgatgcacatgccatttataacttcatcaacactcactcgagtaaggaattgcacgagatgggtgagcgcgcacatcaactgtttaaagataaatatacgagagaaattaatactatgaagtattacaatctgttgaagtga

SEQ ID NO: 418661 - DNA, 1206 bp, Staphylococcus aureus; identical to SEQ ID NO: 416098

SEQ ID NO: 418662 - DNA, 1110 bp, Staphylococcus aureus; identical to SEQ ID NO: 415585

SEQ ID NO: 418663 - DNA, 627 bp, Staphylococcus aureus; identical to SEQ ID NO: 415586

SEQ ID NO: 418664 - DNA, 1125 bp, Staphylococcus aureus; identical to SEQ ID NO: 415587

SEQ ID NO: 418665 - DNA, 1110 bp, Staphylococcus aureus; identical to SEQ ID NO: 415483

SEQ ID NO: 418666 - DNA, 765 bp, Staphylococcus aureus; identical to SEQ ID NO: 415588

SEQ ID NO: 418667 - DNA, 669 bp, Staphylococcus aureus; identical to SEQ ID NO: 415590

SEQ ID NO: 418668 - DNA, 774 bp, Staphylococcus aureus; identical to SEQ ID NO: 414282

SEQ ID NO: 418669 - DNA, 801 bp, Staphylococcus aureus; identical to SEQ ID NO: 414281

SEQ ID NO: 418670 - DNA, 246 bp, Staphylococcus aureus; identical to SEQ ID NO: 407772

SEQ ID NO: 418671 - DNA, 774 bp, Staphylococcus aureus; identical to SEQ ID NO: 416194

SEQ ID NO: 418672 - DNA, 351 bp, Staphylococcus aureus
atggcaaaattaaaacgtaacattattcaattagtagaagacccgaaagcaaatgaaattaaattacaaacgtacttaacaccacacttcatttcatttgaaattgtatacgaagcaatggatttaatcgatgatattgaggacgaaaatagcacgatgaaaccaagagaaatcgctgacagattgatggatatggttgtaaaaatttacgataaccaattcacagttaaagacctaaaagaacgtatgcatgcacctgatggaatgaatgcacttcgtgaacaagtaattttcattactcaaggtcagcaaactgaggaaactagaaattttatccagaacatgaaataa

SEQ ID NO: 418673 - DNA, 645 bp, Staphylococcus aureus
atggcagtaaaacatgcaagtgcgccaaaggcgtatattaacattactggtttaggtttcgctaaattaacgaaagaaggcgcggaattaaaatatagtgatattacaaaaacaagaggattacaaaaaattggtgttgaaactggtggagaactaaaaacagcttatgctgatggcggtccaattgaatcagggaatacagacggagaaggtaaaatctcattacaaatgcatgcgttccctaaagagattcgcaaaattgtttttaatgaagattatgatgaagatggcgtttacgaagagaaacaaggtaaacaaaacaattacgtagctgtatggttcagacaagagcgtaaagacggtacatttagaacagttttattacctaaagttatgtttacaaatcctaaaatcgatggagaaacggctgagaaagattgggatttctcaagtgaagaggttgaaggtgaggcacttttccctttagttgataataaaaagtcagtacgtaagtatatctttgattcagctaacatgacaaatcatgatggagacggtgaaaaaggcgaagaggctttcttaaagaaaattttaggcgaagaatatactggaaacgtgacagagggtaacgaagaaactttgtaa

SEQ ID NO: 418674 - DNA, 285 bp, Staphylococcus aureus; identical to SEQ ID NO: 407161

SEQ ID NO: 418675 - DNA, 285 bp, Staphylococcus aureus; identical to SEQ ID NO: 407162

SEQ ID NO: 418676 - DNA, 1221 bp, Staphylococcus aureus
atgttgcagatagtaaattatcagcaaatggattttcaagattccttttttaatacaaaaataggaggtcataaaatgactataaatttatcggaaacattcgcaaatgcgaaaaacgaatttattaatgcagtaaacaacggtgaaccgcaagaaagacaaaatgaattgtacggtgacatgattaaccaactatttgaagaaactaaattacaagcaaaagcagaagctgaaagagtttctagtttacctaaatcagcacaaactttgagtgcaaaccaaagaaatttctttatggatatcaataagagtgttggatataaagaagaaaaacttttaccagaagaaacaattgatagaatcttcgaagatttaacaacgaatcatccattattagctgacttaggtattaaaaatgctggtttgcgtttgaagttcttaaaatccgaaacttctggcgtggctgtttggggtaaaatctatggtgaaattaaaggtcaattagatgctgcgttcagtgaagaaacagcaattcaaaataaattgacagcgtttgttgttttaccaaaagatttaaatgattttggtcctgcgtggattgaaagatttgttcgtgttcaaatcgaagaagcatttgcagtggcgcttgaaactgcgttcttaaaaggtactggtaaagaccaaccaatcggcttaaaccgtcaagtacaaaaaggtgtatcggtaactgagggtgcttatccagagaaagaagaacaaggtacgcttacatttgctaatccgcgcgctacggttaatgaattgacgcaagtgtttaaataccactcaactaacgagaaaggtaaatcagtagcggttaaaggtaatgtaacaatggttgttaatccgtccgatgcttttgaggttcaagcacagtatacacatttaaatgcaaatggcgtatatgttactgctttaccatttaatttgaatgttatcgagtctacagtccaagaagcaggtaaggttttaacgtacgttaaaggtttatatgatggttatttagctggtggtattaatgttcagaaatttaaagaaacacttgcgttagatgatatggatttatacactgcaaaacaatttgcttacggcaaagcgaaagataataaagttgctgctgtttggaaattagatttaaaaggacataagccagctttagaaggtaccgaagaaacactataa

SEQ ID NO: 418677 - DNA, 738 bp, Staphylococcus aureus
atgaaagtggagattaaaggcgtcatcgtttccaacgaagataaatgggtttacgaaatgcttggtatggattcgacttgtcctaaagatgttttaacacaactagaatttagtgatgaagatgttgatattataattaactcaaatggtggtaacctagtagctggtagtgaaatatatacacatttaagagctcataaaggcaaagtgaatgttcgtatcacagcaatagcagcaagtgcggcatcgcttatcgcaatggctggtgaccacatcgaaatgagtccggttgctagaatgatgattcacaatccttcaagtattgcgcaaggagaagcgaaagatctaaatcatgctgcagaaacattagaacatgttggtcaaataatggctgaggcatatgcggttagagctggtaaaaacaaacaagaacttgtagaaatgatggctagggaaacgtggctaaatgctgatgaagccattgaacaaggttttgcggatagtaaaatgtttgaaaacgacaatatgcaaattgtagcaagcgatacacaagtgttatcgaaagatgtattaaatcgtgtaacagctttggtaagtaaaacgccagaggttaacattgatattgacgcaatagcaaataaagtaattgaaaaaataaatatgaaagaaaaggaatcagaaatcgatgttgcagatagtaaattatcagcaaatggattttcaagattccttttttaa

SEQ ID NO: 418678 - DNA, 1188 bp, Staphylococcus aureus
atgagtattctagaaaagatatttaaaactaggaaagatatatcatatatgcttgatttagatatgatagaagatctatcacaacaagcgtatgtgaaacgtttagcgattgatagttgtattgaatttgttgcgcgtgctgtcgctcaaagtcattttaaagtattggaaggtaatagaattcaaaagaatgatgtttactacaagttaaatataaaaccaaatactgacttatcaagcgatagtttttggcaacaagttatatataaactaatttacgataacgaggttttaatcgtagtaagtgacagcaaagaattacttatcgcagatagcttttacagagaagagtacgctttgtatgatgatatattcaaagatgtaacggttaaagattatacttatcaacgtactttcacaatgcaagaggtcatatatttaaagtacaacaacaataaagtgacacactttgtagaaagtctattcgaagattacgggaaaatattcggaagaatgataggtgcacaattaaaaaactatcaaataagagggattttgaaatctgcctctagcgcatatgacgaaaagaatatagaaaaattacaagcgttcacaaataaattattcaatacttttaataaaaatcaactagcaatcgcgcctttgatagaaggttttgattatgaggaattatctaatggtggtaagaatagtaacatgcctttttctgaattgagtgagctaatgagagatgcaataaaaaatgttgcgttgatgattggtatacctccaggtttgatttacggagaaacagctgatttggaaaaaaacacgcttgtatttgagaagttctgtttaacacctttattaaaaaagattcagaacgaattaaacgcgaaactcataactcaaagcatgtatttgaaagatacaagaatagaaattgtcggtgtgaataaaaaagacccacttcaatatgctgaagcaattgacaaacttgtaagttctggttcatttacaaggaatgaggtgcggattatgttaggtgaagaaccatcagacaatcctgaattagacgaatacctgattactaaaaactacgaaaaagctaacagtggtgaaaatgatgaaaaagaaaaagatgaaaacactttgaaaggtggtgatgaagatgaaagtggagattaa

SEQ ID NO: 418679 - DNA, 1662 bp, Staphylococcus aureus
atgattagtaataaatacgttgatgaatatataaatttgtggaaacaaggaaagataattttaaataaagaaagaattgatctctttaattatctacaaacacatatatattcacgagatgatgtatattttgatgaacagaaaatcgaggattgtatcaaatttattgaaaaatggtattttccaacattaccatttcaaaggtttatcatagctaatatatttcttatagataaaaatacagatgaagctttctttacagaatttgctattttcatgggacgtggaggcgggaaaaacggtctaataagtgctattagtgattttctttctacgcccttacacggagttaaagaatatcacatctccattgttgctaatagtgaagatcaagcaaaaacatcgtttgatgaaatcagaaccgttttaatggataacaaacgaaataagacgggtaaaacgccaaaagctccttatgaagttagtaaaacagaaataataaaccgtgcaactaaatcggttattcgatataacacatcaaacacaaaaaccaaagacggtggacgtgaggggtgtgttatttttgatgaaattcattatttctttggtcctgaaatggtaaacgtcaaacgtggtggattaggtaaaaagaaaaatagaagaacgttttatataagtactgatggttttgttagagagggttatatcgatgcaatgaagcacaaaattgcaagtgtattaagtggcaaggttaaaaatagtagattgtttgctttttattgtaagttagacgatccaaaagaagttgatgacagacagacgtgggaaaaggcgaacccaatgttacataaaccgttatcagaatacgctaaaacactgctaagcacgattgaagaagaatataacgatttaccattcaaccgttcaaataagcccgaattcatgactaagcgaatgaatttgcctgaagttgaccttgaaaaagtaatagcaccatggaaagaaatactagcgactaatagagagataccaaatttagataatcaaatgtgtattggtggtttagactttgcaaacattcgagattttgcaagtgtagggctattattccgaaaaaacgatgattacatttggttaggacattcgtttgtaagacaagggtttttggatgatgtcaaattagaacctcctattaaagaatgggaaaaaatgggattattgaccattgtcgatgatgatgtcattgaaattgaatatatagttgattggtttttaaaggctagagaaaaatatgggcttgaaaaagtcatagctgataattatagaactgatattgtaagacgtgcgtttgaggatgctggcataaaacttgaagtacttagaaatccaaaagcaatacatggattacttgcaccacgtatcgatacaatgtttgcgaaacataacgtaatatatggagacaatcctttgatgcgttggtttactaataatgttgctgtaaaaatcaagccggatggaaataaagagtatatcaaaaaagatgaagtcagacgtaaaacggatggatttatggcatttgttcatgcgttatatagagcagacgatatagtagacaaagacatgtctaaagcgcttgatgcattaatgagtatagatttctaa

SEQ ID NO: 418680 - DNA, 345 bp, Staphylococcus aureus
atggagattatagttgatgaaaacttagtgcttaaagaaaaagaaaggctgcaagtattatataaagacatacctagcaataaattaaaagtagttgatggtttaattattcaagcagcaaggctacgtgtaatgcttgattacatgtgggaagacataaaagaaaaaggtgactatgatttatttactcaatctgaaaaggcaccaccatatgaaagagaaagaccagtagctaaactgtttaatgctagagatgctgcatatcaaaaaataatcaaacaattatcggatttattgcccgaagagaaagaagacacagaaacgccatctgatgattacctatga

SEQ ID NO: 418681 - DNA, 300 bp, Staphylococcus aureus
atgatgactaaagacgaacgtatacgattctataagtctaaagaatggcaaataacaagaaaaagagtgctagaaagagataattatgaatgtcaacaatgtaagagagacggcaagttaacgacatatgacaaaagcaagcgtaagtcgttggatgtagatcatatattatcgctagaacatcatccggagtttgctcatgacttaaacaatttagaaacactgtgtattaaatgtcacaacaaaaaagaaaagagatttataaaaaaagaaaataaatggaaagacgaaaaatggtaa

SEQ ID NO: 418682 - DNA, 417 bp, Staphylococcus aureus; identical to SEQ ID NO: 408675

SEQ ID NO: 418683 - DNA, 204 bp, Staphylococcus aureus
atgatgtggattactatgactattgtatttgctatattgctattagtttgtatcagtattaatagtgatcgtgcaagagagatacaagcactcagatatatgaatgattatctacttgatgaagtagttaaaactaaaggatacaacgggttagaagaatacaggattgaattgaagcgaatgaataacgatattaaaaagtaa

SEQ ID NO: 418684 - DNA, 651 bp, Staphylococcus aureus; identical to SEQ ID NO: 409598

SEQ ID NO: 418685 - DNA, 153 bp, Staphylococcus aureus; identical to SEQ ID NO: 409183

SEQ ID NO: 418686 - DNA, 150 bp, Staphylococcus aureus
atgattaaacaaatagtaagactattattcttactagcaatgtatgagttaggtaagtatgtaacggagcaagtatatattatgatgacggctaatgatgatgtagaggcgccgagtgattacgtctttcgagcggaggtgagtgaataa

SEQ ID NO: 418687 - DNA, 387 bp, Staphylococcus aureus; identical to SEQ ID NO: 409597

SEQ ID NO: 418688 - DNA, 246 bp, Staphylococcus aureus; identical to SEQ ID NO: 407772

SEQ ID NO: 418689 - DNA, 258 bp, Staphylococcus aureus
  misc_feature (243)..(252): n is a, c, g, or t
atgagtaatttagagaaatctgtagctataaatttagaaaacacagcgcattatgaaaatatttcaaatctagatataacttttagaacaggagagagtgattcttctgttcttctttttaatatcattaaaaataatcaaccgttattactgagtgaagaaaatatcaaagcacgaatagcgattcgaggtaaaggagtaatggtagttgctccactagaaatattagatccatttaaaggnnnnnnnnnnatttaa

SEQ ID NO: 418690 - DNA, 360 bp, Staphylococcus aureus
ttgtttcctggggctattttcaacgatgtgaagatagacgaagaagaaatctcaaaaattaacggaagttttcctttcactcgatacatcaaaacgccatacagaggacaccactacatgcctttagcgttaaagaaatatcgccgaggaaatgaatggtttaacggtaaagtaacagacgaccaaattcacgaccacataagaaagctcacgctttcaatgtacggcgtaactcttaactctgatttgagcgaagttgaatacacacaagcagcagagacatacaacgcactaaaagagttttacttacatctatacaaaaaaagattaagcgaattaggcttaaaagattttgagtaa

SEQ ID NO: 418691 - DNA, 486 bp, Staphylococcus aureus
atgactgctggaacacaacaagctatgaattttgaaagtcatcgcttatgcacgattaaggcaaagcaagagctgcgaataggcacatggtcaattctaccgtttgacatcgaacatgatgctaacgagcctgtggctttcttattacaaagtacattaggttataaggttctgtatgttactgatacaaagtatttgaaatacaaatttaacggcattacgcacatgatgttagaagttaattatatctatgaacaaatgcaggaaaacataaaaaacggcagtgtgcacagcacattagcaaacagaattatggagtctcattttagcttagaacatgctatcggaatgttaaaagcaaatgatttaactagactcgaagaaatacatttaattcatttaagtagtcaaaattcaaatgcaaaatacattaaaagtgaaatacaaaaagtgacgggcgcgcccgtttatgttggaggtttataa

SEQ ID NO: 418692 - DNA, 147 bp, Staphylococcus aureus; identical to SEQ ID NO: 407426

SEQ ID NO: 418693 - DNA, 864 bp, Staphylococcus aureus; identical to SEQ ID NO: 413318

SEQ ID NO: 418694 - DNA, 1335 bp, Staphylococcus aureus; identical to SEQ ID NO: 415504

SEQ ID NO: 418695 - DNA, 1167 bp, Staphylococcus aureus; identical to SEQ ID NO: 415508

SEQ ID NO: 418696 - DNA, 1695 bp, Staphylococcus aureus; identical to SEQ ID NO: 415606

SEQ ID NO: 418697 - DNA, 2262 bp, Staphylococcus aureus; identical to SEQ ID NO: 418526

SEQ ID NO: 418698 - DNA, 759 bp, Staphylococcus aureus; identical to SEQ ID NO: 415535

SEQ ID NO: 418699 - DNA, 1719 bp, Staphylococcus aureus; identical to SEQ ID NO: 408077

SEQ ID NO: 418700 - DNA, 222 bp, Staphylococcus aureus; identical to SEQ ID NO: 408076

SEQ ID NO: 418701 - DNA, 897 bp, Staphylococcus aureus; identical to SEQ ID NO: 415558

SEQ ID NO: 418702 - DNA, 2046 bp, Staphylococcus aureus
gtgaggaagaaacttttcggtcaattgcaacgtattggtaaagcgctaatgttacctgttgcaattttaccagcagcgggtctgttattagctatcggtacagctatacaaggcgaagcattacaacactacttgccgtttatacaaaatggtggcgttcaaaatgtcgctaaattaatgacagctgccggtagtattatttttgaaaacttacctatgattttcgcattaggtgtcgcaatcggattagctggcggtgatggcgtagcagctatcgcagcattcgtcggttacataatcatgaacaaaacaatgggcgactttttacaagttacacctaaaaatgttactgatccagcgagtggttacgctagcattttaggtattccaacattacaaacaggtgtgttcggcggtattattatcggggccctggcagcttggtgttataacaagttctataacattaacttaccatcttatttaggtttcttcgctggtaagcgtttcgtacctattatgatggctacaacatcatttattttagcatttccaatggcattaatttggccaacgattcaatcaggattaaatgcattcagtacaggattattagattcaaatactggtgttgccgtattcttatttggtttcatcaagcgtttattaattccattcggtctacatcacattttccacgcaccgttctggttcgagtttggttcatggaaaaatgcagctggtgaaattattcacggtgaccaacgtatctttatcgaacaaattcgtgaaggcgcacatttgacagctggtaaattcatgcaaggtgaattccctgttatgatgttcggtttacctgcagcagctttagcaatttatcacacagctaaacctgaaaataagaaagtagtagcaggtttaatgggttctgctgctttaacatcattcttaactggtattacagaacctttagaattctcattcttattcgtagcaccattattattctttattcacgcagtacttgatggtttatcattcttaacattgtacttattggatgttcacttaggttatactttctcaggtggtttcatcgactacgttttacttggcgtactacctaataagacacaatggtggttagtcattcctgtaggtcttgtatacgcagttatttactacttcgtattccgattcttaattgtaaaattaaaatacaaaacaccaggtcgtgaagataagcaatcacaagctgttactgcttcagcaactgaattaccatatgcagtattagaagctatgggtggcaaagcaaacattaaacatttagacgcttgtatcacacgtctacgtgttgaagttaacgacaaatctaaagttgatgttcctggtttgaaagatttaggcgcatctggtgtattagaagtcggcaataatatgcaagcaatttttggtcctaaatctgaccaaatcaaacatgaaatgcaacagattatgaatggtcaagtagtagaaaaccctactactatggaagacgataaagacgaaactgttgttgttgcagaagataaatctgcaacaagcgaattgagccatatcgttcatgcaccattaactggtgaagtaacacctttatcagaagtgcctgatcaagtgttcagcgaaaaaatgatgggtgacggtatcgctattaaaccttcacaaggtgaagttcgtgcaccattcaacggtaaaatacaaatgattttcccaacaaaacatgcaattggtcttgtatcagatagtggtttagaactattaatccacatcggtttagacactgttaaattaaacggagaaggctttactttacatgttgaggaaggtcaagaagttaaacaaggtgatttattaatcaactttgatttagactatatccgcaatcatgcaaagagtgatattacgcctattatcgtgacacaaggaaacattacaaaccttgattttaaacaaggtgaacatggcaacatttcatttggcgatcaattatttgaagctaaataa

SEQ ID NO: 418703 - DNA, 1251 bp, Staphylococcus aureus; identical to SEQ ID NO: 415569

SEQ ID NO: 418704 - DNA, 360 bp, Staphylococcus aureus; identical to SEQ ID NO: 415571

SEQ ID NO: 418705 - DNA, 204 bp, Staphylococcus aureus; identical to SEQ ID NO: 414932

SEQ ID NO: 418706 - DNA, 558 bp, Staphylococcus aureus; identical to SEQ ID NO: 415482

SEQ ID NO: 418707 - DNA, 1206 bp, Staphylococcus aureus; identical to SEQ ID NO: 418660

SEQ ID NO: 418708 - DNA, 627 bp, Staphylococcus aureus; identical to SEQ ID NO: 415586

SEQ ID NO: 418709 - DNA, 243 bp, Staphylococcus aureus; identical to SEQ ID NO: 411711

SEQ ID NO: 418710 - DNA, 675 bp, Staphylococcus aureus; identical to SEQ ID NO: 409227

SEQ ID NO: 418711 - DNA, 315 bp, Staphylococcus aureus
atgcaaaaagttgaaagtatcataattggtggagggccatgcggattaagtgcggctattgaacaaaaaagaaaaggtattgataccttaattattgaaaaggggaatgtcgttgaatcaatctataattatcctactcaccaaacatttttctcatcaagtgataaattaagtattggggacgtaccgtttatcgttgaagaaagtaaaccaagacgtaatcaagcgctagtttattaccgagaagttgtaaaacatcatcaattaaaagtaaatgcatttgaagaagtattaactgttaaaaaaaatgaataa

SEQ ID NO: 418712 - DNA, 681 bp, Staphylococcus aureus
atgaataataaatttactattactacgacgaaagatgtttatgaatgtcgatttttaacaatcgcgacaggctattatggtcagcataatacattagaagttgaaggagcggatttacctaaagtgttccattattttaaagaggcacatccgtattttgatcaagatgttgttattattggtggtaagaattcggctatcgatgctgctttggagttggaaaaagctggtgctaacgtgacggttctatatcgtggtggagattattcgccttcaattaaaccgtggatacttccaaatttcacagcattagtaaatcatgaaaaaattgacatggaatttaatgctaatgttacccaaataactgaagatactgtgacttatgaagtaaatggtgaaagtaaaacaatacacaatgattatgtatttgcgatgattggttatcatcccgattatgaatttttaaaatctgtaggcattcaaattaatacaaatgaatttggaacagcgcctatgtataataaagaaacatacgaaacaaatatcgaaaattgctatattgcaggtgtaattgctgcagggaacgatgcgaataccatttttattgaaaatggtaaattccacggtggcattattgctcaaaacatgctagctaagaaacaaacgccgttagaatcataa

SEQ ID NO: 418713 - DNA, 660 bp, Staphylococcus aureus; identical to SEQ ID NO: 415510

SEQ ID NO: 418714 - DNA, 705 bp, Staphylococcus aureus; identical to SEQ ID NO: 414318

SEQ ID NO: 418715 - DNA, 438 bp, Staphylococcus aureus; identical to SEQ ID NO: 405148

SEQ ID NO: 418716 - DNA, 1026 bp, Staphylococcus aureus; identical to SEQ ID NO: 418340

SEQ ID NO: 418717 - DNA, 717 bp, Staphylococcus aureus
atgaaatacgctggtattctagctggaggtataggctcaagaatgggtaacgtacctttacctaaacaatttttagatttagacaacaaaccgattttaatccatacattagaaaaatttattttaattaatgattttgaaaaaaatattatcgcgacgccacaacaatggatgacgcatacgaaagatacacttagaaaattcaaaatttctgatgaaagaattgaagtcattcaaggtggtagcgatcgtaacgatacaattatgaatatcgttaaacatattgaatcaacaaatggtattaacgatgacgatgtcattgtgacacatgatgcagttagaccatttttaacgcatcgtattattaaagaaaatattcaagctgctttagagtacggtgcagtagatacagtgattgatgctatagatacgattgttacatctaaagataatcaaacgattgatgcaattccagtgcgtaatgaaatgtaccaaggtcaaacacctcaatcgtttaatattaatttattaaaagaaagctatgcacagttgagtgatgagcaaaagagtattttatctgatgcttgtaagattattgtagaaacaaacaaaccggttcgacttgtaaaaggtgagttatataacattaaagtaacaacaccttacgatttaaaagtagcgaatgctattattcgaggtggtattgccgatgattaa

SEQ ID NO: 418718 - DNA, 1170 bp, Staphylococcus aureus
atgattaaaaatacaattaaaaaattgatagaacatagtatatatacgacttttaaattactatcaaaattgccaaacaagaatctaatttattttgaaagctttcatggtaaacaatacagcgacaaccccaaagcattatatgaatacttaactgaacatagcgatgcccaattaatatggggtgtgaaaaaaggatatgaacacatattccaacagtacaatgtaccatatgttacaaagttttcaatgaaatggtttttagcgatgccaagagcgaaagcgtggatgattaacacacgtacaccagattggttatataaatcaccgcgaacgacgtacttacaaacatggcatggcacgccattaaaaaagattggtttggatattagtaacgttaaaatgctaggaacaaatactcaaaattaccaagatggctttaaaaaagaaatccaacggtgggattatctagtgtcacctaatccatattcgacatcgatatttcaacatgcatttcatgttagtcgagataagattttggaaacaggttatccaagaaatgataaattatcacataaacgcaatgatactgaatatattaatggtattaagacaagattaaatattccattagataaaaaagtgattatgtacgcgccaacttggcgtgacgatgaagcgattcgagaaggttcatatcaatttaatgttaactttgatatagaagctttgcgtcaagcgctggatgatgattatgttattttattacgcatgcattatttagttgtgacacgtattgatgaacatgatgattttgtgaaagacgtttcagattatgaagacatttcggatttatacttaatcagcgatgcgttagttaccgactactcatctgtcatgttcgacttcggtgtattaaagcgtccgcaaattttctatgcatatgacttagataaatatggcgatgagcttagaggtttttacatggattataaaaaagagttgccaggtccaattgttgaaaatcaaacagcactcattgatgcattaaaacaaatcgatgagactgcaaatgagtatattgaagcacgaacggtattttatcaaaaattctgttcattagaagatggacaagcgtcacaacgaatttgccaaacgatttttaagtga

SEQ ID NO: 418719 - DNA, 1695 bp, Staphylococcus aureus; identical to SEQ ID NO: 415606

SEQ ID NO: 418720 - DNA, 1056 bp, Staphylococcus aureus; identical to SEQ ID NO: 415518

SEQ ID NO: 418721 - DNA, 1260 bp, Staphylococcus aureus; identical to SEQ ID NO: 415519

SEQ ID NO: 418722 - DNA, 1506 bp, Staphylococcus aureus; identical to SEQ ID NO: 415527

SEQ ID NO: 418723 - DNA, 1212 bp, Staphylococcus aureus; identical to SEQ ID NO: 415475

SEQ ID NO: 418724 - DNA, 2262 bp, Staphylococcus aureus; identical to SEQ ID NO: 418526

SEQ ID NO: 418725 - DNA, 345 bp, Staphylococcus aureus; identical to SEQ ID NO: 405115

SEQ ID NO: 418726 - DNA, 1557 bp, Staphylococcus aureus; identical to SEQ ID NO: 415534

SEQ ID NO: 418727 - DNA, 759 bp, Staphylococcus aureus; identical to SEQ ID NO: 415535

SEQ ID NO: 418728 - DNA, 1380 bp, Staphylococcus aureus; identical to SEQ ID NO: 415536

SEQ ID NO: 418729 - DNA, 1269 bp, Staphylococcus aureus; identical to SEQ ID NO: 415541

SEQ ID NO: 418730 - DNA, 774 bp, Staphylococcus aureus
atgaaagcacataaaattttctggttaaacttagcagcaattattattatttcaattgtagtcagtggcggtatgtttttggcaatgaagtgggaacaaattcatttgaaagatggtcttaaaaaagtactaagtacgtatcctattaaaaacttagaaacgctttatgaaattgatggtcacgataatccccattatgaaaataatgatcaagacacatggtatatagaatcctcttattcagttgttggatcagatgagcttttaaaagaagaccgtatgttgttaaaggtagataagaacacacataaaataactggtgaatatgacacaactacaaacgatagaaaagatgctactgactcgacatacaaaagttatccagtaaaagtagttaataataaaatcgttttcacaaaagacgtaaaagatcccgcgctgaaacaaaaaatcgaaaacaatcaatttttgattcaaagtggtgatttaacaagcattttaaatagcaatgatttgaaagtcacacatgatcctaccactgattattataatttatctggtaagttgtcgaatgataatccaaacgttaaacaattaaaacgtagatataatattcccagtaatgcatcaacaaaggtggaattaaagggaatgagtgatttaaaaggcaataatcatcaagatcagaaactttatttttatttttcaagtcctggaaaaaaccaaattatatacaaagaaagccttacttataataaattaagtgaacattaa

SEQ ID NO: 418731 - DNA, 1776 bp, Staphylococcus aureus; identical to SEQ ID NO: 415546

SEQ ID NO: 418732 - DNA, 159 bp, Staphylococcus aureus; identical to SEQ ID NO: 418641

SEQ ID NO: 418733 - DNA, 177 bp, Staphylococcus aureus; identical to SEQ ID NO: 408080

SEQ ID NO: 418734 - DNA, 723 bp, Staphylococcus aureus; identical to SEQ ID NO: 408079

SEQ ID NO: 418735 - DNA, 1719 bp, Staphylococcus aureus; identical to SEQ ID NO: 408077

SEQ ID NO: 418736 - DNA, 222 bp, Staphylococcus aureus; identical to SEQ ID NO: 408076

SEQ ID NO: 418737 - DNA, 681 bp, Staphylococcus aureus; identical to SEQ ID NO: 408074

SEQ ID NO: 418738 - DNA, 1113 bp, Staphylococcus aureus; identical to SEQ ID NO: 408073

SEQ ID NO: 418739 - DNA, 2790 bp, Staphylococcus aureus; identical to SEQ ID NO: 408557

SEQ ID NO: 418740 - DNA, 1056 bp, Staphylococcus aureus; identical to SEQ ID NO: 415559

SEQ ID NO: 418741 - DNA, 1641 bp, Staphylococcus aureus; identical to SEQ ID NO: 415561

SEQ ID NO: 418742 - DNA, 558 bp, Staphylococcus aureus; identical to SEQ ID NO: 415562

SEQ ID NO: 418743 - DNA, 360 bp, Staphylococcus aureus; identical to SEQ ID NO: 415571

SEQ ID NO: 418744 - DNA, 1035 bp, Staphylococcus aureus; identical to SEQ ID NO: 415681

SEQ ID NO: 418745 - DNA, 762 bp, Staphylococcus aureus; identical to SEQ ID NO: 415572

SEQ ID NO: 418746 - DNA, 972 bp, Staphylococcus aureus; identical to SEQ ID NO: 415573

SEQ ID NO: 418747 - DNA, 741 bp, Staphylococcus aureus
atgattaaaattcaacaattacaacatcactttggatcacataaagtaattcataactttaatttggacattagcaagggagaaatagtcactttcatagggaaaagtggttgcggaaagtctactttactcaatgttatcggtggatttattcatccatcgtctggtcgtgtcattattgataacgaaattaaacaacagccatctccagattgtttaatgctatttcaacatcataatttgctgccatggaaaacgattaatgacaacattaggattggatttcaacagaaaattagtgatgaagagattaacgcacagcttaaattagttgatttagaagacaggggaaagcattttcccgagcaactgtccgggggtatgaaacaacgtgtggcactatgtcgagcgcatgtgcataagcctaacgttatattgatggatgagccattaggtgcattagatgcatttacacgttataaacttcaggatcaactagtgcaactaaaacataaaacgcaatcaactattattttagtgacgcatgacattgatgaagctatttatctttccgaccgcattgttctgttaggtgaagggtgcaatattatttctcaatatgaaattacagcatcacatccacgcagtcgtaatgatagccacctacttaagattcgtaatgaaattatggaaacatttgcattgaatcatcatcaagttgaacctgaatattatttataa

SEQ ID NO: 418748 - DNA, 384 bp, Staphylococcus aureus; identical to SEQ ID NO: 415578

SEQ ID NO: 418749 - DNA, 1263 bp, Staphylococcus aureus; identical to SEQ ID NO: 415480

SEQ ID NO: 418750 - DNA, 1029 bp, Staphylococcus aureus; identical to SEQ ID NO: 415484

SEQ ID NO: 418751 - DNA, 765 bp, Staphylococcus aureus; identical to SEQ ID NO: 415588

SEQ ID NO: 418752 - DNA, 294 bp, Staphylococcus aureus; identical to SEQ ID NO: 405170

SEQ ID NO: 418753 - DNA, 921 bp, Staphylococcus aureus; identical to SEQ ID NO: 415465

SEQ ID NO: 418754 - DNA, 951 bp, Staphylococcus aureus; identical to SEQ ID NO: 415466

SEQ ID NO: 418755 - DNA, 993 bp, Staphylococcus aureus; identical to SEQ ID NO: 418337

SEQ ID NO: 418756 - DNA, 882 bp, Staphylococcus aureus; identical to SEQ ID NO: 415467

SEQ ID NO: 418757 - DNA, 915 bp, Staphylococcus aureus
atgaccaacaaagttgttattttaggttcaacgaatgtcgatcaatttttaacagttgaaagatatgcacaaccaggcgaaacattacatgttgaagaagcacaaaaagcattcggcggaggtaaaggtgccaaccaggctattgccactgcacgcatgcaagcagacacaacatttattactaaaattggcactgatggcgttgctgatttcatcttagaagattttaaagcggctcatattgatacatcatatattatcaaaacaactgaagcaaaaacgggccaagcctttatcactgtgaatgcagaaggacaaaacaccatctatgtttatggtggtgcgaatatgacgatgacacctgaagatgttattaacgcaaaagacgctataatcaatgcagactttgtcgttgcacaattagaagtacccatcccggctattatatctgcatttgaaattgccaaggcacatggtgtgacgacagtattaaatcctgcaccagcgaaagcattacctaatgaattattatcattaatcgatattattgtgccaaacgaaacagaagccgaattgttatctgggattaaagtaactaatgaacaatctatgaaagacaatgccaattactttttatctttaggcattaagactgttttgattacgctaggtaagcaaggtacatattttgctactaaaaatcaaagccaacacatcgaagcttataaagtaaatgcgattgatacaactgctgcaggcgacacatttattggtgcatttgtcagtcgcttaaacaagtcgcaagataacttagcagatgctattgattttggtaataaagcgagctcactcactgtacaaaaacacggcgcgcaagcatctattcctctactagaagaagtaaatcaagtttaa

SEQ ID NO: 418758 - DNA, 762 bp, Staphylococcus aureus; identical to SEQ ID NO: 415468

SEQ ID NO: 418759 - DNA, 438 bp, Staphylococcus aureus; identical to SEQ ID NO: 405148

SEQ ID NO: 418760 - DNA, 1755 bp, Staphylococcus aureus; identical to SEQ ID NO: 415517

SEQ ID NO: 418761 - DNA, 675 bp, Staphylococcus aureus; identical to SEQ ID NO: 418338

SEQ ID NO: 418762 - DNA, 1689 bp, Staphylococcus aureus; identical to SEQ ID NO: 415667

SEQ ID NO: 418763 - DNA, 1170 bp, Staphylococcus aureus; identical to SEQ ID NO: 418341

SEQ ID NO: 418764 - DNA, 147 bp, Staphylococcus aureus; identical to SEQ ID NO: 413354

SEQ ID NO: 418765 - DNA, 1056 bp, Staphylococcus aureus; identical to SEQ ID NO: 415518

SEQ ID NO: 418766 - DNA, 1260 bp, Staphylococcus aureus; identical to SEQ ID NO: 415519

SEQ ID NO: 418767 - DNA, 936 bp, Staphylococcus aureus; identical to SEQ ID NO: 415471

SEQ ID NO: 418768 - DNA, 954 bp, Staphylococcus aureus; identical to SEQ ID NO: 418635

SEQ ID NO: 418769 - DNA, 1764 bp, Staphylococcus aureus; identical to SEQ ID NO: 413357

SEQ ID NO: 418770 - DNA, 759 bp, Staphylococcus aureus; identical to SEQ ID NO: 415535

SEQ ID NO: 418771 - DNA, 1380 bp, Staphylococcus aureus; identical to SEQ ID NO: 415536

SEQ ID NO: 418772 - DNA, 495 bp, Staphylococcus aureus; identical to SEQ ID NO: 405107

SEQ ID NO: 418773 - DNA, 969 bp, Staphylococcus aureus; identical to SEQ ID NO: 415670

SEQ ID NO: 418774 - DNA, 1041 bp, Staphylococcus aureus; identical to SEQ ID NO: 415538

SEQ ID NO: 418775 - DNA, 1272 bp, Staphylococcus aureus; identical to SEQ ID NO: 413358

SEQ ID NO: 418776 - DNA, 258 bp, Staphylococcus aureus
ttggtaagtggaacttatccaggtggcgttattgagggattcggactaactgcattacctaacgcgattcaattgagtaaagcgaatgtagttgactcagacggcaacggtggcggtatttatgagtgcttactatccaaaacaagtagcactactttaagaatagataacgatgtgtactttgatttaggtaaaacatcaggttctggagcgaatgccaacaaagttactataactaaaattatggggtggaaataa

SEQ ID NO: 418777 - DNA, 378 bp, Staphylococcus aureus; identical to SEQ ID NO: 412644

SEQ ID NO: 418778 - DNA, 177 bp, Staphylococcus aureus
atgggcatatcaatacaagttaaagatatgaacaacgtaccaattaaacatgcttatgtcgtagatgagaatgacttagatatggcatcagacttattcaaccaagcaatagatgaatggattgaagagaacacagacgaacaggacagactaattaacttagtcatgagatggtag

SEQ ID NO: 418779 - DNA, 180 bp, Staphylococcus aureus
atgaacagaaacaagatgaatcactacgacaaacatgtattagcgttatgtcgcgaacatcataacgagcaacatgcgattggtgttaagtcatttgatgataaatatcaattgcatgactcgtggataaaagttgatgagaggctcaataaaatgctgaaaggagagaaaaaggaatga

SEQ ID NO: 418780 - DNA, 225 bp, Staphylococcus aureus; identical to SEQ ID NO: 408067

SEQ ID NO: 418781 - DNA, 783 bp, Staphylococcus aureus
atgggatattcaaaaaggtttgcattgtacataagtatcttgattttaatagttatggtagcaggttgtggtaaaagtgatgaaacaaaagaagattccaaagaagaacaaattaaaaagagctttgcgaaaacgttagatatgtaccctattaagaatctcgaggatttatacgataaagaaggataccgtgatggcgaatttaaaaagggtgataaggggacgtgggttctgtattcagctatagtatcacaaccaaaaggcgagagtttaaaatcacgaggaatgatattaaagttagatagaaataagagaactgctaaaggaagttatattattagagaattgaaagaagataaaaatcatgatgttcaaaaaaatgaaaagaaatatccagtgaaattggtgaataataggatagttttggtaaaagatgttaaagacaaaaagttaaaaaatgaaatagagtcgtttgaattattttcacaatatggaaactttaatcattttgatcggaatgagattactaatatttcatataatcctaatgctcccaattactctgcagaatataaaatgaagaaaaatgacagaaacattcaacagttgaaaaagagatttaatctaaaaactagcaagacaccaaaattattgtttaagggatctggagatataaaggggtcttctgtaggatataaggaaatagaaatcatatttagtagaagtaaagaagaagcatttattatgttgacagcgttgagttcgttccaagtaacaaaatga

SEQ ID NO: 418782 - DNA, 828 bp, Staphylococcus aureus; identical to SEQ ID NO: 414067

SEQ ID NO: 418783 - DNA, 210 bp, Staphylococcus aureus
ttggtagcgccaaaattagataaagagacgcgacaatcgattgctaaagatttaggcagtatgggggcaaacgtaaatcagattgcgaaatggtttaatcaacataaagaacaagcagtgaatttacctgaacaaaaatacgatgatttaattaagcaatttgatgactttaagaaggagttgcatgagatatggcaacaactaaaataa

SEQ ID NO: 418784 - DNA, 351 bp, Staphylococcus aureus
gtgtctgatcgtatgaaaggtatgatacgtggcagcgatgcgtttatttttgagagtaatcatgacgtcgatatgttgagaatgtgtcgttatccatggaagacgaaacaacgtattttaggcgatatgggtcatgtatctaatgaggatgcgggtcatgcgatgacagatgtgattacaggtaacacgaaacgtatttacctatcgcatttatcacaagacaataacatgaaagatttggcgcgtatgagtgttggccaagtattgaacgaacacgatattgatacggaaaaagaagtattgctatgtgatacggataaagctattccaacgccaatatatacaatataa

SEQ ID NO: 418785 - DNA, 1179 bp, Staphylococcus aureus
atgaatcaacaattaattgaagctttaaaatctaaagaagacaaaatgattgagatcagacgttatttacatcagcatccagaattatcttttcatgaagatgaaacggcgaaatacatcgctgaattttacaaaggtaaagatgtggaagtagaaacgaatgtcggaccacgtggaattaaagtaacgattgattcagggaaacctggtaaaacattagcaatccgtgcagactttgacgcattacccattactgaagatacaggattatcttttgcatcacaaaataaaggtgttatgcacgcatgtggtcacgatgcacatacagcttacatgcttgtattagcagagacgcttgctgaaatgaaagatagttttacaggaaaagtcgttgtgatacatcaaccagctgaagaagtaccaccaggtggtgctaaagcaatgattgaaaatggtgtattagacggtgttgatcatgtattaggtgtacacgtcatgagcacaatgaaaacaggtaatgtgtattacagacctggttatgttcaaacaggacgcgcattcttcaaattgaaagttcaaggtaaaggtggtcatggttcatcaccacatatggccaatgatgccattgttgcaggtagctacttcgtcacagcgttacaaacagttgtatctagacgactaagtccatttgaaaccggtgttgtcacaatcggttcatttgacggtaaaggtcaattcaatgtcattaaagatgttgttgaaattgaaggtgatgtacgtggattaacagatgctacaaaagcaacaattgaaaaagaaattaaacgtttatcaaaaggattagaggatatgtatggtgtaacttgcaccttagaatataacgatgattatccagcattatataatgatccagagtttactgagtacgtggctaagacgttgaaagaagcaaaccttgattttggtgttgaaatgtgtgaaccacaaccaccttcagaagactttgcatattatgctaaagaacgtccaagtgcctttatttatacaggtgcagctgtggaagatggtgaaatttacccacatcatcatcctaaatttaacatttcagaaaaatcattacttatttcggcagaagctgtagggacagttgttttagattaccttaaaggagataactaa

SEQ ID NO: 418786 - DNA, 1668 bp, Staphylococcus aureus
atggaaatgtcggttacagaagtcattttctcctttttaggtggtttaggtattttcctttacggcttaaaaatcatgggagacgggcttcaagcatcagcaggagacaggctacgagatattttaaacaaatttacatcaaatccagtattaggtgttattgcaggtatcgttgtaactattttaatacaaagtagttcaggtacgaccgttatcacaatcggactggtaacagctggatttatgacgttaaaacaagctattggagtgataatgggtgccaatatcggaacaacggtaactgcatttattatcggtatagatttaggcgaatatgcaatgccaattttagcattaggtgcatttttaatctttttctttaaacgctctaaaatcaataacattggccgcatactattcggtttcggttctctattcttcggtctagaatttatgggtgatgccgttaaacctttagcatcattagatggatttaagcaattaatgcttgatatgtcatcaaatccaatacttgctgtcattgtcggcgcagggttaacagcactagttcaaagttcaagtgcgacgattggtattttacaagaattttatcaacaagatttaatcagcttaaacgcagcaatccctgtgttactaggtgataacattggtacaacaattacagctatcttagctagtttagccggctcaatcgctgcaaaacgtgcggcgcttgtacacgtcatctttaatttaatcggggtaattatcttcacaattttcttgccagttgtgattcatttgattagtttgttacaagatgtatggcacttaaaaccagcgatgacgattgcagtatcacatggtaccttcaacataacaaatactttgattcaattaccatttgtagcaggtttagcatggatagttacaaagcttgtcccaggtaaagatattgctgatgactataaacctcagcacttaaacaaagatcttgtttatcacgcacctggtgttgcattacaagaaactcaaaaagaattacaaaatgtgggtcagattgtcttatcaatgtttgaagacattcgcgaaattacaaaagacgataaaaaattgatcaagaagcttgaacaaaagcaccaagctgttgaaacaatcaatgatagcattcgaaattatttagttagaatttctacaaaagccattacgaaggcagacgttgagcgtttagcagttatgtttgatgtcaatcgctctattttaaaagtagcagagctaacagaagagtatgtcgctcaattaaaacgccaacatgatgaagatattcgcattacagaagatgcacaacgcggtatggataaattattcaaccatgttgctgagtcatttgataaagccatcgacatgttagatgtttatgacaaaacgaaaaaagatgaaattgtagaacgtagtagagaatcatttaatattgaacataaactacgcaaaggtcatattaaacgccttaatcgtggcgaatgtacaacaaaaggcggattactatatatcgatatgattggtgttcttgaacgtatcggttatcattcacgaaatgtttctgaagcacttgttggtcttaacgatgatgtacctacagatgaagaaattgcaacaactgaaatttaa

SEQ ID NO: 418787 - DNA, 993 bp, Staphylococcus aureus; identical to SEQ ID NO: 405506

SEQ ID NO: 418788 - DNA, 753 bp, Staphylococcus aureus; identical to SEQ ID NO: 412691

SEQ ID NO: 418789 - DNA, 309 bp, Staphylococcus aureus
atgataattttatcagctatgttaactaagtttttgatgacattaattttgtcagatacttttgctccacctaaaatagcaacaactggtttatgtggatcgttaactacgccaccaataaacttaatttctttatccattaagaatccagctgcagtttctaaatgtgtagaaataccaacattagatgcatgctcacgatgcgcagtaccaaaagcatcatttacaaacacatcacctaaagatgcccagtatttacctaattctggatcatttttagattcttttttaccgtctaaatcttcataa

SEQ ID NO: 418790 - DNA, 651 bp, Staphylococcus aureus
atgtatgaaccctatgtccgattatttcgcgacctatttcctaatgcagctattatttttgacagattccatatcgttcaacatttaaatagggaacttaataagtatcgtgtacaagttatgaatgaataccgtaataaaaaaggacctaattatacaatttttaagaataactggaaagttctattgatggatactagtaaaaccatatttagtaaatacagatggaataaatcttttaaggcttataaacgctcatctgacattgtagaattcatgctttcaaaagacgatatactacgacgctcctacgaacttgtccaaggattaagaaaagatctaaggttatgtaattggcctaaatttattaatcgtttaaattcagttagtaaaaagtctgtgagtaaaggtgtatggaaagtggttaaatattatagaaaacatcaaaggatgttaagaaatacaatttattacccagcatttaataatggtgctatagaaggaattaataataagataaaattaatcaagcgaatttcttttggttacagaaatttcaacaactttaaagcacgtataatgatgattttcagcttatacaaaggagaaaaaaagaagacaaccaagcccaataatggactggccgcctaa

SEQ ID NO: 418791 - DNA, 651 bp, Staphylococcus aureus; identical to SEQ ID NO: 418790

SEQ ID NO: 418792 - DNA, 297 bp, Staphylococcus aureus
ttgcagaaggagcaaaaagcgaaagatagaatttctgttattggttatccaaagggtgcacaaacaaaatataaaatgtttgaatcgacaggaacgattaaccatatcagtggaacgtttatagaatttgatgcgtatgcacaaccaggtaattcaggatctcctgtattgaattctaaacatgaactgattggtattttatatgcaggtagtggaaaagatgaatctgaaaagaatttcggtgtttatttcacaccacaattaaaagaatttattcaaaataatattgaaaaataa

SEQ ID NO: 418793 - DNA, 651 bp, Staphylococcus aureus; identical to SEQ ID NO: 418790

SEQ ID NO: 418794 - DNA, 651 bp, Staphylococcus aureus
atgtatgaaccctatgtccgattatttcgcgacctatttcctaatgcagctattatttttgacagattccatatcgttcaacatttaaatagggaacttaataagtatcgtgtacaagttatgaatgaataccgtaataaaaaaggacctaattatacaatttttaagaataactggaaagttctattgatggatactagtaaaaccatatttagtaaatacagatggaataaatcttttaaggcttataaacgctcatctgacattgtagaattcatgctttcaaaagacgatatactacgacgctcctacgaacttgtccaaggattaagaaaagatctaaggttatgtaattggcctaaatttattaatcgtttaaattcagttagtaaaaagtctgtgagtaaaggtgtatggaaagtggttaaatattatagaaaacatcaaaggatgttaagaaatacaatttattacccagcatttaataatggtgctatagaaggaattaataataagataaaattaatcaagcgaatttcttttggttacagaaatttcaacaactttaaagcacatataatgatgattttcagcttatacaaaggagaaaaaaagaagacaaccaagcccaataatggactggccgcctaa

SEQ ID NO: 418795 - DNA, 651 bp, Staphylococcus aureus; identical to SEQ ID NO: 418794

SEQ ID NO: 418796 - DNA, 651 bp, Staphylococcus aureus
atgtatgaaccctatgtccgattatttcgcgacctatttcctaatgcagctattatttttgacagattccatatcgttcaacatttaaatagggaacttaataagtatcgtgtacaagttatgaatgaataccgtaataaaaaaggacctaattatacaatttttaagaataactggaaagttctattgatggatactagtaaaaccatatttagtaaatacagatggaataaatcttttaaggcttataaacgctcatctgacattgtagaattcatgctttcaaaagacgatatactacgacgctcctacgaacttgtccaaggattaagaaaagatctaaggttatgtaattggcctaaatttatcaatcgtttaaattcagttagtaaaaagtctgtgagtaaaggtgtatggaaagtggttaaatattatagaaaacatcaaaggatgttaagaaatacaatttattacccagcatttaataatggtgctatagaaggaattaataataagataaaattaatcaagcgaatttcttttggttacagaaatttcaacaactttaaagcacgtataatgatgattttcagcttatacaaaggagaaaaaaagaagacaaccaagcccaataatggactggccgcctaa

SEQ ID NO: 418797 - DNA, 651 bp, Staphylococcus aureus; identical to SEQ ID NO: 418790

SEQ ID NO: 418798 - DNA, 492 bp, Staphylococcus aureus
atgactacaattcacgcttacacaggtgatcaaaatacacaagacgcacctcacagaaaaggtgacaaacgtcgtgctcgtgcagcggcagaaaacatcatccctaactcaacaggtgctgctaaagctatcggtaaagttattcctgaaatcgatggtaaattagatggtggtgcacaacgtgttcctgtagctacaggttcattaactgaattaacagtagtattagaaaaacaagacgtaacagttgaacaagttaacgaagctatgaaaaatgcttcaaacgaatcattcggttacactgaagacgaaatcgtttcttcagacgttgtaggtatgacttacggttcattattcgacgctacacaaactcgtgtaatgtcagttggcgaccgtcaattagttaaagttgcagcttggtatgataacgaaatgtcatatactgcacaattagttcgtacattagcatacttagctgaactttctaaataa

SEQ ID NO: 418799 - DNA, 678 bp, Staphylococcus aureus
gtgaaactacaatggataaatacatttaaactacattctaagaagcgacaattaagtaaggcccaacaaatcgatttactttcaaatttatgtaatttgttgaaatatggtttcactctgtatcaaagttttcaatttttaaatcttcaaatgacatataaaaataagcaattaggtaccaccattctaagtgaaatttcaaatggtgcaccatgcaatcaaatattatcactgataggttatagcgatactatcgtcatgcaagtatatttggcagaaagatttggcaatattatagacgttctagaagaaaccgtaaattatatgaaagtgaatagaaagtcagaacaacgattgttaaagacactgcaataccccttaatactagtttctatctttattgctatgattattatattaaacctcacagtaattccacagtttcaacaattatatacttctatgaatattcaactatcttcttttcaaaaaacattgtcttttttcattaccagcttacctactataattgtagtaatgctcataatagtatctatgttggctattattatgaaattaatttataacaatttaaatatgctcaataagataaactttgtgatgaaactaccgctaatatgttgttttataaaaatggtattacacttcaatcaatag

SEQ ID NO: 418800 - DNA, 1086 bp, Staphylococcus aureus; identical to SEQ ID NO: 408860

SEQ ID NO: 418801 - DNA, 459 bp, Staphylococcus aureus; identical to SEQ ID NO: 415506

SEQ ID NO: 418802 - DNA, 3030 bp, Staphylococcus aureus; identical to SEQ ID NO: 418335

SEQ ID NO: 418803 - DNA, 294 bp, Staphylococcus aureus; identical to SEQ ID NO: 405170

SEQ ID NO: 418804 - DNA, 660 bp, Staphylococcus aureus; identical to SEQ ID NO: 415510

SEQ ID NO: 418805 - DNA, 951 bp, Staphylococcus aureus; identical to SEQ ID NO: 415466

SEQ ID NO: 418806 - DNA, 993 bp, Staphylococcus aureus; identical to SEQ ID NO: 418337

SEQ ID NO: 418807 - DNA, 1377 bp, Staphylococcus aureus; identical to SEQ ID NO: 413350

SEQ ID NO: 418808 - DNA, 882 bp, Staphylococcus aureus; identical to SEQ ID NO: 415467

SEQ ID NO: 418809 - DNA, 405 bp, Staphylococcus aureus; identical to SEQ ID NO: 414319

SEQ ID NO: 418810 - DNA, 762 bp, Staphylococcus aureus; identical to SEQ ID NO: 415468

SEQ ID NO: 418811 - DNA, 1437 bp, Staphylococcus aureus; identical to SEQ ID NO: 413351

SEQ ID NO: 418812 - DNA, 1755 bp, Staphylococcus aureus; identical to SEQ ID NO: 415517

SEQ ID NO: 418813 - DNA, 675 bp, Staphylococcus aureus; identical to SEQ ID NO: 418338

SEQ ID NO: 418814 - DNA, 1689 bp, Staphylococcus aureus; identical to SEQ ID NO: 415667

SEQ ID NO: 418815 - DNA, 1170 bp, Staphylococcus aureus; identical to SEQ ID NO: 418341

SEQ ID NO: 418816 - DNA, 1695 bp, Staphylococcus aureus; identical to SEQ ID NO: 415606

SEQ ID NO: 418817 - DNA, 1026 bp, Staphylococcus aureus
atgattaatcaagtatatcaactcgttgcaccgagacagttcgacgtcacatataataatgttgatatttatggtaatcatgtcatcgtaagacctttatacttgtctatttgtgcagctgatcaaaggtattacacaggtcgaagagatgaaaatgtactgcgcaaaaaattgccaatgtcattagttcatgaagctgttggtgaagttgtattcgatagtaaaggagtatttgaaaaaggtacgaaagtagtaatggtgccgaatacacctacagagcaacatcatattatcgcggagaattacttagcctctagttattttagatctagtggttatgatggttttatgcaagactacgttgtgatggcacatgatcgtatcgttccgctgcctaatgacattgatttgagtacgatttcatacacagagttagtgtcagtaagttatcatgctatacaacgatttgaacgtaaatctatacctttgaaaaacagctttggtatttggggtgatggtaacttaggttatattactgctattttgctacgtaagttgtacccagaagctaaaatttatgtatttggtaagacagactataaattaagtcatttttcatttgtagatgacatctttacagtaaatcaaataccagatgatcttaaaattgatcatgcatttgaatgtgttggaggtaaaggaagtcaagttgcacttcaacaaatagttgaacatatttcaccagaaggcagtattgctttgttaggcgtaagtgaattacccgtggaagtgaatacacgattagtacttgaaaaaggattaacgttgattggtagtagtcgaagcggctctaaagattttgagcaagttgttgatttatatcgtaagtacccagacatagttgaaaagttagcattattaaaaggacatgaaattaatgtatgtacgatgcaagatatcgtccaagcgtttgaaatggatttatcgacatcttggggaaaaacagtattgaaatggacgatttaa

SEQ ID NO: 418818 - DNA, 468 bp, Staphylococcus aureus; identical to SEQ ID NO: 415470

SEQ ID NO: 418819 - DNA, 2097 bp, Staphylococcus aureus; identical to SEQ ID NO: 415521

SEQ ID NO: 418820 - DNA, 936 bp, Staphylococcus aureus; identical to SEQ ID NO: 415471

SEQ ID NO: 418821 - DNA, 1530 bp, Staphylococcus aureus; identical to SEQ ID NO: 413355

SEQ ID NO: 418822 - DNA, 954 bp, Staphylococcus aureus; identical to SEQ ID NO: 418635

SEQ ID NO: 418823 - DNA, 357 bp, Staphylococcus aureus; identical to SEQ ID NO: 405124

SEQ ID NO: 418824 - DNA, 1476 bp, Staphylococcus aureus; identical to SEQ ID NO: 415526

SEQ ID NO: 418825 - DNA, 1506 bp, Staphylococcus aureus; identical to SEQ ID NO: 415527

SEQ ID NO: 418826 - DNA, 2262 bp, Staphylococcus aureus; identical to SEQ ID NO: 418526

SEQ ID NO: 418827 - DNA, 345 bp, Staphylococcus aureus; identical to SEQ ID NO: 405115

SEQ ID NO: 418828 - DNA, 1764 bp, Staphylococcus aureus; identical to SEQ ID NO: 413357

SEQ ID NO: 418829 - DNA, 969 bp, Staphylococcus aureus; identical to SEQ ID NO: 418346

SEQ ID NO: 418830 - DNA, 1380 bp, Staphylococcus aureus; identical to SEQ ID NO: 415536

SEQ ID NO: 418831 - DNA, 969 bp, Staphylococcus aureus; identical to SEQ ID NO: 415670

SEQ ID NO: 418832 - DNA, 1041 bp, Staphylococcus aureus; identical to SEQ ID NO: 415538

SEQ ID NO: 418833 - DNA, 840 bp, Staphylococcus aureus; identical to SEQ ID NO: 415540

SEQ ID NO: 418834 - DNA, 579 bp, Staphylococcus aureus; identical to SEQ ID NO: 415542

SEQ ID NO: 418835 - DNA, 627 bp, Staphylococcus aureus; identical to SEQ ID NO: 415543

SEQ ID NO: 418836 - DNA, 732 bp, Staphylococcus aureus; identical to SEQ ID NO: 413363

SEQ ID NO: 418837 - DNA, 1113 bp, Staphylococcus aureus; identical to SEQ ID NO: 408073

SEQ ID NO: 418838 - DNA, 600 bp, Staphylococcus aureus; identical to SEQ ID NO: 408072

SEQ ID NO: 418839 - DNA, 189 bp, Staphylococcus aureus; identical to SEQ ID NO: 415449

SEQ ID NO: 418840 - DNA, 1641 bp, Staphylococcus aureus; identical to SEQ ID NO: 415561

SEQ ID NO: 418841 - DNA, 1185 bp, Staphylococcus aureus; identical to SEQ ID NO: 415654

SEQ ID NO: 418842 - DNA, 495 bp, Staphylococcus aureus; identical to SEQ ID NO: 416095

SEQ ID NO: 418843 - DNA, 645 bp, Staphylococcus aureus; identical to SEQ ID NO: 415567

SEQ ID NO: 418844 - DNA, 7176 bp, Staphylococcus aureus; identical to SEQ ID NO: 415568

SEQ ID NO: 418845 - DNA, 1251 bp, Staphylococcus aureus; identical to SEQ ID NO: 415569

SEQ ID NO: 418846 - DNA, 1026 bp, Staphylococcus aureus; identical to SEQ ID NO: 415570

SEQ ID NO: 418847 - DNA, 360 bp, Staphylococcus aureus; identical to SEQ ID NO: 415571

SEQ ID NO: 418848 - DNA, 741 bp, Staphylococcus aureus; identical to SEQ ID NO: 413365

SEQ ID NO: 418849 - DNA, 960 bp, Staphylococcus aureus; identical to SEQ ID NO: 415576

SEQ ID NO: 418850 - DNA, 1488 bp, Staphylococcus aureus; identical to SEQ ID NO: 415479

SEQ ID NO: 418851 - DNA, 327 bp, Staphylococcus aureus; identical to SEQ ID NO: 413366

SEQ ID NO: 418852 - DNA, 1146 bp, Staphylococcus aureus; identical to SEQ ID NO: 415580

SEQ ID NO: 418853 - DNA, 888 bp, Staphylococcus aureus; identical to SEQ ID NO: 415481

SEQ ID NO: 418854 - DNA, 1206 bp, Staphylococcus aureus; identical to SEQ ID NO: 418660

SEQ ID NO: 418855 - DNA, 1206 bp, Staphylococcus aureus; identical to SEQ ID NO: 416098

SEQ ID NO: 418856 - DNA, 1110 bp, Staphylococcus aureus; identical to SEQ ID NO: 415585

SEQ ID NO: 418857 - DNA, 1125 bp, Staphylococcus aureus; identical to SEQ ID NO: 415587

SEQ ID NO: 418858 - DNA, 1110 bp, Staphylococcus aureus; identical to SEQ ID NO: 415483

SEQ ID NO: 418859 - DNA, 1029 bp, Staphylococcus aureus; identical to SEQ ID NO: 415484

SEQ ID NO: 418860 - DNA, 765 bp, Staphylococcus aureus; identical to SEQ ID NO: 415588

SEQ ID NO: 418861 - DNA, 687 bp, Staphylococcus aureus; identical to SEQ ID NO: 405043

SEQ ID NO: 418862 - DNA, 669 bp, Staphylococcus aureus
atggaaagtacattagaattaacaaaaattaaagaagtattacaaaaaaacttgaagattttaattattttaccgctattatttttaattattagcgctattgttacatttttcgtcttatcacctaaatatcaagctaatactcaaatcttagtgaatcaaactaagggtgacaatcctcagtttatggcacaagaggttcaaagtaatattcaacttgtaaatacgtataaagaaattgttaaaagtcctagaattttagatgaggtgtcaaaggacttaaatgataagtattcaccatctaaattgtcgagtatgttgacaattacaaaccaagaaaatacgcaacttatcaacatccgagttaaaagtggtcataaacaagattcggaaaaaattgcgaatagcttcgctaaagttacaagtaaacaaattccgaagattatgagtgtggataacgtatcaattttatctaaagcagacggtacagcagttaaagtcgcaccaaaaactgtagtgaatctaatcggtgcattctttttaggattagttgtcgcgcttatatatatcttcttcaaagtaattttcgataagcgaattaaagatgaagaagatgtagagaaagaattaggattgcctgtattgggttcaattcaaaaatttaattaa

SEQ ID NO: 418863 - DNA, 1176 bp, Staphylococcus aureus; identical to SEQ ID NO: 415591

SEQ ID NO: 418864 - DNA, 1545 bp, Staphylococcus aureus; identical to SEQ ID NO: 415460

SEQ ID NO: 418865 - DNA, 1179 bp, Staphylococcus aureus; identical to SEQ ID NO: 414279

SEQ ID NO: 418866 - DNA, 678 bp, Staphylococcus aureus; identical to SEQ ID NO: 408086

SEQ ID NO: 418867 - DNA, 393 bp, Staphylococcus aureus; identical to SEQ ID NO: 408084

SEQ ID NO: 418868 - DNA, 3030 bp, Staphylococcus aureus; identical to SEQ ID NO: 418335

SEQ ID NO: 418869 - DNA, 1524 bp, Staphylococcus aureus; identical to SEQ ID NO: 415387

SEQ ID NO: 418870 - DNA, 660 bp, Staphylococcus aureus; identical to SEQ ID NO: 415510

SEQ ID NO: 418871 - DNA, 999 bp, Staphylococcus aureus; identical to SEQ ID NO: 415512

SEQ ID NO: 418872 - DNA, 1437 bp, Staphylococcus aureus; identical to SEQ ID NO: 413351

SEQ ID NO: 418873 - DNA, 705 bp, Staphylococcus aureus; identical to SEQ ID NO: 414318

SEQ ID NO: 418874 - DNA, 675 bp, Staphylococcus aureus; identical to SEQ ID NO: 418338

SEQ ID NO: 418875 - DNA, 1722 bp, Staphylococcus aureus; identical to SEQ ID NO: 410056

SEQ ID NO: 418876 - DNA, 717 bp, Staphylococcus aureus; identical to SEQ ID NO: 405141

SEQ ID NO: 418877 - DNA, 717 bp, Staphylococcus aureus; identical to SEQ ID NO: 415607

SEQ ID NO: 418878 - DNA, 468 bp, Staphylococcus aureus; identical to SEQ ID NO: 415470

SEQ ID NO: 418879 - DNA, 954 bp, Staphylococcus aureus; identical to SEQ ID NO: 418635

SEQ ID NO: 418880 - DNA, 1563 bp, Staphylococcus aureus; identical to SEQ ID NO: 416083

SEQ ID NO: 418881 - DNA, 2262 bp, Staphylococcus aureus; identical to SEQ ID NO: 418526

SEQ ID NO: 418882 - DNA, 1977 bp, Staphylococcus aureus
atgaaaaagcaaataatttcgctaggcgcattagcagttgcatctagcttatttacatgggataacaaagcagatgcgatagtaacaaaggattatagtaaagaatcaagagtgaatgagaaaagtaaaaagggagctactgtttcagattattactattggaaaataattgatagtttagaggcacaatttactggagcaatagacttattggaagattataaatatggagatcctatctataaagaagcgaaagatagattgatgacaagagtattaggagaagaccagtatttattaaagaaaaagattgatgaatatgagctttataaaaagtggtataaaagttcaaataagaacactaatatgcttactttccataaatataatctttacaatttaacaatgaatgaatataacgatatttttaactctttgaaagatgcagtttatcaatttaataaagaagttaaagaaatagagcataaaaatgttgacttgaagcagtttgataaagatggagaagacaaggcaactaaagaagtttatgaccttgtttctgaaattgatacattagttgtaacttattatgctgataaggattatggggagcatgcgaaagagttacgagcaaaactggacttaatccttggagatacagacaatccacataaaattacaaatgagcgtataaaaaaagaaatgatcgatgacttaaattcaattatagatgatttctttatggagactaaacaaaatagaccgaattctataacaaaatatgatccaacaaaacacaattttaaagagaagagtgaaaataaacctaattttgataaattagttgaagaaacaaaaaaagcagttaaagaagcagacgaatcttggaaaaataaaactgtcaaaaaatacgaggaaactgtaacaaaatctcctgttgtaaaagaagagaagaaagttgaagaacctcaattacctaaagttggaaaccagcaagaggttaaaactacggctggtaaagctgaagaaacaacacaaccagtggcacagccattagtaaaaattccacaagaaacaatctatggtgaaactgtaaaaggtccagaatatccaacgatggaaaataaaacgttacaaggtgaaatcgttcaaggtcccgattttctaacaatggaacaaaacagaccatctttaagcgataattatactcaaccgacgacaccgaaccctattttagaaggtcttgaaggtagctcatctaaacttgaaataaaaccacaaggtactgaatcaacgttgaaaggtattcaaggagaatcaagtgatattgaagttaaacctcaagcaactgaaacaacagaagcttctcaatatggtccgagaccgcaatttaacaaaacacctaagtatgtgaaatatagagatgctggtacaggtatccgtgaatacaacgatggaacatttggatatgaagcgagaccaagattcaacaagccaagtgaaacaaatgcatacaacgtaacgacaaatcaagatggcacagtatcatacggagctcgcccaacacaaaacaagccaagtgaaacaaacgcatataacgtaacaacacatgcaaatggtcaagtatcatacggagctcgcccgacatacaagaagccaagcgaaacaaatgcatacaacgtaacaacacatgcaaatggtcaagtatcatatggcgctcgcccgacacaaaaaaagccaagcaaaacaaatgcatataacgtaacaacacatgcaaatggtcaagtatcatacggagctcgcccgacatacaagaagccaagcgaaacaaatgcatacaacgtaacaacacatgcaaatggtcaagtatcatatggcgctcgcccgacacaaaaaaagccaagcgaaacaaacgcatataacgtaacaacacatgcagatggtactgcgacatatgggcctagagtaacaaaataa

SEQ ID NO: 418883 - DNA, 756 bp, Staphylococcus aureus; identical to SEQ ID NO: 414317

SEQ ID NO: 418884 - DNA, 2250 bp, Staphylococcus aureus; identical to SEQ ID NO: 415533

SEQ ID NO: 418885 - DNA, 969 bp, Staphylococcus aureus; identical to SEQ ID NO: 418346

SEQ ID NO: 418886 - DNA, 759 bp, Staphylococcus aureus; identical to SEQ ID NO: 415535

SEQ ID NO: 418887 - DNA, 495 bp, Staphylococcus aureus; identical to SEQ ID NO: 405107

SEQ ID NO: 418888 - DNA, 1041 bp, Staphylococcus aureus; identical to SEQ ID NO: 415538

SEQ ID NO: 418889 - DNA, 1272 bp, Staphylococcus aureus; identical to SEQ ID NO: 413358

SEQ ID NO: 418890 - DNA, 627 bp, Staphylococcus aureus; identical to SEQ ID NO: 415543

SEQ ID NO: 418891 - DNA, 177 bp, Staphylococcus aureus; identical to SEQ ID NO: 408080

SEQ ID NO: 418892 - DNA, 723 bp, Staphylococcus aureus; identical to SEQ ID NO: 408079

SEQ ID NO: 418893 - DNA, 1056 bp, Staphylococcus aureus; identical to SEQ ID NO: 415559

SEQ ID NO: 418894 - DNA, 558 bp, Staphylococcus aureus; identical to SEQ ID NO: 415562

SEQ ID NO: 418895 - DNA, 1350 bp, Staphylococcus aureus; identical to SEQ ID NO: 415450

SEQ ID NO: 418896 - DNA, 1035 bp, Staphylococcus aureus; identical to SEQ ID NO: 415564

SEQ ID NO: 418897 - DNA, 765 bp, Staphylococcus aureus; identical to SEQ ID NO: 405075

SEQ ID NO: 418898 - DNA, 495 bp, Staphylococcus aureus; identical to SEQ ID NO: 416095

SEQ ID NO: 418899 - DNA, 360 bp, Staphylococcus aureus; identical to SEQ ID NO: 415571

SEQ ID NO: 418900 - DNA, 762 bp, Staphylococcus aureus; identical to SEQ ID NO: 415572

SEQ ID NO: 418901 - DNA, 513 bp, Staphylococcus aureus; identical to SEQ ID NO: 415574

SEQ ID NO: 418902 - DNA, 384 bp, Staphylococcus aureus; identical to SEQ ID NO: 415578

SEQ ID NO: 418903 - DNA, 327 bp, Staphylococcus aureus; identical to SEQ ID NO: 413366

SEQ ID NO: 418904 - DNA, 558 bp, Staphylococcus aureus; identical to SEQ ID NO: 415482

SEQ ID NO: 418905 - DNA, 1167 bp, Staphylococcus aureus; identical to SEQ ID NO: 415584

SEQ ID NO: 418906 - DNA, 1110 bp, Staphylococcus aureus; identical to SEQ ID NO: 415585

SEQ ID NO: 418907 - DNA, 1125 bp, Staphylococcus aureus; identical to SEQ ID NO: 415587

SEQ ID NO: 418908 - DNA, 2610 bp, Staphylococcus aureus; identical to SEQ ID NO: 411243

SEQ ID NO: 418909 - DNA, 1266 bp, Staphylococcus aureus; identical to SEQ ID NO: 407297

SEQ ID NO: 418910 - DNA, 2118 bp, Staphylococcus aureus
atgaaaacagttatttttgctgaaaaaccctcacaagcaagagattatgccaatgctttagggatatcacacaaaaaagatggttatatcgaaggtgtaaatcctatgtttgacgggggagtcataatcacatggggctttggccatctagtggaattaaaattgccaaaagattactcaaaccctataaataattgggatttaaaaaacctaccttatcgtccaagtccatttgaatacaaagtatcagaaggtaaaagcaagcaatttaacattgttaaaactttatttaaagacgctgacattttgatcaatgcaacagatattgatagggaaggaagtaatatcttttattcaacattaaaactgaccggagtcaaaaacaaaaccataaaaagactatggataaactctcttgtagaaaaggaaataaaaaaaggatttcaacaattacaaaataaccatcaagattatcaaaattatcaagaagcttacgcaagacaaacaagcgattatttaattggtatgaatttgagccctgtatattcaaaaatatttcaattgcaaggtgttcaagatgttttctcaatcgggcgtgttcaaacgccaacgttatatatgatttacgaacgttacttagcaatcgaaaactttaaacctgaaacattttatgaaatatttggggagttcgaatctaaaaatggttgctataaaggaaaagccaaaataaaaacaactgataaacaagaaattattaatttgggagaaaagcacaatttgaaagatgctaaagaaggcataattactaaactagagactcaagaaaagcgcacatcatcacctaaactacactctttatcaacattacaatctaaaatcaataaacagtataaatatagtcctgaaaaaactaagaatattgttcaaagtttgtatgagaaaaaaatactttcttatccaagaacggattgtaactacatcacgagtgaagaatatctttatttgaaggaaaacttgcaatcactaatgaatgtatataacaaacatttttcaattgtgtatgataagccaagagctcgatatgtaaataacgaaaaagtaaaagaacactatgcaattatacctacctctcaaatacctacaccacaaaacattgagaaattaagtcaagatgaaaaatatgtgcttgatgaagtagtaagtactacactaagtatgtttgcgaatgactatgtatatgacgaaacaaaaattgaaaccaacgtaaaccaacttattttttacacaactggtcacaccgaaatacaaaaaggctggaaaatcctatttaaacacaaaggcaatgaaaaatctccagaacaacaattaccaaaactcataaaaaatgaatgtgtaaaggctaatatttattcaaataaggggattactcaatctccaaagctttatacagaaggccagcttataacactgatgaaaagttgcgggaagtatttagacgatgaagaagctgaaatattaaaagaaatacaaggtattggcacagaagcaaccagagatggaattatacagagtctaaaaaataaaaattatatcaaaatcgaaaaaaataaagtgcacattacagcaaaagggattttgctttgtaaagcagtaaaagggagtctgcttgctagtgctacaatgacagcaacgtgggaaaaacgcttaaagctcatcggacaaggacaagcaaatactgataactttattgatataacaatgaaattcatagataaagaaattaaagcataccaagagaaatgtgaagacaagtcgataatcaaccaaagtaatattgttgcaaaagataatgaatttggagaatgccctaactgtacagatggtcaactcatagataaaaacaaaattattagttgcacaaattgtgaacaagtattcttcaaaaatttttatcagaaaaaattaacagacaaacaaattcaagagttgatttttaatggtaaaacctcaaaaaaattgaaattaaaaaacaaagctggaaaaacgtatgaagcatatttaattttgacagaagataagaaaacaggaacgaagagatataacattagttttgattaa

SEQ ID NO: 418911 - DNA, 195 bp, Staphylococcus aureus
gtgtttgaaaatgaacctttgaaacctaatcatgaattatatgaattggaaaatgtaactataacagcgcatataactggtaatgattatgaggcaaagtatgacttattagatatttttaaaaacaatctagttaattttctcaataagaatggtctaattgagaatgaagttgatgctaaaaaaggctattaa

SEQ ID NO: 418912 - DNA, 2682 bp, Staphylococcus aureus
atgatgcaatggaaacatttagttgacaatgaaattccaaatgcagagcaaactgtcaattaccaaaacgctgacgataatgctaaaacaaacttcgatgatgccaaacgtctagcaaatacattgctaaatagtgataacacaaatgtgaatgatatcaatggcgcaatccaagcagtcaatgatgcaatccataatcttaatggtgatcaacgactacaagatgctaaagacaaggcaattcaatcaattaatcaagctttagctaataagctaaaagaaatcgaagcttcaaatgcgacggatcaagacaagcttattgcgaaaaataaagcagaagaattggcaaacagcatcatcaacaacattaataaagcaacaagtaatcaggctgtatctcaagttcaaacagcaggcaaccacgcgattgaacaagtgcatgctaatgaaataccaaaagcaaaaattgatgccaataaagacgttgataaacaagttcaagcattaattgacgaaatcgatcaaaatccaaatctaacagataaggaaaaacaagcgcttaaagatcgaatcaatcaaatactgcaacaaggtcataacgacattaacaatgcactgactaaagaagaaattgaacaagctaaagcacaacttgcgcaagcattacaagacatcaaagatttagtgaaagctaaagaagatgcgaaaaatgcaataaaagccttagctaatgcgaagcgtgatcaaatcaattcaaatccagatttaacacctgagcaaaaagcaaaagcgctcaaagaaattgacgaagctgaaaaacgagcactacaaaacgttgagaatgctcaaactatagatcaattaaatcgaggattaaacttaggtttagatgacattagaaatacacatgtatgggaggttgatgaacaacctgctgtaaatgaaatttttgaagcaacacctgagcaaatcttagttaatggtgaactcattgtacatcgtgatgacatcattacagaacaagatattcttgcacacataaacttaattgatcagctttcagcagaagttattgatacaccatcaactgcaacgatttctgatagcttaacagcaaaagttgaagttacattgcttgatggatcaaaagtgattgttaatgttcctgtaaaagttgtagaaaaagaattgtcagtagtcaaacaacaggcaattgaatcaatcgaaaatgcggcacaacaaaagattgatgaaatcaataatagtgtgacattaacactggaacaaaaagaagctgcaattgcagaagttaataagcttaaacaacaagcaattgatcatgttaacaatgcacctgatgttcattcagttgaagaaattcaacaacaagaacaagcgtatattgaacaatttaatccagaacaatttacgattgaacaagcaaaatcaaatgcaattaaatcgattgaagatgcaattcaacatatgattgatgaaatcaaagctcgtactgatctaacagataaagagaagcaagaagctattgctaagttaaatcaattaaaagaacaagcaattcaagcgattcaacgtgcgcaaagcatcagtgaaataactgagcaattggaacaatttaaagctcaaatgaaagcagctaatccaacagcaaaagaactagctaaacgcaagcaagaagctattagtagaattaaagacttttcaaatgaaaaaataaatagtattcgaaatagtgaaattggcacagctgatgaaaaacaagcagcaatgaatcaaattaacgaaattgtgcttgaaacaattagagatattaataatgcgcatacattacagcaagttgaggctgcattgaacaatggtattgctcgaatttcagcagtacaaattgtaatatctgatcgtgctaaacaatcgtcaagtactggaaatgaatctaatagccatttaacaattggttatggaactgcaaatcatccatttaacagttcgactattggacataaaaagaaacttgatgaagatgatgacattgatccacttcatatgcgtcactttagtaataatttcggtaatgttattaaaaacgctattggtgtggtgggtatctctggcttactagctagtttctggttcttcattgccaaacgtcgtcgtaaagaagatgaagaggaagaattagaaataagagataataataaagattcaataaaagagactttagacgatacaaaacatttaccacttttatttgcgaaacgtcgcagaaaagaagatgaagaagatgttactgttgaagaaaaagattcgctaaataatggcgagtcactcgataaagttaaacatacgccgttcttcttaccaaaacgtcgtcgtaaagaagatgaagaagatgtggaagttacaaatgaaaacacagatgaaaaagtgttgaaagataacgaacattcaccactcttattcgcaaaacgacgcaaagataaagaggaagatgttgaaacaacaactagtattgaatctaaagatgaggacgttcctttattattggctaaaaagaaaaatcaaaaagataaccaatccaaagacaaaaagtcagcatcaaaaaatacttctaaaaaggtagcagctaaaaagaagaaaaagaaatctaagaaaaataaaaaataa

SEQ ID NO: 418913 - DNA, 405 bp, Staphylococcus aureus; identical to SEQ ID NO: 412636

SEQ ID NO: 418914 - DNA, 534 bp, Staphylococcus aureus
  misc_feature (515)..(524): n is a, c, g, or t
atgattattcatattactaatgcaaaagatgcgccagaaaaggcggatataggcacgttagagaagcccggacaagatggtgttgatgacggttcttcgttcgatgaatcaacttatacatcaagcaaatctggtgtgttagttgtttatgttgttgataataatactgctcgtgcaacatggtacccagatgattcaaacgatgagtacacaaaatacaaaatctacggcacgtggtacccgttttataaaaagaatgatggaaacttaactaagcaatttgttgaagaaatatctaacaacacactgaatcaagctaaacagtatgtagatggtaagttacaaagtataagttggcaacaacataagttaacagaacataacggtcaatcaatccaaaagaacttatataacgccaaaggtaatttagaagcattgggcgctgggaattattacgtaacaagtgtgcctgatttaccaggtagcgttgaaagttatgagggttatttatcggnnnnnnnnnntattcgttaa

SEQ ID NO: 418915 - DNA, 495 bp, Staphylococcus aureus
  misc_feature (19)..(28): n is a, c, g, or t
atgagggttatttatcggnnnnnnnnnntattcgttaaagatgatacaaacaagctatttaacttcacaccttataactctaaaaagatttacacacgatcaatcacaaacggcagacttgagcaacagtggacagttcctaatgaacataaatcaacggtattgttcgacggtggcgcaaatggtgtaggtacaacaatcaatctaactgaaccgtacacaaactattctattttgttggtaagtggaacttatccaggtggcgttattgagggattcggactaactgcattacctaacgcgattcaattgagtaaagcgaatgtagttgactcagacggcaacggtggcggtatttatgagtgcttactatccaaaacaagtagcactactttaagaatagataacgatgtgtactttgatttaggtaaaacatcaggttctggagcgaatgccaacaaagttactataactaaaattatggggtggaaataa

SEQ ID NO: 418916 - DNA, 129 bp, Staphylococcus aureus; identical to SEQ ID NO: 407347

SEQ ID NO: 418917 - DNA, 657 bp, Staphylococcus aureus
  misc_feature (611)..(620): n is a, c, g, or t
ttgaagtcacttaaaggtagtggcgttcgaagtggttcaggtgttaataaggctgcatctgcttgggcaggcgatatacgtcgtgcagcaaaacgaatgggtgttaatgttacttcgggtgatgtaggaaatattattagcttgattcaacacgaatcaggaggaaatgcaggtataactcaatctagtgcgcttagagacatcaacgttttacagggcaatccagcaaaaggattgcttcaatatatcccacaaacatttagacattatgctgttagaggtcacaacaatatatatagtggttacgatcagttattagcgttctttaacaacagatattggcgctcacagtttaacccaagaggtggttggtctccaagtggtccaagaagatatgcgaatggtggtttgattacaaagcatcaacttgctgaagtgggtgaaggagataaacaggaaatggttatccctttaactagacgtaaacgagcaattcaattaactgaacaggttatgcgcatcatcggtatggatggcaagccaaataacatcactgtaaataatgatacttcaacagttgaaaaattgttgaaacaaattgttatgttaannnnnnnnnncagatgcattgattcaaactgtttcttctcaggataa

SEQ ID NO: 418918 - DNA, 654 bp, Staphylococcus aureus
  misc_feature (631)..(640): n is a, c, g, or t
atggttgaagcagcaggcgataaaatcaaagatggtgcatcttggttaggcgataaaatcggcgatgtgtgggattacgtacaacatccagggaaactagtaaataaagtaatgtcaggtttaaatattaattttggaggcggagctaacgctacagtaaaaatagctaaaggcgcatactcattgctcaaaaagaaattagtagacaaagtaaaatcgtggtttgaagatttcggtggtggaggcgatggaagctatctatttgaatatccaatctggcaaagatttggacgctacacaggtggacttaactttaatggcggtcgtcactatggtatagactttggtatgccttctggaacaaacgtttatgccgttaaaggtggtatagcagataaggtatggactgattacggtggcggtaattctatacaaattaagactggtgctaatgaatggaactggtatatgcatttatctaagcaattagcaagacaaggccaacgtattaaagctggtcaactgatagggaaatcaggtgctacaggtaatttcgttagaggagcacacttacatttccaattgatgcaagggtcacatccagggaatgatacagctaaagatccagaannnnnnnnnnagaaaaatggttga

SEQ ID NO: 418919 - DNA, 162 bp, Staphylococcus aureus
atgagcgacacatataaaagctacttaatagcagtactgtgcttcacagtcttagcgattgtgcttatgccattgctgtacttcactacagcatggtcaattgcaggattcgcaagtatcgcaacattcatattctataaggaatacttttatgaagaatga

SEQ ID NO: 418920 - DNA, 495 bp, Staphylococcus aureus
ttgattaaattaacaccgaagcaagaaaagtttgtattaggactcatcgagggcaagagccaacgcaaagcttatattgacgcaggctattcgactaaaggcaaaagtgataattatatagatagtcgagcttttgagttgagtaagaatagtgcggttttagataggtatgaagaattgcgtcaagaagcagctgaacaatcaaaatggacacgccaaaaggcttttgaagaatatgagtggttaaagaatgtagctaagaatgacattgaaatagagggagtaaagaaagcgacagctgatgcattcctcgctagtttggacggcatgaatagaatgacgttaggaaatgaagttctgactaacaaaaagattgaaactgaaatcaagatgcttgagaaaaaaattgaccaaatggataaatcagaaaataattcacaagaagcagaagttgctaaagcacttattaagttagcgggtgttaataatgattaa

SEQ ID NO: 418921 - DNA, 258 bp, Staphylococcus aureus; identical to SEQ ID NO: 408173

SEQ ID NO: 418922 - DNA, 186 bp, Staphylococcus aureus
atgagtgattataaattaaaaataattgaattgatcaaaagcgatataacaggttaccaaattcacaaacaaactggcgtagcgcaatatgtaatttcacaattaaggcaaggaaagcgcgaagtagataacttaactttaaatacaactgaaaaactatacagttacgcacgacaagtgttataa

SEQ ID NO: 418923 - DNA, 243 bp, Staphylococcus aureus; identical to SEQ ID NO: 411711

SEQ ID NO: 418924 - DNA, 231 bp, Staphylococcus aureus
atgtcgttttatttaactacggatgatacaaaacgttttacagattttccaactgaacgtaaaggggtagctggttggaacttatatgtagaagcttcaaacacaggtggctttgttcataggctagttcgtaatagtgttacagcatctgctgagatactattgaaaaattatgatagtaaaacaagttcagggccatggactttacacgaagggagaattataagttaa

SEQ ID NO: 418925 - DNA, 1443 bp, Staphylococcus aureus; identical to SEQ ID NO: 408563

SEQ ID NO: 418926 - DNA, 147 bp, Staphylococcus aureus; identical to SEQ ID NO: 407426

SEQ ID NO: 418927 - DNA, 1086 bp, Staphylococcus aureus; identical to SEQ ID NO: 408860

SEQ ID NO: 418928 - DNA, 147 bp, Staphylococcus aureus
ttgagcacggcattagaaagtgtagataaagactattatattactgttttagaagatgctgttggtgatagatcagatgataaacatgactttattattgaacaaattttatcacgctcatgtgacattgaatccgtagagtcatga

SEQ ID NO: 418929 - DNA, 1047 bp, Staphylococcus aureus
ttgaaacataaatctaaacctgctcaatcattcaataacgatgttaatcaaaaggatacacgtgcaacatcattattcgaaacagatcctagtatatctaacaatgatgatagcggacaatttaacgttgttgactcaaaagatacacgtcaatttgtcaaatcaattgctaaagatgcacatcgcattggtcaagataacgatatttatgcgtctgtcatgattgcccaagcaatcttagaatctgactcaggtcgtagtgctttagctaagtcaccaaaccataatttattcggtatcaaaggtgcttttgaagggaattctgttccttttaacacattagaagctgatggtaataaattgtatagtattaatgctggattccgaaaatatccaagcacgaaagaatcactaaaagattactctgaccttattaaaaatggtattgatggcaatcgaacaatttataaaccaacatggaaatcggaagccgattcttataaagatgcaacatcacacttatctaaaacatatgctacagatccaaactatgctaagaaattaaacagtattattaaacactatcaattaactcagtttgacgatgaacgcatgccagatttagataaatatgaacgttctatcaaggattatgatgattcatcagatgaattcaaacctttccgcgaggtatctgatagtatgccatatccacatggccaatgtacttggtacgtatataaccgtatgaaacaatttggtacatctatctcaggtgatttaggtgatgcacataattggaataatcgagctcaataccgtgattatcaagtaagtcatacaccaaaacgtcatgctgctgttgtatttgaggctggacaatttggtgcagatcaacattacggtcatgtagcatttgttgaaaaagttaacagtgatggttctatcgttatttcagaatccaatgttaaaggattaggtatcatttctcatagaactatcaatgcagctgccgctgaagaattatcatatattacaggtaaataa

SEQ ID NO: 418930 - DNA, 339 bp, Staphylococcus aureus
  misc_feature (324)..(333): n is a, c, g, or t
atggaacaaacacaaaaattaaaattaaatttgcaacattttgcgagtaacaatgttaaaccgcaagtatttaaccctgataatgtaatgatgcacgaaaagaaagatggcacgttgatgaatgaattcacaacgcccatcttacaagaggttatggaaaactctaaaattatgcaattaggtaagtacgaaccaatggaaggtactgagaagaagtttactttttgggctgataaaccaggtgcttactgggtaggtgaaggtcaaaaaatcgaaacatctaaagctacatgggttaatgctactatgagagagtttaaattnnnnnnnnnnggttaa

SEQ ID NO: 418931 - DNA, 297 bp, Staphylococcus aureus
atgaaaccactattcagcgaaaagataaacgaaagcttgaaaaaatatcaacctactcatgtcgaaaaaggattgaaatgtgagagatgtggaagtgaatacgacttatataagtttgctcctactaaaaaacacccgaatggttacgagtataaagacggttgcaaatgtgaaatctatgaggaatataagcgaaacaagcaacggaagataaacaacatattcaatcaatcaaacgttaatccgtctttaagccacaaaatgaaaaacaagtacacgctaaacaaacagcaatag

SEQ ID NO: 418932 - DNA, 1083 bp, Staphylococcus aureus
gtgagtcatcgttatatacctttaactgaaaaagacaagcaagaaatgttacaaacaattggtgcaaaatctataggagaattattcggtgatgtaccaagtgacattttattaaatagagatttaaatattgctgaaggcgaagcggaaacaacgttacttagaagattaaatcgcattgcaagcaagaatatcactaaagaaacgcatacatcatttttgggtgctggtgtttatgatcattacgcgccatcagttgtggatgctatgatttcaagatcagaattttacacagcatatacgccatatcaaccggaaatttctcaaggtgaattacaagccatttttgagttccaaactttaatttgtgaattaacagatatggatgtagcaaattcttctatgtatgatgggatgactagctttgctgaagcatgtatcttagcatttagtcaaacaaagaaaaataaaattgtagtctcaaaaggtttacattatcaagcattacaagtacttcatacttatgctaagacgcgtaaggaattcgaagtagtggaaatcgatttagatggcactgttacagatttgaaaaaattagaagcagcagtggatgatgaaacagcagctgttgcagtacaatatccaaacttttacggttcaattgaagatcttgaaaagattcaaagctttattgaagataaaaaagcattatttatcgtatatgcaaatccattagcattgggattacttacacctccaggttcatttggtgcagatattgttgtaggtgatactcagccattcggaattcctgctcaattcggtgggccacattgtggatattttgcaacgacgaaaaagttaatgcgtaaagtgccaggtagattagtcggtcaaacacaagatgatgaaggtaatcgtggctttgtattaacattacaagcacgtgaacaacatattcgacgcgataaagcgacatctaatatttgttctaaccaagcattaaatgctttagcgtcatcaattgcaatgtcacagcacttggtaaacaaggtatctatgatattgcagttcaaaatatag

SEQ ID NO: 418933 - DNA, 144 bp, Staphylococcus aureus
gtgaagtacaatattatcggtggttttgatttaggtgttgtttcagacgactttaaaaatcacatgttaatagctgtaactgaattaagaacaaaagatgaaatcgatacatttgtagaaaaggctggtgagttaaatgactag

SEQ ID NO: 418934 - DNA, 402 bp, Staphylococcus aureus; identical to SEQ ID NO: 408187

SEQ ID NO: 418935 - DNA, 771 bp, Staphylococcus aureus
atgagtcaagcagccgaaacattagatggttggtatagtctacatttattttatgcagttgattgggcatcattacgtctagttccaaagaacgaacgcgatgcacttgtcactgaatttcaatcatttttagaaaatacagcaactgtaagatcatcaaaatctggtgatcaagctatttataatataactggtcaaaaagcagatttgttattatggttcttacgtcctgaaatgaagtctttaaatcatattgaaaatgaatttaacaaattgcgcattgctgacttcctaatccctacatattcatatgtttcagtcattgaattgagcaattatttagctggtaaatctgatgaagatccttatgagaaccctcatatcaaagcaagattatacccagaattaccacattctgattatatttgtttctatccaatgaacaaacgtcgtaatgaaacttataactggtacatgttaactatggaagaacgccaaaaattaatgtatgaccatggtatgattggtagaaaatatgctggcaaaatcaaacaatttattactggttctgtagggtttgatgatttcgaatggggcgtaacattgttctcagatgacgtattacaattcaaaaaaattgtatacgaaatgcgctttgatgaaacaacagcacgatacggtgaattcggtagtttctttgtaggacatattattaacacaaacgaattcgatcaattctttcgatttcttaatacattggtacgtttataa

SEQ ID NO: 418936 - DNA, 618 bp, Staphylococcus aureus; identical to SEQ ID NO: 407393

SEQ ID NO: 418937 - DNA, 348 bp, Staphylococcus aureus; identical to SEQ ID NO: 407392

SEQ ID NO: 418938 - DNA, 141 bp, Staphylococcus aureus; identical to SEQ ID NO: 407391

SEQ ID NO: 418939 - DNA, 156 bp, Staphylococcus aureus; identical to SEQ ID NO: 409129

SEQ ID NO: 418940 - DNA, 444 bp, Staphylococcus aureus; identical to SEQ ID NO: 408078

SEQ ID NO: 418941 - DNA, 843 bp, Staphylococcus aureus
atgaagatcggggatatatctattcattatctaaatggtggcaatacaaaaatggatggcggtgcaatgtttggtgttgttccgaagccgttgtggtcaaagcaatacaatgcaaatgaacgaaatcaaatcaatttaccgacacatccaattttgattcaaacggctcaatataatttgattatagatgcgggtattggtaatggtaaattatctgaaaagcaattacgtaattttggagtagatgaagaaagtcatataattgctgatttggcaaattataatttaacgccaaaggatattgattatgtgctaatgacacatatgcattttgatcatgctgccggtttgactgatcaagcgggacatgcaatttttgaaaatgcgattcatgttgtgcaacaagatgagtggcatgagtttattgcacctaatataagaagtaaatcaacttactgggataagaataaaggcgattatagtaacaagttgattttattcgaaaaacattttgaaccggttccgggtatcaagatgcaacatagtggaggtcatagctttggccacacgattattacgattgaaagtcaaggagataaagcagttcatatgggtgatatattcccaactactgcacataaaaatcctctatgggtaacggcatatgatgattatcctatgcaatcgattcgtgaaaaagaacgcatgataccatattttattcagcaacaatattggttcttgttttatcatgatgaaaactactttgctgtaaaatacagcgatgatggtgaaaacatagatgcatatattttacgtgaaacattagttgataataactaa

SEQ ID NO: 418942 - DNA, 852 bp, Staphylococcus aureus; identical to SEQ ID NO: 415080

SEQ ID NO: 418943 - DNA, 936 bp, Staphylococcus aureus; identical to SEQ ID NO: 417815

SEQ ID NO: 418944 - DNA, 942 bp, Staphylococcus aureus; identical to SEQ ID NO: 413347

SEQ ID NO: 418945 - DNA, 1638 bp, Staphylococcus aureus; identical to SEQ ID NO: 415075

SEQ ID NO: 418946 - DNA, 1353 bp, Staphylococcus aureus; identical to SEQ ID NO: 416656

SEQ ID NO: 418947 - DNA, 663 bp, Staphylococcus aureus; identical to SEQ ID NO: 416657

SEQ ID NO: 418948 - DNA, 1578 bp, Staphylococcus aureus; identical to SEQ ID NO: 418546

SEQ ID NO: 418949 - DNA, 1302 bp, Staphylococcus aureus; identical to SEQ ID NO: 408062

SEQ ID NO: 418950 - DNA, 1539 bp, Staphylococcus aureus; identical to SEQ ID NO: 408058

SEQ ID NO: 418951 - DNA, 420 bp, Staphylococcus aureus; identical to SEQ ID NO: 408056

SEQ ID NO: 418952 - DNA, 789 bp, Staphylococcus aureus; identical to SEQ ID NO: 408560

SEQ ID NO: 418953 - DNA, 633 bp, Staphylococcus aureus
atgtatccaatcaaaaatctcgaggatttatacgacaaagaaggatatcgagatagcgaatttaaaaaaagtgataaagggacatggacgatatacacagatttcgctaaaagtaataaaccgggtgaattggatgatgaaggtatggttttaaatctggataggaatactagaaccgctaaaggccattattttgttactacattttaccggaatggtaaactaccagatgaaaagaattataaaattgaaatgaaaaataataagattattttattagatgaagtaaaagatgataagctcaagcagaaaatagaaaactttaaatttttcggtcaatatgcaaatcttaaagaattgagaaaatataataatggtgatgtttcaattaatgaaaatgttcctagttatgatgttgaatacaaaatgagcaataaagatgaaatagttaaggaattaagaagtcgttataatatttcgactgaaaaatcacctatattaaaaatgcatattgatggggacctgaaaggcagttctgtaggttatagaaagttagaaattgacttttcaaaacgtgaaaacagcaaattatcagtcattgaatttttaagttataaaccagcgaaaaaatag

SEQ ID NO: 418954 - DNA, 447 bp, Staphylococcus aureus
atgttgctagaagtgaaacatgtaaaaaaggtttatggtaaaggtttgaatgctacgacagcacttaatcaaatgaatttatcagttggagctggtgaatttgttgcaattatgggtgagtctgggtcagggaagtctacactactaaatttaattgcttcttttgatggactaactgaaggtgacattattgtggatggcgcacatttaaataatatgaaaaataaaagtaaagcattgtatcgtcaacaaatggtaggttttgtttttcaagattttaatcttttaccaacaatgacgaataaagaaaatataatgatgccattaattttagctggtgctaaacgaaaagatatagaacaaagggtacatcagttggcagtacaattacatttagagggattcttaaacaagtatccttctgaaatctctgggggtcagaagtaa

SEQ ID NO: 418955 - DNA, 393 bp, Staphylococcus aureus; identical to SEQ ID NO: 408084

SEQ ID NO: 418956 - DNA, 1524 bp, Staphylococcus aureus; identical to SEQ ID NO: 415387

SEQ ID NO: 418957 - DNA, 921 bp, Staphylococcus aureus; identical to SEQ ID NO: 415465

SEQ ID NO: 418958 - DNA, 951 bp, Staphylococcus aureus; identical to SEQ ID NO: 415466

SEQ ID NO: 418959 - DNA, 1377 bp, Staphylococcus aureus; identical to SEQ ID NO: 413350

SEQ ID NO: 418960 - DNA, 1212 bp, Staphylococcus aureus; identical to SEQ ID NO: 415475

SEQ ID NO: 418961 - DNA, 1185 bp, Staphylococcus aureus; identical to SEQ ID NO: 413356

SEQ ID NO: 418962 - DNA, 1764 bp, Staphylococcus aureus; identical to SEQ ID NO: 413357

SEQ ID NO: 418963 - DNA, 1098 bp, Staphylococcus aureus; identical to SEQ ID NO: 413359

SEQ ID NO: 418964 - DNA, 372 bp, Staphylococcus aureus; identical to SEQ ID NO: 409074

SEQ ID NO: 418965 - DNA, 282 bp, Staphylococcus aureus; identical to SEQ ID NO: 405087

SEQ ID NO: 418966 - DNA, 1185 bp, Staphylococcus aureus; identical to SEQ ID NO: 415654

SEQ ID NO: 418967 - DNA, 645 bp, Staphylococcus aureus; identical to SEQ ID NO: 415567

SEQ ID NO: 418968 - DNA, 7176 bp, Staphylococcus aureus; identical to SEQ ID NO: 415568

SEQ ID NO: 418969 - DNA, 972 bp, Staphylococcus aureus; identical to SEQ ID NO: 415573

SEQ ID NO: 418970 - DNA, 888 bp, Staphylococcus aureus; identical to SEQ ID NO: 415481

SEQ ID NO: 418971 - DNA, 1206 bp, Staphylococcus aureus; identical to SEQ ID NO: 416098

SEQ ID NO: 418972 - DNA, 1110 bp, Staphylococcus aureus; identical to SEQ ID NO: 415483

SEQ ID NO: 418973 - DNA, 1176 bp, Staphylococcus aureus; identical to SEQ ID NO: 418360

SEQ ID NO: 418974 - DNA, 177 bp, Staphylococcus aureus
atgaaaaaattatttggtcttattttagtattaacatttgcagttgtattagcagcttgcggtaatggaaacaaaagtggcagtgacgataagaaaataacagtaggtgcttcaccagcaccacatgctgaaattttagaaaaaagcaaaaccattattagagaaaaaaggttatga

SEQ ID NO: 418975 - DNA, 1032 bp, Staphylococcus aureus
gtgaaaaaagatccaaaacataaagatgactatgagaaaaactacaaaaaattaaacgacgatcttaagaaaattgataacgatatgaagcaagttacaaaagataagcaaggtaatgcagtattcatttcacatgaatcaattggatacttagctgatcgttatggttttgttcaaaaaggtattcaaaatatgaatgctgaagatccatcacaaaaagaattaactaaaattgttaaagaaattagagatagcaatgctaaatatattctttacgaagataatgttgcgaataaagtgactgaaacaattcgtaaagaaacagatgcgaagcctttaaaattctacaacatggagtctttaaataaagaacaacagaaaaaagataatattacgtatcaatcattaatgaaatctaatattgaaaatatcggtaaagctttagacagtggtgttaaagtgaaagacgacgaagctgaaagtaaacacgacaaagcaatttctgatgggtattttaaagatgagcaagttaaagaccgtgaattaagcgattatgctggtgaatggcaatctgtttacccttacttaaaagacggtacgcttgatgaagtgatggaacataaagctgaaaatgatccgaagaaatctgctaaagatttaaaagcttattatgacaaaggatataaaactgatattactaacattgatataaaaggaaatgaaattacatttactaaagatggtaagaaacacactggtaaatatgaatacaatggtaagaaaacattgaaatatcctaaaggtaaccgtggcgtgagatttatgtttaaattggtcgatggtaatgataaagacttaccgaaattcatccaatttagcgatcacaacattgcacctaaaaaggcagaacacttccatatctttatgggtaatgataatgacgcgttattaaaagaaatggataactggccaacatattatccttcaaaattaaataaagaccaaatcaaagaagaaatgttagcgcattaa

SEQ ID NO: 418976 - DNA, 1563 bp, Staphylococcus aureus; identical to SEQ ID NO: 405121

SEQ ID NO: 418977 - DNA, 1230 bp, Staphylococcus aureus; identical to SEQ ID NO: 405122

SEQ ID NO: 418978 - DNA, 855 bp, Staphylococcus aureus
gtgggggaaaatttattaaaagccattcaagacgtgacaggattagaagaaaatgatcctgtcattcaagcttgggcaaaagcatatggcgttattgcggatgtgttcatccaaattgaaaaagaaatttatgatcaaatgatgtggattggttttaaaccattcaaaattaccaatattaaacaagaatctgaagacattaaatcatttacagttgaaactgaagaatatgactttagtgaatttacaccaggccaatacatcacagttgatgtttctagtgataaacttccatatagagctaaacgtcactattctatcgtatcaggtgaaaaaaaccatttaacttttggcgttaaacgtgatgtcacaacagaacatgaaggcgaagtttcaacaattttacacgatgagattaaagaaggcgatatgattaatttagctgcgcctgtaggtggattcgtattagagaatacgactgaaccacaacttttcttaggttcaggtattggtgttacacctttagtagctatgtatgaagctgcctctgccaaaggtttagatacacagatggttcaagttgctgaaaatgaacaacatttacctttcaaagacaacttcaacagtatcgcaagccatcatgacaacgctaaattatatacacacttaaaagataaacaaggctatattggtgctgaagaattacaagtatttttagcaaataaacctgaaatttatatctgtggtggtacaaaattcttacaatctatgatcgaagcacttaaatctttaaattacgatatggatcgcgtacactacgaaacgtttattccaagactaagcgttgcagtataa

SEQ ID NO: 418979 - DNA, 369 bp, Staphylococcus aureus
ttgaatatacactcccatttgaaaacttttattcacaataaactactttattatcaatgtcaaaccataaaaggagtacaactttttaaaacactccttttatgtggcaaaaacactccttttatgtggcaaaaacactccttttatgtggcaaaaacactccttttatgtggcaaaaacactccttttatgtggcaaaaacactccttttatgtggcaaaaacactccttttatgtggcaaaaacactcctttaggcattgaaatcccttgttgctctagggctgaaaaagcccctaaaaaggtttttaaaaagatttataaaaatatattaaaaagttcgaggggggctacctatttttcatcctaa

SEQ ID NO: 418980 - DNA, 285 bp, Staphylococcus aureus
atggctgaaaagaaattggcacaaattggagatgaaataaatgaaaaatggcctggaacgataacgagtattgttcatagaatagggccattacaaatttcagatatcgctgtattaattgcagtttcttcaccgcatcgtaaagatgcctatcgagcaaatgaatatgcaattgagcgtataaaagaaattgttccgatttggaaaaaagaaatttgggaagatggttcaaaatggcaagggcatcaaaaagggaattatgaagaagcgaagagggaggaataa

SEQ ID NO: 418981 - DNA, 1053 bp, Staphylococcus aureus
gtggcatttgcctttgtgggtgttgtcgttggtgccggctttgctactggtcaagaaattttccagtttttcacaagtcatggcgcatatagcatttcaggcattattgtaacaggactattgattactttaggtggaatgattgtcatgcatacaggtcatcatctaaagtctagaaatcattctgattcaattaactatttcttatacccctctattgcaagaggttttgatattattttgacaatgtttatgttgtctttagctattattatgactgcaggtggtgcgtcaaccattcatcaaagtttcaacttaccgtattggctgagcgcactcatattagtcgcctttattttagcaacactgtttctaaaattcgatcgtttaattgctgtgcttggcggtgttaccccatttttaattgcgattgtcattatgattgcggtctactatttcacaacaagtcatcttgattttactgccgctaataatgatgctcagattcataagcagaaatcattatcacctggatggtggtttgatgcgattaactatgcaagtttgcaaattgctgctgccttcagcttcttatcagtgatgggtagcaaagttaaatatcgtgactcaacgttatatgggggcttgattggcggtttaatcattacatttttactcatgatgattaatctaggtttaatttctcaattcgataaaattaaacacgtcgatttacctacattaaaattagcgacacaaatgtctccgtcaattggtattattatgtctgtcattatgatacttgtcatctacaatactgttgttggattaatgtatgcatttgcgtcacgtttcagcgttccattcagcagacgttacttcatcattattattacaatggctgtcatcacttatattagtacatttatcggtttcatttcattaattggaaaagtattccctattatgggattgttcggtttcatcttactcatacctgtactctataaaggtttaattaagcgtattaccggcaaatctcatatcgattaa

SEQ ID NO: 418982 - DNA, 699 bp, Staphylococcus aureus; identical to SEQ ID NO: 409348

SEQ ID NO: 418983 - DNA, 396 bp, Staphylococcus aureus
atgaagaaattaatcatcagtattatggcggtcatgctatttttaacaggttgtggtaaaagtcaagagaaagccactctggaaaaggatatcgataatttacaaaaagaaaataaagaattaaaagacaaaaaagaaaagcttcaacaagaaaaagaaaaattagcagataagcaaaaagaccttgaaaaagaagtgaaagatttaaaaccttcaaaagaagataacaaggatgataaaaaagacgaagacaaaaataaagacaaagataaagataaagaggcatcacaagataagcaatcaaaagatcaaactaagtcatcggataaagataatcacaaaaagcctacatcaacagataaagatcaaaaagctaatgacaaacaccaatcataa

SEQ ID NO: 418984 - DNA, 693 bp, Staphylococcus aureus
atgaaagatttaccaattattgcattagattttgaatcaaaagaaaaagtaaatcaatttttagatttatttgatgaatcattattcgtaaaagtaggtatggaacttttttatcaagaaggtcctcaattaattaatgagataaaagaaagaggccatgatgtatttttagatttaaaactgcatgatattcctaatacagttggtaaggcgatggaaggactagctaaattgaatgttgatctggtaaatgttcatgctgctggtggcgtaaaaatgatgtctgaggccattaaaggattaagaaaacataatcaacatacaaaaattattgcagtaacacagcttacgtcaacaacagaagacatgttacgacacgaacaaaatatacaaacatcgattgaagaggccgttttaaattatgccaagttagcaaatgcagctggtttagatggcgttgtttgttcacctcttgaaagtcgtatgttgactgaaaagttaggtacatcatttttaaaagtaacaccaggtattagacctaaaggtgcatctcaagatgaccaacaccgtattacgacaccggaagaagcaagacagcttggttcgacgcatattgtagtcggtagaccgattacacaaagtgacaatccagtcgaaagttatcataaaattaaagaaagttggttagtataa

SEQ ID NO: 418985 - DNA, 216 bp, Staphylococcus aureus; identical to SEQ ID NO: 409121

SEQ ID NO: 418986 - DNA, 1170 bp, Staphylococcus aureus; identical to SEQ ID NO: 418341

SEQ ID NO: 418987 - DNA, 180 bp, Staphylococcus aureus
atgttaagttatggtggattacttaaagaaaagcataaaattttaaacttagacgatgccgaagatggtaatttgattaatacaagtgatgaagataaaacgacagacgaagaggaaaaagcacattcaattacagcaatttggaatttcgaaaagcaaaattattatttaagacattag

SEQ ID NO: 418988 - DNA, 180 bp, Staphylococcus aureus; identical to SEQ ID NO: 408994

SEQ ID NO: 418989 - DNA, 147 bp, Staphylococcus aureus; identical to SEQ ID NO: 407426

SEQ ID NO: 418990 - DNA, 180 bp, Staphylococcus aureus
atgttaagttatggtggattacttaaagaaaagcataaaattttaaacttagacgatgccgaagatggtaatttaattaatacaagtgacgaagataaaacaacagacgaagaggaaaaagcacattcaattacagcaatttggaatttcgaaaagcaaaattattatttaagacattag

SEQ ID NO: 418991 - DNA, 198 bp, Staphylococcus aureus
atgaacttttttgatatccataagattccgaacaaaggcattccattatcggtacaacgtaaattatggcttagaaacttcatgcaagctttctttgtagtgttctttgtttatatggctatgtatttaattcgaaacaactttaaggcggcccaaccgtttttaaaaggttcttcatcttttatggtgggaaggtaa

SEQ ID NO: 418992 - DNA, 237 bp, Staphylococcus aureus
atggatgaagataaaggtaccggaaaaatattatcttcattgtatataaaagacgatgaattaaaaaaacaatattctacatgtagagaatttctagatgattatttatatacagcatggattattcctgttttgctgaatgaacatgcaacaagtcaattagaggaatatttaggtagatatttaattaaccaaaacgtaccaatccttaatttactttcacatactttcaaataa

SEQ ID NO: 418993 - DNA, 678 bp, Staphylococcus aureus
atggctagttatttattttttcatcctaaaccagcgtgtgatacttatggggatatgaatatttatcacgacaaatttggaaataatgaggacccatacgtatggagtgaacggtttttgcatagcttttgtaaaataacggattatgcatatagtaaatctactcaaaaggacattattttttggatatcaataaataaagaaggcaataatttaaaatatttatgtgatttagtatttaaaatagaaaagtgggatttttggtataaaacttttagtgaacaaaaagatgccatagctacaaataaagaattaacgataaatgacgcagtagtagaaggcgatgaagaagcatatgaatatcattattcttggatcaacagaggggaacacaagtgggaaccaacttatcgaaggcgaagactcacattaaaagcagatcccgtcttgagttttcagcctcaaaatcgacaaggtaatttactagatgtcacggaattactaaaaacaattgtgaattttaatgttgaaaaatcacctgcaaaaagtgggacttcttataaagctttcgaacttgaagaagagcaggcaagcaaactatatgaggaaataaaacgattatcttttattcgattaaagggaagggacttaaaaaacttaagaagaaacttttcttga

SEQ ID NO: 418994 - DNA, 291 bp, Staphylococcus aureus
ttgaaggcatttaaaggacaaaagaaaacaggctatgaatttgaagaaagattgaacacatttattcaatcatatgtcattattttacttatagatataaggttaccgactgttaggttatatattattaggcatattgtggatacatgcgaaaaagaagtggacaatcaaaaaagaattatactaatagagaaatctattaaaaagtacagatatgtaaaagaacagattaaaagatttggaaatgcgttgaaagaagaattatctaacgcgactttgtctattgaatag

SEQ ID NO: 418995 - DNA, 1515 bp, Staphylococcus aureus
atgattaaaaataagtggaaaatagagctgtggtttcaattcttcagttattttatacacaaaattgattccgaatttatactaaaagaatatgcacaacatattttacctgaagaaatgagaacaaattatgtagtgggagaagcacaacctaatgaaactatatatataagctactttgtaaatacctctaatcaaaatattgaacaacacactgtgaaatgtagtgaagagggtatatttatcgataaaattcctagtggctttactaaagataatctgacgtattctattgatagtcaaagtatggtggacatagatgaactttcaaatgaaatcattgaccaaggtgtagatgctctagatgtgttagaatcaacaactctagatacatatttcaccgagttcttaaccacaatcaataaaacaacagattttgctaaaaagatagctaacaatacaataaaacagattcgagaaaatattgaattaaaaaaagctaactatagaatagattatgaaaaagctattgacgatgtatcttctttggaatcatttataaatctgaaagatacaatattagaaactcatcaagatttatctaaagaaaattttgacgatgtattaataagtgattttttaacgaaatatctcatttataaagaaaaacaagactcttatgttaagaaaaatatctcaaacttaaataagtctaactactttaaacaattagtgacggaaggtttaatcaaagaacgaacaagtaattctcaatactttgaaattgctaatagtatcaaaccttcgattcataacaagtatagcttaaatcaatctgatgagttagaccaatttaggcaagctgttatcggcatttctctcaacttatatgatcaaaatgatacatactttaaattcatccgtagtattctgacagaaaagtcacgtaaagttaatttaacaatagatggacttattgagtctcaaaacactataaatgaatttatgaaaaaacaagatctaattagcgacaatgaattatattatttaacaactattgaagatacgttccactttgcattattcactgccatttccgatttaatggatgaattagttttagtaacaagtaaaatcattcaaagtgcgacacaatacgatgtattagtcgctttatatagtatttctaatttaaaaaatgatttgaataaattagcacacaaacacgaacgatcattaacccgttttaaaagtcttattgatggttatgtaagaaatactagattaaaagatttaattcataatattattatgaatgatataaaaatgacagaaaaagtagaaaggtctttactcaccgatctaaaaaaatataatattagcaacttttataaaagagacaactttaataataatcctaatgattttctcgataaactaatgattcaaataatcagtaagttttacaagacacgtttagaagatattaacgatggaccaaatttatattattaa

SEQ ID NO: 418996 - DNA, 294 bp, Staphylococcus aureus
gtggtaccaacagtagtcgtagatttagtggatcaattaaaagtaaaatattcaatcaaattgatactagaagtattaaacatacctaaatcaacatattaccgatggaaaaacaaaacccataaaaatgataccgtaacacaaaaagttattgaattatgtaaagctaaccactatacctacggttatcgtaagattacagcattgattaatcaatgttatacatcaccaattaatcataagagagtacagagaatgatgcagaagcatcatttgaactgccgagttacctaa

SEQ ID NO: 418997 - DNA, 294 bp, Staphylococcus aureus
atgaataaaaagagtctccactttttattgttaaaacgcaaggttttaggtattgcattcaatttacctgaaggagaagaatttacatttcatgacttgaacagtcgtgcaaatgtaacgtgttctaaagaagtacaacaaaatgttggacgttggttcgcatattttgtaaaacatgcgccacgtgttccatttattattatcggtaaggatactcacggtcatttagtttatcttaaaacaggtcctaatccacaccataacagcaacccttcgaaaggaggtgttcgctaa

SEQ ID NO: 418998 - DNA, 237 bp, Staphylococcus aureus; identical to SEQ ID NO: 409858

SEQ ID NO: 418999 - DNA, 1338 bp, Staphylococcus aureus
atgaagcaacctattttaaataaattagaaagtttaaatcaagaagaagcgatttctttgcatgttccgggtcataaaaatatgactatcggtcatttatctcaattatcaatgacaatggataaaactgaaatacctggattagatgatttacatcatcctgaagaagtcattttggaaagtatgaagcaggtggagaaacattcagattatgatgcttatttcttagtgaatggcaccacttcaggaatattatctgtcatccagtctttttcacagaaaaaaggcgatatcttaatggcaagaaatgtacataaatctgtgttacatgcgctcgatattagccaacaagaagggcattttattgaaacgcatcaaagtccgttaacgaatcattataataaagttaatttaagccgtttgaataatgacggtcacaaacttgctgtgttgacttatcctaactattacggtgaaacatttaatgtagaagaggttatcaaatctttgcaccaattaaatattcctgtactcattgacgaagcacacggcgcgcactttggattgcaaggatttccagattctacattaaattatcaagctgactatgttgttcaatcttttcataaaacgttaccagctttaacgatgggctcggtactttatattcataaaaatgcaccttatagagaaactattatagaatatctaagctacttccaaacatctagtccttcgtatttgattatggctagtttagagtcagctgccgagttctataaaacatatgatagtaccgtgttttttgataagagagcgcaattaatcgaatgtttggagaagaagggttttgaaatgcttcaagttgatgatccgttgaagttgctgataaaatatgaaggttttacaggtcatgatattcaaaattggtttatgaatgcacatatctatttagaattagcggacgactatcaagcattagcgatattgccgttatggcatcatgatgatacgtatttatttgatttgcttttacgtaaaattgaagatatgattttaccgaaaaaatcagtttctaaagttaaacaaacacaacttttaacaactgaaggtaactataaaccaaaacgctttgaatatgttacttggtgtgatttgaaaaaggcaaaaggtaaagttctggcgcgacatattgtcccgtatccgccagggattcctattattttcaaaggagaaacaataactgaaaatatgatagaattggtaaatgaatatctggaaactggaatgatagttgaaggaattaaaaataataaaattttagttgaggatgaataa

SEQ ID NO: 419000 - DNA, 618 bp, Staphylococcus aureus; identical to SEQ ID NO: 407077

SEQ ID NO: 419001 - DNA, 330 bp, Staphylococcus aureus; identical to SEQ ID NO: 407076

SEQ ID NO: 419002 - DNA, 927 bp, Staphylococcus aureus
atggatgaacagcaacaattgacgaatgcatatcattcaaataaattatcgcatgcctatttatttgaaggtgatgatgcacaaacgatgaaacaagttgcgattaattttgcaaagcttattttatgtcaaacagatagtcaatgtgaaacaaaggttagtacatataatcatccagactttatgtatatatcaacaactgagaatgcaattaagaaagaacaagttgaacaacttgtgcgtcatatgaatcaacttcctatagaaagcacaaataaagtgtacatcattgaagactttgaaaagttaactgttcaaggggaaaacagtatcttgaaatttcttgaagaaccaccggacaatacgattgctattttattgtctacaaaacctgagcaaattttagacacaatccattcaaggtgtcagcatgtgtatttcaagcctattgataaagaaaagtttataaatagattagttgaacaaaacatgtctaagccagtagctgaaatgattagtacttatactacgcaaatagataatgcaatagctttaaatgaagaatttgatttattagcattaaggaaatcagttatacgttggtgtgaattgttgcttactaacaagccaatggcacttataggtattattgatttattgaaacaggctaaaaataaaaaactgcaatctttaactattgcagctgtgaatggtttcttcgaagatatcatacatacaaaggtaaatgtagaggataaacaaatatatagtgatttaaaaaatgatattgatcaatatgcgcaaaagttgtcgtttaatcaattaattttgatgtttgatcaactgacggaagcacataagaaattgaatcaaaatgtaaatccaacgcttgtatttgaacaaatcgtaattaagggtgtgagttag

SEQ ID NO: 419003 - DNA, 804 bp, Staphylococcus aureus; identical to SEQ ID NO: 407074

SEQ ID NO: 419004 - DNA, 348 bp, Staphylococcus aureus
ttggatcgcaatgaaatatttgaaaaaataatgcgtttagaaatgaatgtcaatcaactttcaaaggaaacttcagaattaaaggcacatgcagttgaattagtagaagaaaatgtagcgcttcaacttgaaaatgataatttgaaaaaggtgttgggcaatgatgaaccaactactattgatactgcgaattcaaaaccagcaaaagctgtgaaaaagccattaccaagtaaagataatttggctatattgtatggagaaggatttcatatttgtaaaggcgaattatttggaaaacatcgacatggtgaagattgtctgttctgtttagaagttttaagtgattaa

SEQ ID NO: 419005 - DNA, 726 bp, Staphylococcus aureus
atgttaaaagagaatgaacgatttgatcaactaatcaaagaagattttagtattattcaaaatgatgatgttttttcgttttcaacggatgctttgttgttagggcattttacaaaacctagaacaaaagatattgtgttggacttatgttcaggcaatggggtgatacccttgttattgtttgcgaaacatccacgacatatagaaggtgttgagattcaaaaaacacttgtcgatatggcgcgacgcacatttcaattcaatgatgttgatgaatatttaacaatgcatcacatggatttgaaaaacgttactaaagtatttaaaccttcacaatatactttagtaacgtgtaatccgccttattttaaagagaatcagcaacaccaacatcaaaaagaagcacataagatagcgagacatgagattatgtgtacacttgaagattgcatgattgcagcccgtcatttattaaaagaaggtggcaggctaaatatggtacatcgtgcagatagactaatggatgtcttgtttgaaatgagaaaagtgaatattgaacctaagaaagtcgtttttatatatagtaaggtagggaaatcagcacaaacgatagtagtagaaggtcgaaaaggtggaaatcaaggtttagaaatcatgcccccattttatatttataatgaagatggtaattatagcgaagaaatgaaggacgtatattatggatag

SEQ ID NO: 419006 - DNA, 249 bp, Staphylococcus aureus; identical to SEQ ID NO: 407071

SEQ ID NO: 419007 - DNA, 840 bp, Staphylococcus aureus; identical to SEQ ID NO: 410326

SEQ ID NO: 419008 - DNA, 1974 bp, Staphylococcus aureus
atggctaaagaaacattttatataacaaccccaatatactatcctagtgggaatttacatataggacatgcatattctacagtggctggagatgttattgcaagatataagagaatgcaaggatatgatgttcgttatttgactggaacggatgaacacggtcaaaaaattcaagaaaaagctcaaaaagctggtaagacagaaattgaatatttggatgagatgattgctggaattaaacaattgtgggctaagcttgaaatttcaaatgatgattttatcagaacaactgaagaacgtcataaacatgtcgttgagcaagtgtttgaacgtttattaaagcaaggtgatatctatttaggtgaatatgaaggttggtattctgttccggatgaaacatactatacagagtcacaattagtagacccacaatacgaaaacggtaaaattattggtggcaaaagtccagattctggacacgaagttgaactagttaaagaagaaagttatttctttaatattagtaaatatacagaccgtttattagagttctatgaccaaaatccagattttatacaaccaccatcaagaaaaaatgaaatgattaacaacttcattaaaccaggacttgctgatttagctgtttctcgtacatcatttaactggggtgtccatgttccgtctaatccaaaacatgttgtttatgtttggattgatgcgttagttaactatatttcagcattaggctatttatcagatgatgagtcactatttaacagatactggccagcagatattcatttaatggctaaggaaattgtgcgattccactcaattatttggcctattttattgatggcattagacttaccgttacctaaaaaagtctttgcacatggttggattttgatgaaagatggaaaaatgagtaaatctaaaggtaatgttgtagaccctaatattttaattgatcgctatggtttagatgctacacgttattatctaatgcgtgaattaccatttggttcagatggcgtatttacacctgaagcatttgttgagcgtacaaatttcgatctagcaaatgacttaggtaacttagtaaaccgtacgatttctatggttaataagtactttgatggcgaattaccagcgtatcaaggtccacttcatgaattagatgaagaaatggaagctatggctttagaaacagtgaaaagctacactgaaagcatggaaagtttgcaattttctgtggcattatctacggtatggaagtttataagtagaacgaataagtatattgacgaaacaacgccttgggtattagctaaggacgatagccaaaaagatatgttaggcaatgtaatggctcacttagttgaaaatattcgttatgcagctgtattattacgtccattcttaacacatgcgccgaaagagatttttgaacaattgaacataaacaatcctcaatttatggaatttagtagtttagagcaatatggtgtgcttactgagtcaattatggttactgggcaacctaaacctattttcccaagattggatagcgaagcggaaattgcatatatcaaagaatcaatgcaaccgcctgctactgaagaggaaaaagaagagattcctagcaaacctcaaattgatattaaagactttgataaagttgaaattaaggcagcaacgattattgatgctgaacatgttaagaagtcagataagcttttaaaaattcaagtagacttagattctgaacaaagacaaattgtatcaggaattgccaaattctatacaccagatgatattattggtaaaaaagtagcagttgttactaacctgaaaccagctaaattaatgggacaaaaatctgaaggtatgatattatctgctgaaaaagatggtgtattaaccttagtaagtttaccaagtgcaattccaaatggtgcagtgattaaataa

SEQ ID NO: 419009 - DNA, 330 bp, Staphylococcus aureus
gtgatctcttctttcgattcacctttactaataatttctccagttaatggattttttagtgttggcgtcgttattgtcttctcacctttttgtccttctcttgttactttttctgtccctggtgctaaatcaggattaaatttacgttctttctcgaatggaatttcttctttttctacaatcgagtctccttttacaggtccatattttgttacgctatcgaccggtggtctaactacgtctcctgtttctggattcttaattcctggtttacctggaacttcttctttctctcctgttggtaacttcggatcaaattcgtctcgatga

SEQ ID NO: 419010 - DNA, 129 bp, Staphylococcus aureus
atgaggagattactcagtctattactagctagtacaatgattttagtcgcatgtgggaatgctaacaatgaaaataagaaaaaggaagacgaaaaaaaatcagaagtaaaaaaaagctacgaaaaataa

SEQ ID NO: 419011 - DNA, 348 bp, Staphylococcus aureus
atgcgattgaaaaaatggaacatcattagaccaccatttaatgtgacacgtatatctgaatacgcagcagttgcagcacttgaagatcaacaatatttaaaagaggtaacacataaaaatagtgttgaacgcgaaagattttatcaattacctcaaagtgagtatttcttgccaagtcaaacgaattttatatttgtaaaaacaaagcgggtaaatgaactttatgaagcacttttaaatgtagggtgtattacgcgaccatttccaactggtgttagaattacaattggttttaaagaacaaaatgataaaatgttagaagttttatcaaattttaaatacgaatag

SEQ ID NO: 419012 - DNA, 570 bp, Staphylococcus aureus; identical to SEQ ID NO: 407016

SEQ ID NO: 419013 - DNA, 756 bp, Staphylococcus aureus
gtgtcagattatgtatataatcttgtgaaaaagcatcattctgttagaaaatttaagaataaacctttaagtgaagacgttgttaagaaattggtagaagctggacaaagcgcttcgacgtcaagtttcctacaagcatactcaattattggtatcgacgatgagaagattaaagaaaatttacgagaagtttctggacaaccttatgttgtagaaaatggctatttattcgtctttgttattgattattatcgtcatcatttagttgatcaacatgctgaaactgatatggaaaatgcatatggttcaacggaaggtttgctagtaggtgcaatcgatgcagcattagttgctgaaaatattgcggtaactgctgaagatatggggtatggcattgtctttttaggatcattaagaaatgatgttgaacgagttcgagaaattttagacttacctgactatgtcttcccggtatttggtatggcagtaggggaacccgcagatgatgaaaatggtgcagccaagccacgcttaccatttgaccatgtcttccatcataataagtatcatgctgataaggaaacacagtatgcacaaatggcagattacgaccagacaatcagcgagtactatgatcaacgtacaaacgggaatcgcaaagaaacatggtcgcagcaaattgagatgttcctaggaaacaaagcaagattagatatgttagaacaattgcaaaaatcaggcttaatacagcgatag

SEQ ID NO: 419014 - DNA, 252 bp, Staphylococcus aureus
atgatgaataaccgcgaacaaattgaacagtccgttataagtgctagtgcgtataacggcaatgacacagagggattactaaaagagattgaggacgtgtataagaaagcacaagcgtttgatgaaatacttgagggtttacctaatgctatgcaagatgcactcaaagaagatattgatcttgatgaagcagtagggattatgacggggcaagtggtctataaatatgaggaggcgcaggaaaatgactaa

SEQ ID NO: 419015 - DNA, 228 bp, Staphylococcus aureus
atggaagagaataaaactttaaaagaatacttgcgtaattttttagaaggttacaaatatgtagttgaaaacagatacatttatcagtttagtagtaatccggaagccttcccattcatgagaaaagacgattacaagatttcgatattttatctaaatcaatctttttttgaagaaccttgcatcgttgttatctcaaatgacagtaaattaaaaacaatacattga

SEQ ID NO: 419016 - DNA, 405 bp, Staphylococcus aureus; identical to SEQ ID NO: 412636

SEQ ID NO: 419017 - DNA, 192 bp, Staphylococcus aureus
atgatagaattaaaagatttaaccatacaaaaaggtaatatacatattttgaagaaacttaatttgaaatttcaatgtggaaaatcatatgcacttattggtaaaagtggatgcggtaaatctacattattaaatactattgctggacttgaaaaaacgggaaacaatatgtctattttaatggtcaattag

SEQ ID NO: 419018 - DNA, 297 bp, Staphylococcus aureus; identical to SEQ ID NO: 418792

SEQ ID NO: 419019 - DNA, 333 bp, Staphylococcus aureus
gtgagattgatctttggacatcgaacctttacgcattcaatattatttatcgcaatcatagcatttttattgcaaattattcagacgcctaattattatatggcagcaattataattgggttagtgtcacatgttatactagatatgataacaccaagaggcgtgaaattattttatccgttaccgtttaatgtgaagacaccgattcaatttaaaacaggtggacttgtagacttatctttagctacagcgttaatggtcggaacagtttatgttttatttcagcctttcatcaatgatataataagcaactggaatactaagtttttatag

SEQ ID NO: 419020 - DNA, 1443 bp, Staphylococcus aureus; identical to SEQ ID NO: 408563

SEQ ID NO: 419021 - DNA, 1188 bp, Staphylococcus aureus; identical to SEQ ID NO: 415274

SEQ ID NO: 419022 - DNA, 333 bp, Staphylococcus aureus; identical to SEQ ID NO: 419019

SEQ ID NO: 419023 - DNA, 1371 bp, Staphylococcus aureus; identical to SEQ ID NO: 415272

SEQ ID NO: 419024 - DNA, 1032 bp, Staphylococcus aureus; identical to SEQ ID NO: 413289

SEQ ID NO: 419025 - DNA, 1071 bp, Staphylococcus aureus; identical to SEQ ID NO: 415268

SEQ ID NO: 419026 - DNA, 1758 bp, Staphylococcus aureus; identical to SEQ ID NO: 413291

SEQ ID NO: 419027 - DNA, 1977 bp, Staphylococcus aureus; identical to SEQ ID NO: 413293

SEQ ID NO: 419028 - DNA, 537 bp, Staphylococcus aureus; identical to SEQ ID NO: 406191

SEQ ID NO: 419029 - DNA, 1563 bp, Staphylococcus aureus; identical to SEQ ID NO: 415264

SEQ ID NO: 419030 - DNA, 1005 bp, Staphylococcus aureus; identical to SEQ ID NO: 413296

SEQ ID NO: 419031 - DNA, 1413 bp, Staphylococcus aureus; identical to SEQ ID NO: 416498

SEQ ID NO: 419032 - DNA, 1713 bp, Staphylococcus aureus; identical to SEQ ID NO: 415261

SEQ ID NO: 419033 - DNA, 981 bp, Staphylococcus aureus; identical to SEQ ID NO: 415259

SEQ ID NO: 419034 - DNA, 516 bp, Staphylococcus aureus; identical to SEQ ID NO: 413298

SEQ ID NO: 419035 - DNA, 756 bp, Staphylococcus aureus; identical to SEQ ID NO: 416495

SEQ ID NO: 419036 - DNA, 741 bp, Staphylococcus aureus; identical to SEQ ID NO: 413299

SEQ ID NO: 419037 - DNA, 204 bp, Staphylococcus aureus; identical to SEQ ID NO: 408071

SEQ ID NO: 419038 - DNA, 849 bp, Staphylococcus aureus
atgaatcatattgaaataagtaaagatgtaaagataccagtattaggtttcggagtatttcaaattcctcaagaacaaacagtagaagcggttaaagaagcaattaaagcgggttatagacatattgatacagcacaaagttatttaaatgaaactgaagtaggtcaaggtattgaagcttcaggtattgatagaagtgaactattcattacgactaaagtatggattgaaaatgttaactatgaagatactatcaaatcaatcgaacgatcattacaacgattaaatttggactatcttgatctagtgcttattcaccaaccttacaatgacgtatatggctcatggcgtgcattagaagagttaaaagaaaatggtaaaattaaagcaatcggtgtatctaacttcggcgttgatcgaattgtagatttaggtattcacaatcaaattcaaccacaagtgaaccaaatagaaattaatccattccatcaacaagaagaacaagttgcagcacttcaacaagaaaatgttgtggtagaagcttgggcaccatttgcagaaggtaaaaatcaattattccaaaatcaattgttgcaggccattgcagataaatacaacaaatcaattgcacaagttattttacgctggttagtagaacgtgacattgttgtactcgcaaaatcagtgaatccagaacgtatggctcaaaacttagatatatttgattttgaacttacagaagaagataaacaacaaattgcgacattagaagaaagtaatagccaatttttctcacatgctgatccagagatgattaaagcacttacaagcagagaattagatgtttaa

SEQ ID NO: 419039 - DNA, 426 bp, Staphylococcus aureus; identical to SEQ ID NO: 413302

SEQ ID NO: 419040 - DNA, 1665 bp, Staphylococcus aureus; identical to SEQ ID NO: 416537

SEQ ID NO: 419041 - DNA, 171 bp, Staphylococcus aureus; identical to SEQ ID NO: 408070

SEQ ID NO: 419042 - DNA, 648 bp, Staphylococcus aureus; identical to SEQ ID NO: 409262

SEQ ID NO: 419043 - DNA, 804 bp, Staphylococcus aureus; identical to SEQ ID NO: 413306

SEQ ID NO: 419044 - DNA, 807 bp, Staphylococcus aureus
atgaaaaataaattgattatagggcgatatttaccaattaattcttttgttcatcatcttgatccaagagcaaagttaatgtttgtttttctttttattatattaatatttttctgtcattcaccattaacatatctttgggtgtttgcacttatcttattcattatgagattagcaaaaattcaattatggttcctaatcaaaggtttaacaccaatatttttctttttaatcttcacattaatgatgcatatatttttaactaaaggtggatatgtattagttgaatggcatggcatcacgattgaaactaatggtattttagaagggctatatatatcattgcgtttaattgggattgtgatgattgcaacaattatgacactatctacaagtccaattgatttaacagatgcgtttgaaagattacttgcaccactaaagatgtttaaattaccagttcatcaattaagtatgataatgtccattgcgttacgattcatcccgacgttaatggatgagttagataaaattattttggcgcaaaagtcgcgtggttctgaaataagttcagggaacattgcaacacgtattaaatcatttattccattactagtgccactattcatctcagctttccaacgcgccgaagaattagcggtcgcaatggaagttaggggttatgatgccaatgttaagagaacgagctacagacagcttaaatggcaattgagagatacgatatctttaaccatgattatcccaattgcaattattttattcgtattaaaatattcaggagtgtaa

SEQ ID NO: 419045 - DNA, 861 bp, Staphylococcus aureus; identical to SEQ ID NO: 413307

SEQ ID NO: 419046 - DNA, 810 bp, Staphylococcus aureus; identical to SEQ ID NO: 416283

SEQ ID NO: 419047 - DNA, 945 bp, Staphylococcus aureus; identical to SEQ ID NO: 413308

SEQ ID NO: 419048 - DNA, 366 bp, Staphylococcus aureus; identical to SEQ ID NO: 406229

SEQ ID NO: 419049 - DNA, 1293 bp, Staphylococcus aureus; identical to SEQ ID NO: 415298

SEQ ID NO: 419050 - DNA, 180 bp, Staphylococcus aureus; identical to SEQ ID NO: 406234

SEQ ID NO: 419051 - DNA, 501 bp, Staphylococcus aureus; identical to SEQ ID NO: 406235

SEQ ID NO: 419052 - DNA, 399 bp, Staphylococcus aureus; identical to SEQ ID NO: 406238

SEQ ID NO: 419053 - DNA, 186 bp, Staphylococcus aureus; identical to SEQ ID NO: 406239

SEQ ID NO: 419054 - DNA, 318 bp, Staphylococcus aureus; identical to SEQ ID NO: 406241

SEQ ID NO: 419055 - DNA, 369 bp, Staphylococcus aureus; identical to SEQ ID NO: 406242

SEQ ID NO: 419056 - DNA, 264 bp, Staphylococcus aureus; identical to SEQ ID NO: 406243

SEQ ID NO: 419057 - DNA, 435 bp, Staphylococcus aureus; identical to SEQ ID NO: 406245

SEQ ID NO: 419058 - DNA, 654 bp, Staphylococcus aureus; identical to SEQ ID NO: 413314

SEQ ID NO: 419059 - DNA, 354 bp, Staphylococcus aureus; identical to SEQ ID NO: 406247

SEQ ID NO: 419060 - DNA, 279 bp, Staphylococcus aureus; identical to SEQ ID NO: 406248

SEQ ID NO: 419061 - DNA, 624 bp, Staphylococcus aureus; identical to SEQ ID NO: 406251

SEQ ID NO: 419062 - DNA, 663 bp, Staphylococcus aureus; identical to SEQ ID NO: 406252

SEQ ID NO: 419063 - DNA, 390 bp, Staphylococcus aureus; identical to SEQ ID NO: 415223

SEQ ID NO: 419064 - DNA, 1335 bp, Staphylococcus aureus; identical to SEQ ID NO: 415222

SEQ ID NO: 419065 - DNA, 165 bp, Staphylococcus aureus; identical to SEQ ID NO: 415217

SEQ ID NO: 419066 - DNA, 3168 bp, Staphylococcus aureus; identical to SEQ ID NO: 415215

SEQ ID NO: 419067 - DNA, 252 bp, Staphylococcus aureus; identical to SEQ ID NO: 413319

SEQ ID NO: 419068 - DNA, 441 bp, Staphylococcus aureus; identical to SEQ ID NO: 409580

SEQ ID NO: 419069 - DNA, 1212 bp, Staphylococcus aureus; identical to SEQ ID NO: 415212

SEQ ID NO: 419070 - DNA, 1023 bp, Staphylococcus aureus; identical to SEQ ID NO: 415314

SEQ ID NO: 419071 - DNA, 600 bp, Staphylococcus aureus; identical to SEQ ID NO: 415211

SEQ ID NO: 419072 - DNA, 486 bp, Staphylococcus aureus; identical to SEQ ID NO: 413321

SEQ ID NO: 419073 - DNA, 1260 bp, Staphylococcus aureus; identical to SEQ ID NO: 415207

SEQ ID NO: 419074 - DNA, 495 bp, Staphylococcus aureus; identical to SEQ ID NO: 415206

SEQ ID NO: 419075 - DNA, 1005 bp, Staphylococcus aureus; identical to SEQ ID NO: 413322

SEQ ID NO: 419076 - DNA, 606 bp, Staphylococcus aureus; identical to SEQ ID NO: 415203

SEQ ID NO: 419077 - DNA, 783 bp, Staphylococcus aureus; identical to SEQ ID NO: 415201

SEQ ID NO: 419078 - DNA, 798 bp, Staphylococcus aureus; identical to SEQ ID NO: 415200

SEQ ID NO: 419079 - DNA, 771 bp, Staphylococcus aureus; identical to SEQ ID NO: 413324

SEQ ID NO: 419080 - DNA, 555 bp, Staphylococcus aureus; identical to SEQ ID NO: 413325

SEQ ID NO: 419081 - DNA, 942 bp, Staphylococcus aureus; identical to SEQ ID NO: 413326

SEQ ID NO: 419082 - DNA, 1155 bp, Staphylococcus aureus; identical to SEQ ID NO: 413327

SEQ ID NO: 419083 - DNA, 906 bp, Staphylococcus aureus; identical to SEQ ID NO: 416309

SEQ ID NO: 419084 - DNA, 303 bp, Staphylococcus aureus; identical to SEQ ID NO: 406287

SEQ ID NO: 419085 - DNA, 411 bp, Staphylococcus aureus; identical to SEQ ID NO: 415194

SEQ ID NO: 419086 - DNA, 1716 bp, Staphylococcus aureus
atgagctttaaaatgacgcaaaatcaatatacgagcttatacggtccaactgttggagattctattcgtttaggtgatacgaatctatttgctcaaatagaaaaagactatgcggtttatggtgaagaagctacttttggtggtggtaaatctattagagacggtatggcgcaaaatcctcgtgtaacacgtgatgacgtgaacgttgcagaccttgtcatttctaatgccgttattatcgattacgataaagtggttaaagctgatataggcattaaaaatggttatattttcgccataggtaatgccggcaacccagatataatggataatgtcgacattattataggttcaacaacagatatcattgccgctgaaggtaaaatcgtcactgctggtggtattgatactcatgttcattttattaatcctgaacaagcagaggtcgcattagaaagtggtattacgactcatattggtggtggtactggtgcttcagaaggttctaaagcaacaactgtaactccaggtccatggcatattcatagaatgttagaagctgccgaaggtttaccgattaatgtcggttttacaggtaaaggacaagcaacaaatccaactgcactcattgaacaaatcaatgccggagcaattggattaaaagtacatgaagactggggtgcaacaccatctgctttgagtcatgcattagatgttgctgatgaatttgatgttcaaattgcattacatgcagatactttaaatgaagcaggatttatggaagacacaatggctgctgttaaagaccgtgtacttcatatgtaccatactgaaggtgctggtggcggtcatgcgcctgatttaattaaatccgctgcattttcaaatattttaccttcatctacaaatccaactttgccttatacacataatactgtagatgaacatttagatatggtaatgattactcaccatttaaatgcggctattcctgaagatatcgcattcgcagattcacgtattcgtaaagaaacgattgcagcagaagatgttctgcaagatatgggtgtattcagtatgattagttccgattcacaagcaatgggccgtgtaggtgaagtaattacacgaacatggcaagtagcacatcgcatgaaagaacaacgtggtcctttagatggtgattttgaacataatgataataatcgcatcaaacgttatatcgctaaatatacaattaacccagcaattacacatggtatttctgaatatgtaggatctatcgagccgggcaaactagctgacattgtcttatgggacccaattttctttggggttaaacctgaattagttgtaaagggcggattaattaactctgccgtaaatggcgatgcaaatggttctatacctacatctgaaccgatgaagtaccgtaaaatgtatggtcaatacggcggaaaccttacaagtacgtcaatgacattcgtgtctaaaactgcttatgaaaatggtatcaatcgtgcattaaatttaaaacgcatggtgcgtccagttaaaaatattagacaattatctaaagcaaatatgaaaaataacagtgcaacacctaaattagacgttgatccacaaacatatgaagtatatgtagatggagaaaacattacaagtaatgcagcaactgagttaccattaactcaaagatacttcttattctag

SEQ ID NO: 419087 - DNA, 453 bp, Staphylococcus aureus; identical to SEQ ID NO: 406290

SEQ ID NO: 419088 - DNA, 615 bp, Staphylococcus aureus; identical to SEQ ID NO: 415190

SEQ ID NO: 419089 - DNA, 348 bp, Staphylococcus aureus; identical to SEQ ID NO: 406294

SEQ ID NO: 419090 - DNA, 744 bp, Staphylococcus aureus; identical to SEQ ID NO: 415187

SEQ ID NO: 419091 - DNA, 804 bp, Staphylococcus aureus; identical to SEQ ID NO: 415185

SEQ ID NO: 419092 - DNA, 1398 bp, Staphylococcus aureus; identical to SEQ ID NO: 415184

SEQ ID NO: 419093 - DNA, 1083 bp, Staphylococcus aureus; identical to SEQ ID NO: 415183

SEQ ID NO: 419094 - DNA, 423 bp, Staphylococcus aureus; identical to SEQ ID NO: 415182

SEQ ID NO: 419095 - DNA, 954 bp, Staphylococcus aureus; identical to SEQ ID NO: 415180

SEQ ID NO: 419096 - DNA, 1125 bp, Staphylococcus aureus; identical to SEQ ID NO: 415179

SEQ ID NO: 419097 - DNA, 777 bp, Staphylococcus aureus; identical to SEQ ID NO: 416317

SEQ ID NO: 419098 - DNA, 234 bp, Staphylococcus aureus; identical to SEQ ID NO: 406306

SEQ ID NO: 419099 - DNA, 474 bp, Staphylococcus aureus; identical to SEQ ID NO: 406307

SEQ ID NO: 419100 - DNA, 3039 bp, Staphylococcus aureus; identical to SEQ ID NO: 416318

SEQ ID NO: 419101 - DNA, 693 bp, Staphylococcus aureus; identical to SEQ ID NO: 413333

SEQ ID NO: 419102 - DNA, 738 bp, Staphylococcus aureus; identical to SEQ ID NO: 406312

SEQ ID NO: 419103 - DNA, 330 bp, Staphylococcus aureus; identical to SEQ ID NO: 406313

SEQ ID NO: 419104 - DNA, 873 bp, Staphylococcus aureus; identical to SEQ ID NO: 414990

SEQ ID NO: 419105 - DNA, 1380 bp, Staphylococcus aureus; identical to SEQ ID NO: 415170

SEQ ID NO: 419106 - DNA, 357 bp, Staphylococcus aureus; identical to SEQ ID NO: 416319

SEQ ID NO: 419107 - DNA, 186 bp, Staphylococcus aureus; identical to SEQ ID NO: 416428

SEQ ID NO: 419108 - DNA, 189 bp, Staphylococcus aureus; identical to SEQ ID NO: 415169

SEQ ID NO: 419109 - DNA, 636 bp, Staphylococcus aureus; identical to SEQ ID NO: 406319

SEQ ID NO: 419110 - DNA, 918 bp, Staphylococcus aureus; identical to SEQ ID NO: 413335

SEQ ID NO: 419111 - DNA, 531 bp, Staphylococcus aureus; identical to SEQ ID NO: 406321

SEQ ID NO: 419112 - DNA, 1605 bp, Staphylococcus aureus; identical to SEQ ID NO: 415167

SEQ ID NO: 419113 - DNA, 765 bp, Staphylococcus aureus; identical to SEQ ID NO: 415166

SEQ ID NO: 419114 - DNA, 1314 bp, Staphylococcus aureus; identical to SEQ ID NO: 415164

SEQ ID NO: 419115 - DNA, 570 bp, Staphylococcus aureus; identical to SEQ ID NO: 415326

SEQ ID NO: 419116 - DNA, 882 bp, Staphylococcus aureus; identical to SEQ ID NO: 416322

SEQ ID NO: 419117 - DNA, 1122 bp, Staphylococcus aureus; identical to SEQ ID NO: 416599

SEQ ID NO: 419118 - DNA, 1239 bp, Staphylococcus aureus; identical to SEQ ID NO: 413337

SEQ ID NO: 419119 - DNA, 420 bp, Staphylococcus aureus; identical to SEQ ID NO: 416601

SEQ ID NO: 419120 - DNA, 1260 bp, Staphylococcus aureus; identical to SEQ ID NO: 406334

SEQ ID NO: 419121 - DNA, 654 bp, Staphylococcus aureus; identical to SEQ ID NO: 416417

SEQ ID NO: 419122 - DNA, 327 bp, Staphylococcus aureus; identical to SEQ ID NO: 406338

SEQ ID NO: 419123 - DNA, 1233 bp, Staphylococcus aureus; identical to SEQ ID NO: 415155

SEQ ID NO: 419124 - DNA, 609 bp, Staphylococcus aureus; identical to SEQ ID NO: 413437

SEQ ID NO: 419125 - DNA, 1050 bp, Staphylococcus aureus; identical to SEQ ID NO: 412712

SEQ ID NO: 419126 - DNA, 948 bp, Staphylococcus aureus; identical to SEQ ID NO: 412711

SEQ ID NO: 419127 - DNA, 921 bp, Staphylococcus aureus; identical to SEQ ID NO: 413340

SEQ ID NO: 419128 - DNA, 639 bp, Staphylococcus aureus; identical to SEQ ID NO: 415148

SEQ ID NO: 419129 - DNA, 1932 bp, Staphylococcus aureus; identical to SEQ ID NO: 415147

SEQ ID NO: 419130 - DNA, 555 bp, Staphylococcus aureus; identical to SEQ ID NO: 415145

SEQ ID NO: 419131 - DNA, 1383 bp, Staphylococcus aureus; identical to SEQ ID NO: 415143

SEQ ID NO: 419132 - DNA, 666 bp, Staphylococcus aureus; identical to SEQ ID NO: 415141

SEQ ID NO: 419133 - DNA, 675 bp, Staphylococcus aureus; identical to SEQ ID NO: 415139

SEQ ID NO: 419134 - DNA, 1374 bp, Staphylococcus aureus; identical to SEQ ID NO: 408065

SEQ ID NO: 419135 - DNA, 444 bp, Staphylococcus aureus; identical to SEQ ID NO: 415137

SEQ ID NO: 419136 - DNA, 456 bp, Staphylococcus aureus; identical to SEQ ID NO: 415136

SEQ ID NO: 419137 - DNA, 1674 bp, Staphylococcus aureus; identical to SEQ ID NO: 415337

SEQ ID NO: 419138 - DNA, 615 bp, Staphylococcus aureus; identical to SEQ ID NO: 415133

SEQ ID NO: 419139 - DNA, 516 bp, Staphylococcus aureus; identical to SEQ ID NO: 415132

SEQ ID NO: 419140 - DNA, 1005 bp, Staphylococcus aureus; identical to SEQ ID NO: 417804

SEQ ID NO: 419141 - DNA, 336 bp, Staphylococcus aureus; identical to SEQ ID NO: 415131

SEQ ID NO: 419142 - DNA, 432 bp, Staphylococcus aureus; identical to SEQ ID NO: 405025

SEQ ID NO: 419143 - DNA, 624 bp, Staphylococcus aureus; identical to SEQ ID NO: 415128

SEQ ID NO: 419144 - DNA, 384 bp, Staphylococcus aureus; identical to SEQ ID NO: 415125

SEQ ID NO: 419145 - DNA, 1278 bp, Staphylococcus aureus; identical to SEQ ID NO: 413343

SEQ ID NO: 419146 - DNA, 366 bp, Staphylococcus aureus; identical to SEQ ID NO: 415123

SEQ ID NO: 419147 - DNA, 423 bp, Staphylococcus aureus; identical to SEQ ID NO: 415121

SEQ ID NO: 419148 - DNA, 1170 bp, Staphylococcus aureus; identical to SEQ ID NO: 415340

SEQ ID NO: 419149 - DNA, 915 bp, Staphylococcus aureus; identical to SEQ ID NO: 415120

SEQ ID NO: 419150 - DNA, 741 bp, Staphylococcus aureus; identical to SEQ ID NO: 405009

SEQ ID NO: 419151 - DNA, 654 bp, Staphylococcus aureus; identical to SEQ ID NO: 405008

SEQ ID NO: 419152 - DNA, 453 bp, Staphylococcus aureus; identical to SEQ ID NO: 405006

SEQ ID NO: 419153 - DNA, 678 bp, Staphylococcus aureus; identical to SEQ ID NO: 415116

SEQ ID NO: 419154 - DNA, 1560 bp, Staphylococcus aureus; identical to SEQ ID NO: 416389

SEQ ID NO: 419155 - DNA, 978 bp, Staphylococcus aureus; identical to SEQ ID NO: 415112

SEQ ID NO: 419156 - DNA, 315 bp, Staphylococcus aureus; identical to SEQ ID NO: 415111

SEQ ID NO: 419157 - DNA, 732 bp, Staphylococcus aureus; identical to SEQ ID NO: 415109

SEQ ID NO: 419158 - DNA, 537 bp, Staphylococcus aureus; identical to SEQ ID NO: 410322

SEQ ID NO: 419159 - DNA, 825 bp, Staphylococcus aureus; identical to SEQ ID NO: 416342

SEQ ID NO: 419160 - DNA, 183 bp, Staphylococcus aureus; identical to SEQ ID NO: 415108

SEQ ID NO: 419161 - DNA, 1548 bp, Staphylococcus aureus; identical to SEQ ID NO: 414991

SEQ ID NO: 419162 - DNA, 252 bp, Staphylococcus aureus; identical to SEQ ID NO: 404991

SEQ ID NO: 419163 - DNA, 600 bp, Staphylococcus aureus; identical to SEQ ID NO: 415104

SEQ ID NO: 419164 - DNA, 363 bp, Staphylococcus aureus; identical to SEQ ID NO: 404989

SEQ ID NO: 419165 - DNA, 1251 bp, Staphylococcus aureus; identical to SEQ ID NO: 418563

SEQ ID NO: 419166 - DNA, 732 bp, Staphylococcus aureus; identical to SEQ ID NO: 415102

SEQ ID NO: 419167 - DNA, 1440 bp, Staphylococcus aureus; identical to SEQ ID NO: 416343

SEQ ID NO: 419168 - DNA, 867 bp, Staphylococcus aureus; identical to SEQ ID NO: 415098

SEQ ID NO: 419169 - DNA, 1311 bp, Staphylococcus aureus; identical to SEQ ID NO: 416344

SEQ ID NO: 419170 - DNA, 468 bp, Staphylococcus aureus; identical to SEQ ID NO: 415095

SEQ ID NO: 419171 - DNA, 693 bp, Staphylococcus aureus; identical to SEQ ID NO: 416047

SEQ ID NO: 419172 - DNA, 1008 bp, Staphylococcus aureus; identical to SEQ ID NO: 410061

SEQ ID NO: 419173 - DNA, 1359 bp, Staphylococcus aureus; identical to SEQ ID NO: 415093

SEQ ID NO: 419174 - DNA, 1764 bp, Staphylococcus aureus; identical to SEQ ID NO: 415090

SEQ ID NO: 419175 - DNA, 387 bp, Staphylococcus aureus; identical to SEQ ID NO: 415089

SEQ ID NO: 419176 - DNA, 1143 bp, Staphylococcus aureus; identical to SEQ ID NO: 410321

SEQ ID NO: 419177 - DNA, 660 bp, Staphylococcus aureus; identical to SEQ ID NO: 404967

SEQ ID NO: 419178 - DNA, 1212 bp, Staphylococcus aureus; identical to SEQ ID NO: 415086

SEQ ID NO: 419179 - DNA, 474 bp, Staphylococcus aureus; identical to SEQ ID NO: 413346

SEQ ID NO: 419180 - DNA, 657 bp, Staphylococcus aureus; identical to SEQ ID NO: 415085

SEQ ID NO: 419181 - DNA, 807 bp, Staphylococcus aureus; identical to SEQ ID NO: 415084

SEQ ID NO: 419182 - DNA, 2079 bp, Staphylococcus aureus; identical to SEQ ID NO: 415083

SEQ ID NO: 419183 - DNA, 936 bp, Staphylococcus aureus; identical to SEQ ID NO: 417815

SEQ ID NO: 419184 - DNA, 696 bp, Staphylococcus aureus; identical to SEQ ID NO: 404955

SEQ ID NO: 419185 - DNA, 1227 bp, Staphylococcus aureus; identical to SEQ ID NO: 415077

SEQ ID NO: 419186 - DNA, 600 bp, Staphylococcus aureus; identical to SEQ ID NO: 413348

SEQ ID NO: 419187 - DNA, 1353 bp, Staphylococcus aureus
atgaagattaatactacaggtggtcaaattcatggtattacacaagatggtttagatatcttcttaggcattccttatgcagaaccaccagttcatgataatcgctttaaacattctacgttaaaaacacaatggtcagagccaattgatgcaactgaaatacaacccatcccaccgcaaccagacaacaaattagaagattttttctcctcacaatctacaacttttactgaacatgaagactgtttatatctaaatatttggaaacaacataatgatcagacgaagaaacctgtcatcatttatttttatggtggtagttttgaaaatggtcatggtacagccgaactctatcaaccggcacatttagtacaaaataacgacattatcgttattacatgcaattatcgtttaggcgcattaggatatttagactggtcatattttaataaagattttcattccaataatggactttcagatcaaatcaatgtcataaaatgggtgcatcaatttattgaatcctttggtggcgacgctaataacattactttaatgggtcagtctgcaggcagtatgagcattttgactttacttaaaatacctgacattgagccatacttccataaagtagttctactaagtggcgcactacgattagacacccttaagagtgcacgcaataaagcacaatatttccaaaaaatgatgcgcgattatttagatacagatgatgttacatcattatcgacagatgatattcttatgctgatggcgaagctaaaacaatctcgaggaccttctaaagggcttgatttaatatatgcgcctattaaaacagattatatacaaaatgattatccaacaacgaaaccaatttttgcatgttatacaaaagatgaaggcgatatttatattactagtgaacagaaaaaattatcgccgcaacgctttatcgacattatggaattaaatgatattcctttaaaatacgaagatgttcagactgcgaagcaacaatctttagcgattacacattgttatttcaaacagccgatgaagcaatttttacaacatcttaatatacaagattcaaacgcacaactatggcttgctgaatttgcatggcatgatacttctagcgcacactatcgcagtgcttaccatattctagatatggtattttggttcggaaacttacaaatattagcagcacatcaatatccaacaactgctcaccttaaatttttaagtcgacaaatgcaaaatgatttagctaattttgctaaaagcggtaaaatgccttggccgatgtatcataatgaacgtcgctattatcgcacatatcaataa

SEQ ID NO: 419188 - DNA, 777 bp, Staphylococcus aureus; identical to SEQ ID NO: 416377

SEQ ID NO: 419189 - DNA, 1077 bp, Staphylococcus aureus; identical to SEQ ID NO: 415074

SEQ ID NO: 419190 - DNA, 258 bp, Staphylococcus aureus; identical to SEQ ID NO: 404943

SEQ ID NO: 419191 - DNA, 456 bp, Staphylococcus aureus; identical to SEQ ID NO: 418547

SEQ ID NO: 419192 - DNA, 1578 bp, Staphylococcus aureus; identical to SEQ ID NO: 418546

SEQ ID NO: 419193 - DNA, 1194 bp, Staphylococcus aureus; identical to SEQ ID NO: 416376

SEQ ID NO: 419194 - DNA, 816 bp, Staphylococcus aureus; identical to SEQ ID NO: 408063

SEQ ID NO: 419195 - DNA, 1599 bp, Staphylococcus aureus; identical to SEQ ID NO: 408544

SEQ ID NO: 419196 - DNA, 768 bp, Staphylococcus aureus; identical to SEQ ID NO: 408060

SEQ ID NO: 419197 - DNA, 405 bp, Staphylococcus aureus; identical to SEQ ID NO: 414404

SEQ ID NO: 419198 - DNA, 234 bp, Staphylococcus aureus; identical to SEQ ID NO: 410528

SEQ ID NO: 419199 - DNA, 237 bp, Staphylococcus aureus
gtgtttgttactgaagttgtgtgtgatagcgttcaattccttgaacctaaaaatgcgcaacaaaatggtggccaacgtcaacaaaatgaattccaagattacggtcaaggattcggtggtcaacaatcagggcaaaacaattcgtacaataattcatcaaacacgaaacaatctgataatccatttgcaaatgcaaacggaccgattgatataagtgatgatgacttaccattctaa

SEQ ID NO: 419200 - DNA, 474 bp, Staphylococcus aureus
gtgtctgcaggtgctgatatgatccgtggtttaattagaggtattggacaaatggctggccaattagtagatgcggctaaaaatgttgctaagaaagctttagatgcagctaaaagtgctttgggtattcactcaccttcacgtgaattcatggatgttggtgtgtattcaatgctaggtttcgttaaaggtatagataatcattcaagtaaagttatccgtaatgtttctaatgttgcagataaagtagttgatgcatttcaacctacattaaacgcacctgacatttctagtattacaggaaacttaagtaatttaggtggaaatataaatgcgcaagtacaacacacacattctattgaaacatcaccgaacatgaaaactgttaaagttgaattcgatgtcaataacgatgcgcttactagtattgttaacggcagaaatgctaaacgcaattctgagtattacttataa

SEQ ID NO: 419201 - DNA, 303 bp, Staphylococcus aureus
atgctaggtttcgttaaaggtatagataatcattcaagtaaagttatccgtaatgtttctaatgttgcagataaagtagttgatgcatttcaacctacattaaacgcacctgacatttctagtattacaggaaacttaagtaatttaggtggaaatataaatgcgcaagtacaacacacacattctattgaaacatcaccgaacatgaaaactgttaaagttgaattcgatgttaataacgatgcgcttactagtattgttaacggcagaaatgctaaacgcaattctgagtattacttataa

SEQ ID NO: 419202 - DNA, 180 bp, Staphylococcus aureus
atgttaagttatggtggattacttaaagaaaagcataaaattttaaacttagacgatgccgaagatggtaatttgattaatacaagtgatgaagataaaacaacagacgaagaggaaaaagcacattcaattacagcaatttggaatttcgaaaagcaaaattattatttaagacattag

SEQ ID NO: 419203 - DNA, 189 bp, Staphylococcus aureus
gtgacgcaatacttagtcacaacattcaaagattcaacaggacgtaaacatacgcacataactaaagctaagagcaatcaaaggtttacagttgttgaggcagagagtaaagaagaagcgaaagagaagtacgagaaacaagttaagataaggagagatggagatgccaaagaaaacggtaacgattga

SEQ ID NO: 419204 - DNA, 285 bp, Staphylococcus aureus
gtggttaaccttaaatcaagcaacttaaaacgtggtgagttaatcactggtgatttcgataagttgatttacggtatccctcaattaattgaatacaaaatcgatgaaactgcacaattatctacagtcaaaaatgaagatggaacacctgtaaacttgtttgaacaagacatggtggcattacgtgcaactatgcatgtagcattgcatatcgctgatgataaagcgtttgctaagttagtgcctgctgatgaaaaaccagcttcagttccaggagaagtttaa

SEQ ID NO: 419205 - DNA, 189 bp, Staphylococcus aureus; identical to SEQ ID NO: 407433

SEQ ID NO: 419206 - DNA, 447 bp, Staphylococcus aureus
atgacaaatggtcaattgtggaaaaaagttaaagattcattaattgattcaaatattattagtggtaacgaaaatgaagagattacagtaacatatgttaataaaaccggatattcttcaagtgtttctgcctatggtaataataataacgatttttcaagtactccaagtaatttttctaaacttaaggaaattgacttgaaaaaagataatgtaccgtcagatgattttaatactactgttagtggtgaagatagttggaaaacacttacatctaaattaaaggaaaaaggtttggttacagatggacaaacagtaactattcattgtaatgataagtctgacaatacaaaatcatctgtttcaggtaaagtaggagcagatctgacaagtggcaatggaactacattcaaaaaacgctttattgataaaatcacaattgattaa

SEQ ID NO: 419207 - DNA, 516 bp, Staphylococcus aureus
atgaagattgtattaggatgcgaccatattgttacagatacaaaaatgcgtgtatctgaatttttaaaatcaaaaggacatgaagtcattgacgtaggaacatacgattttacaagaacacattatccaatttttggtaaaaaagttggcgaacaagttgttagcggtaatgcagacttaggtgtttgtatttgtggaacaggtgttggtattaacaatgctgtaaataaagtacctggcgttcgttcagcactagtacgtgatatgacatcagcgttatatgctaaagaagaattaaatgcgaacgttattggctttggtggacgtattataggtgagttattaatgtgcgatattatcgatgcatttattaacgctgaatataaagcaactgaagagaacaaaaaattaatcgctaaaattaaacatttagaaacaagcaatgcagatcaagctgatccacatttctttgatgaattcttagaaaaatgggacagaggcgaataccacgattaa

SEQ ID NO: 419208 - DNA, 261 bp, Staphylococcus aureus; identical to SEQ ID NO: 413288

SEQ ID NO: 419209 - DNA, 1371 bp, Staphylococcus aureus; identical to SEQ ID NO: 415272

SEQ ID NO: 419210 - DNA, 969 bp, Staphylococcus aureus; identical to SEQ ID NO: 415271

SEQ ID NO: 419211 - DNA, 984 bp, Staphylococcus aureus; identical to SEQ ID NO: 413290

SEQ ID NO: 419212 - DNA, 1758 bp, Staphylococcus aureus; identical to SEQ ID NO: 413291

SEQ ID NO: 419213 - DNA, 1194 bp, Staphylococcus aureus; identical to SEQ ID NO: 413292

SEQ ID NO: 419214 - DNA, 240 bp, Staphylococcus aureus; identical to SEQ ID NO: 415266

SEQ ID NO: 419215 - DNA, 1413 bp, Staphylococcus aureus; identical to SEQ ID NO: 416498

SEQ ID NO: 419216 - DNA, 1713 bp, Staphylococcus aureus; identical to SEQ ID NO: 415261

SEQ ID NO: 419217 - DNA, 312 bp, Staphylococcus aureus; identical to SEQ ID NO: 415260

SEQ ID NO: 419218 - DNA, 981 bp, Staphylococcus aureus; identical to SEQ ID NO: 415259

SEQ ID NO: 419219 - DNA, 516 bp, Staphylococcus aureus; identical to SEQ ID NO: 413298

SEQ ID NO: 419220 - DNA, 204 bp, Staphylococcus aureus; identical to SEQ ID NO: 408071

SEQ ID NO: 419221 - DNA, 417 bp, Staphylococcus aureus; identical to SEQ ID NO: 413300

SEQ ID NO: 419222 - DNA, 855 bp, Staphylococcus aureus; identical to SEQ ID NO: 413301

SEQ ID NO: 419223 - DNA, 426 bp, Staphylococcus aureus; identical to SEQ ID NO: 413302

SEQ ID NO: 419224 - DNA, 1665 bp, Staphylococcus aureus; identical to SEQ ID NO: 416537

SEQ ID NO: 419225 - DNA, 1017 bp, Staphylococcus aureus; identical to SEQ ID NO: 408069

SEQ ID NO: 419226 - DNA, 648 bp, Staphylococcus aureus; identical to SEQ ID NO: 409262

SEQ ID NO: 419227 - DNA, 399 bp, Staphylococcus aureus; identical to SEQ ID NO: 406220

SEQ ID NO: 419228 - DNA, 438 bp, Staphylococcus aureus; identical to SEQ ID NO: 413305

SEQ ID NO: 419229 - DNA, 807 bp, Staphylococcus aureus; identical to SEQ ID NO: 419044

SEQ ID NO: 419230 - DNA, 861 bp, Staphylococcus aureus; identical to SEQ ID NO: 413307

SEQ ID NO: 419231 - DNA, 1293 bp, Staphylococcus aureus; identical to SEQ ID NO: 415298

SEQ ID NO: 419232 - DNA, 180 bp, Staphylococcus aureus; identical to SEQ ID NO: 406234

SEQ ID NO: 419233 - DNA, 186 bp, Staphylococcus aureus; identical to SEQ ID NO: 406239

SEQ ID NO: 419234 - DNA, 369 bp, Staphylococcus aureus; identical to SEQ ID NO: 406242

SEQ ID NO: 419235 - DNA, 264 bp, Staphylococcus aureus; identical to SEQ ID NO: 406243

SEQ ID NO: 419236 - DNA, 354 bp, Staphylococcus aureus; identical to SEQ ID NO: 406247

SEQ ID NO: 419237 - DNA, 309 bp, Staphylococcus aureus; identical to SEQ ID NO: 413316

SEQ ID NO: 419238 - DNA, 888 bp, Staphylococcus aureus; identical to SEQ ID NO: 413317

SEQ ID NO: 419239 - DNA, 1266 bp, Staphylococcus aureus; identical to SEQ ID NO: 415214

SEQ ID NO: 419240 - DNA, 252 bp, Staphylococcus aureus; identical to SEQ ID NO: 413319

SEQ ID NO: 419241 - DNA, 351 bp, Staphylococcus aureus; identical to SEQ ID NO: 414457

SEQ ID NO: 419242 - DNA, 447 bp, Staphylococcus aureus; identical to SEQ ID NO: 415209

SEQ ID NO: 419243 - DNA, 1260 bp, Staphylococcus aureus; identical to SEQ ID NO: 415207

SEQ ID NO: 419244 - DNA, 507 bp, Staphylococcus aureus; identical to SEQ ID NO: 415205

SEQ ID NO: 419245 - DNA, 1005 bp, Staphylococcus aureus; identical to SEQ ID NO: 413322

SEQ ID NO: 419246 - DNA, 606 bp, Staphylococcus aureus; identical to SEQ ID NO: 415203

SEQ ID NO: 419247 - DNA, 783 bp, Staphylococcus aureus; identical to SEQ ID NO: 415201

SEQ ID NO: 419248 - DNA, 771 bp, Staphylococcus aureus; identical to SEQ ID NO: 413324

SEQ ID NO: 419249 - DNA, 555 bp, Staphylococcus aureus; identical to SEQ ID NO: 413325

SEQ ID NO: 419250 - DNA, 909 bp, Staphylococcus aureus; identical to SEQ ID NO: 415197

SEQ ID NO: 419251 - DNA, 1155 bp, Staphylococcus aureus; identical to SEQ ID NO: 413327

SEQ ID NO: 419252 - DNA, 303 bp, Staphylococcus aureus; identical to SEQ ID NO: 406287

SEQ ID NO: 419253 - DNA, 453 bp, Staphylococcus aureus; identical to SEQ ID NO: 406290

SEQ ID NO: 419254 - DNA, 234 bp, Staphylococcus aureus; identical to SEQ ID NO: 406306

SEQ ID NO: 419255 - DNA, 474 bp, Staphylococcus aureus; identical to SEQ ID NO: 406307

SEQ ID NO: 419256 - DNA, 798 bp, Staphylococcus aureus; identical to SEQ ID NO: 406310

SEQ ID NO: 419257 - DNA, 738 bp, Staphylococcus aureus; identical to SEQ ID NO: 406312

SEQ ID NO: 419258 - DNA, 873 bp, Staphylococcus aureus; identical to SEQ ID NO: 414990

SEQ ID NO: 419259 - DNA, 357 bp, Staphylococcus aureus; identical to SEQ ID NO: 416319

SEQ ID NO: 419260 - DNA, 186 bp, Staphylococcus aureus; identical to SEQ ID NO: 416428

SEQ ID NO: 419261 - DNA, 918 bp, Staphylococcus aureus; identical to SEQ ID NO: 413335

SEQ ID NO: 419262 - DNA, 882 bp, Staphylococcus aureus; identical to SEQ ID NO: 416322

SEQ ID NO: 419263 - DNA, 885 bp, Staphylococcus aureus; identical to SEQ ID NO: 410342

SEQ ID NO: 419264 - DNA, 420 bp, Staphylococcus aureus; identical to SEQ ID NO: 416601

SEQ ID NO: 419265 - DNA, 936 bp, Staphylococcus aureus; identical to SEQ ID NO: 406333

SEQ ID NO: 419266 - DNA, 687 bp, Staphylococcus aureus; identical to SEQ ID NO: 406335

SEQ ID NO: 419267 - DNA, 1020 bp, Staphylococcus aureus; identical to SEQ ID NO: 415157

SEQ ID NO: 419268 - DNA, 327 bp, Staphylococcus aureus; identical to SEQ ID NO: 406338

SEQ ID NO: 419269 - DNA, 492 bp, Staphylococcus aureus; identical to SEQ ID NO: 415150

SEQ ID NO: 419270 - DNA, 648 bp, Staphylococcus aureus; identical to SEQ ID NO: 413341

SEQ ID NO: 419271 - DNA, 675 bp, Staphylococcus aureus; identical to SEQ ID NO: 415139

SEQ ID NO: 419272 - DNA, 516 bp, Staphylococcus aureus; identical to SEQ ID NO: 415132

SEQ ID NO: 419273 - DNA, 1035 bp, Staphylococcus aureus; identical to SEQ ID NO: 405026

SEQ ID NO: 419274 - DNA, 432 bp, Staphylococcus aureus; identical to SEQ ID NO: 405025

SEQ ID NO: 419275 - DNA, 1278 bp, Staphylococcus aureus; identical to SEQ ID NO: 409952

SEQ ID NO: 419276 - DNA, 384 bp, Staphylococcus aureus; identical to SEQ ID NO: 415125

SEQ ID NO: 419277 - DNA, 423 bp, Staphylococcus aureus; identical to SEQ ID NO: 415124

SEQ ID NO: 419278 - DNA, 357 bp, Staphylococcus aureus; identical to SEQ ID NO: 413342

SEQ ID NO: 419279 - DNA, 447 bp, Staphylococcus aureus; identical to SEQ ID NO: 415122

SEQ ID NO: 419280 - DNA, 1035 bp, Staphylococcus aureus; identical to SEQ ID NO: 415117

SEQ ID NO: 419281 - DNA, 3690 bp, Staphylococcus aureus; identical to SEQ ID NO: 415113

SEQ ID NO: 419282 - DNA, 2406 bp, Staphylococcus aureus; identical to SEQ ID NO: 413344

SEQ ID NO: 419283 - DNA, 537 bp, Staphylococcus aureus; identical to SEQ ID NO: 410322

SEQ ID NO: 419284 - DNA, 825 bp, Staphylococcus aureus; identical to SEQ ID NO: 416342

SEQ ID NO: 419285 - DNA, 363 bp, Staphylococcus aureus; identical to SEQ ID NO: 404989

SEQ ID NO: 419286 - DNA, 1251 bp, Staphylococcus aureus; identical to SEQ ID NO: 418563

SEQ ID NO: 419287 - DNA, 693 bp, Staphylococcus aureus; identical to SEQ ID NO: 416047

SEQ ID NO: 419288 - DNA, 687 bp, Staphylococcus aureus; identical to SEQ ID NO: 413345

SEQ ID NO: 419289 - DNA, 1734 bp, Staphylococcus aureus; identical to SEQ ID NO: 415091

SEQ ID NO: 419290 - DNA, 1212 bp, Staphylococcus aureus; identical to SEQ ID NO: 415086

SEQ ID NO: 419291 - DNA, 474 bp, Staphylococcus aureus; identical to SEQ ID NO: 413346

SEQ ID NO: 419292 - DNA, 657 bp, Staphylococcus aureus; identical to SEQ ID NO: 415085

SEQ ID NO: 419293 - DNA, 1830 bp, Staphylococcus aureus; identical to SEQ ID NO: 415082

SEQ ID NO: 419294 - DNA, 1401 bp, Staphylococcus aureus; identical to SEQ ID NO: 416379

SEQ ID NO: 419295 - DNA, 696 bp, Staphylococcus aureus; identical to SEQ ID NO: 404955

SEQ ID NO: 419296 - DNA, 600 bp, Staphylococcus aureus; identical to SEQ ID NO: 413348

SEQ ID NO: 419297 - DNA, 237 bp, Staphylococcus aureus
atgattaacatacctaaaatgaaattcccgaaaaagtacactgaaataatcaaaaaatataaaaataaagcacctgaagaaaaggctaagattgaagatgattttattaaagatattaaagataaagacagtgaattttacagtcctacgatgggtaatatgaatgaatatgaattaagggctatgttaagaatgatgcctagtttaattgatactggagatgacaatgatgattaa

SEQ ID NO: 419298 - DNA, 261 bp, Staphylococcus aureus
atgatgttagaagttaattatatctatgaacaaatgcaagaaaacataaaaaacggcagtgtacacagcgcattagcaaacagaattatggagtctcattttagcttagaacatgctatcggaatgttgaaagcaaatgatttaactagactcgaagaaatacatttaattcatttaagtagtcaaaattcaaatgcaaaatacattaaaagtgaaatacaaaaagtgacgggcgcgcccgtttatgttggaggtttataa

SEQ ID NO: 419299 - DNA, 147 bp, Staphylococcus aureus; identical to SEQ ID NO: 407426

SEQ ID NO: 419300 - DNA, 147 bp, Staphylococcus aureus; identical to SEQ ID NO: 407426

SEQ ID NO: 419301 - DNA, 1032 bp, Staphylococcus aureus; identical to SEQ ID NO: 413289

SEQ ID NO: 419302 - DNA, 510 bp, Staphylococcus aureus; identical to SEQ ID NO: 413294

SEQ ID NO: 419303 - DNA, 240 bp, Staphylococcus aureus; identical to SEQ ID NO: 415266

SEQ ID NO: 419304 - DNA, 537 bp, Staphylococcus aureus; identical to SEQ ID NO: 406191

SEQ ID NO: 419305 - DNA, 870 bp, Staphylococcus aureus; identical to SEQ ID NO: 415262

SEQ ID NO: 419306 - DNA, 1413 bp, Staphylococcus aureus; identical to SEQ ID NO: 416498

SEQ ID NO: 419307 - DNA, 312 bp, Staphylococcus aureus; identical to SEQ ID NO: 415260

SEQ ID NO: 419308 - DNA, 429 bp, Staphylococcus aureus; identical to SEQ ID NO: 406202

SEQ ID NO: 419309 - DNA, 204 bp, Staphylococcus aureus; identical to SEQ ID NO: 408071

SEQ ID NO: 419310 - DNA, 816 bp, Staphylococcus aureus; identical to SEQ ID NO: 415251

SEQ ID NO: 419311 - DNA, 705 bp, Staphylococcus aureus; identical to SEQ ID NO: 406213

SEQ ID NO: 419312 - DNA, 225 bp, Staphylococcus aureus; identical to SEQ ID NO: 408067

SEQ ID NO: 419313 - DNA, 399 bp, Staphylococcus aureus; identical to SEQ ID NO: 406220

SEQ ID NO: 419314 - DNA, 807 bp, Staphylococcus aureus; identical to SEQ ID NO: 419044

SEQ ID NO: 419315 - DNA, 369 bp, Staphylococcus aureus; identical to SEQ ID NO: 406226

SEQ ID NO: 419316 - DNA, 945 bp, Staphylococcus aureus; identical to SEQ ID NO: 413308

SEQ ID NO: 419317 - DNA, 180 bp, Staphylococcus aureus; identical to SEQ ID NO: 406234

SEQ ID NO: 419318 - DNA, 501 bp, Staphylococcus aureus; identical to SEQ ID NO: 406235

SEQ ID NO: 419319 - DNA, 360 bp, Staphylococcus aureus; identical to SEQ ID NO: 415300

SEQ ID NO: 419320 - DNA, 540 bp, Staphylococcus aureus; identical to SEQ ID NO: 406240

SEQ ID NO: 419321 - DNA, 318 bp, Staphylococcus aureus; identical to SEQ ID NO: 406241

SEQ ID NO: 419322 - DNA, 264 bp, Staphylococcus aureus; identical to SEQ ID NO: 406243

SEQ ID NO: 419323 - DNA, 210 bp, Staphylococcus aureus; identical to SEQ ID NO: 406244

SEQ ID NO: 419324 - DNA, 654 bp, Staphylococcus aureus; identical to SEQ ID NO: 413314

SEQ ID NO: 419325 - DNA, 279 bp, Staphylococcus aureus; identical to SEQ ID NO: 406248

SEQ ID NO: 419326 - DNA, 834 bp, Staphylococcus aureus; identical to SEQ ID NO: 415228

SEQ ID NO: 419327 - DNA, 624 bp, Staphylococcus aureus; identical to SEQ ID NO: 406251

SEQ ID NO: 419328 - DNA, 663 bp, Staphylococcus aureus; identical to SEQ ID NO: 406252

SEQ ID NO: 419329 - DNA, 888 bp, Staphylococcus aureus; identical to SEQ ID NO: 413317

SEQ ID NO: 419330 - DNA, 909 bp, Staphylococcus aureus; identical to SEQ ID NO: 415218

SEQ ID NO: 419331 - DNA, 165 bp, Staphylococcus aureus; identical to SEQ ID NO: 415217

SEQ ID NO: 419332 - DNA, 318 bp, Staphylococcus aureus; identical to SEQ ID NO: 415216

SEQ ID NO: 419333 - DNA, 1266 bp, Staphylococcus aureus; identical to SEQ ID NO: 415214

SEQ ID NO: 419334 - DNA, 351 bp, Staphylococcus aureus; identical to SEQ ID NO: 414457

SEQ ID NO: 419335 - DNA, 1023 bp, Staphylococcus aureus; identical to SEQ ID NO: 415314

SEQ ID NO: 419336 - DNA, 507 bp, Staphylococcus aureus; identical to SEQ ID NO: 415205

SEQ ID NO: 419337 - DNA, 1005 bp, Staphylococcus aureus; identical to SEQ ID NO: 413322

SEQ ID NO: 419338 - DNA, 606 bp, Staphylococcus aureus; identical to SEQ ID NO: 415203

SEQ ID NO: 419339 - DNA, 672 bp, Staphylococcus aureus; identical to SEQ ID NO: 413323

SEQ ID NO: 419340 - DNA, 690 bp, Staphylococcus aureus; identical to SEQ ID NO: 415191

SEQ ID NO: 419341 - DNA, 615 bp, Staphylococcus aureus; identical to SEQ ID NO: 415190

SEQ ID NO: 419342 - DNA, 837 bp, Staphylococcus aureus; identical to SEQ ID NO: 415189

SEQ ID NO: 419343 - DNA, 327 bp, Staphylococcus aureus; identical to SEQ ID NO: 413330

SEQ ID NO: 419344 - DNA, 804 bp, Staphylococcus aureus; identical to SEQ ID NO: 415185

SEQ ID NO: 419345 - DNA, 1083 bp, Staphylococcus aureus; identical to SEQ ID NO: 415183

SEQ ID NO: 419346 - DNA, 501 bp, Staphylococcus aureus; identical to SEQ ID NO: 413331

SEQ ID NO: 419347 - DNA, 954 bp, Staphylococcus aureus; identical to SEQ ID NO: 415180

SEQ ID NO: 419348 - DNA, 330 bp, Staphylococcus aureus; identical to SEQ ID NO: 406313

SEQ ID NO: 419349 - DNA, 186 bp, Staphylococcus aureus; identical to SEQ ID NO: 416428

SEQ ID NO: 419350 - DNA, 192 bp, Staphylococcus aureus; identical to SEQ ID NO: 406318

SEQ ID NO: 419351 - DNA, 1605 bp, Staphylococcus aureus; identical to SEQ ID NO: 415167

SEQ ID NO: 419352 - DNA, 765 bp, Staphylococcus aureus; identical to SEQ ID NO: 415166

SEQ ID NO: 419353 - DNA, 507 bp, Staphylococcus aureus; identical to SEQ ID NO: 415165

SEQ ID NO: 419354 - DNA, 570 bp, Staphylococcus aureus; identical to SEQ ID NO: 415326

SEQ ID NO: 419355 - DNA, 420 bp, Staphylococcus aureus; identical to SEQ ID NO: 416601

SEQ ID NO: 419356 - DNA, 687 bp, Staphylococcus aureus; identical to SEQ ID NO: 406335

SEQ ID NO: 419357 - DNA, 654 bp, Staphylococcus aureus; identical to SEQ ID NO: 416417

SEQ ID NO: 419358 - DNA, 1233 bp, Staphylococcus aureus; identical to SEQ ID NO: 415155

SEQ ID NO: 419359 - DNA, 621 bp, Staphylococcus aureus; identical to SEQ ID NO: 415154

SEQ ID NO: 419360 - DNA, 1050 bp, Staphylococcus aureus; identical to SEQ ID NO: 412712

SEQ ID NO: 419361 - DNA, 948 bp, Staphylococcus aureus; identical to SEQ ID NO: 412711

SEQ ID NO: 419362 - DNA, 492 bp, Staphylococcus aureus; identical to SEQ ID NO: 415150

SEQ ID NO: 419363 - DNA, 1932 bp, Staphylococcus aureus
atgactacgaccttcattattagctacattattttagcgctcattattgttggggttatcaatttatttttaataagatcaagaaaaaaaggcaaacgccaacaaaaggaacaacaatttacgacacgtcaatcaaatcaatctaaatttaaagctagtgatttagacaaaacaactgatcaatcgacacaacgtatgacgcatgaagagttgcgtgttgacaatcaagatgatcatagccaagctagtctaaatggttacacaaaggggtctgagaaagatcaagaagcattcactaataataatggtgaggaagcagttgctgctaaaaatcctgaatcagaagaatataaagtgaatgaaaaaataaaaaaagaacataaaaactttatttttggtgaaggtgtttcacgcggtaaaatattagcggcattattattcggtatgtttattgcgattttaaaccaaacattattaaatgttgctttgccaaaaattaatacggaatttaatatttctgcgtcaacagggcaatggttgatgacgggattcatgttagtaaacggtattttaataccaattacggcgtatctatttaataaatattcatatcgaaaattatttttagttgcgttagtactctttacaattggttcattaatctgtgcgatttcaatgaatttcccaatcatgatggttggacgtgtattacaagccattggtgcaggtgtactaatgccattaggttcaattgttattattacaatttatccacctgaaaaacgtggtgctgccatgggtacaatgggtatcgcaatgattttagcacctgcaattggtccaacattatcaggttatattgtacaaaattaccattggaatgtgatgttttacggtatgttcattatcggtattattgcaatcttagttggttttgtatggtttaagttatatcaatatacaacaaaccctaaagctgatatcccaggtatcatttttagtacgattggttttggtgctttgttatacggcttttcagaagcggggaacaaaggatggggttctgttgagatagaaacaatgtttgcgattggtattatctttattattctatttgtaataagagaattaagaatgaaatcaccaatgttgaatttagaagtattaaaattcccaacatttacattaacaacaattattaatatggttgtaatgttaagtttatatggtggtatgattttattaccgatttatttacaaaatttacgcggattctcagcattagattccggattgttattattacctggttctctaattatgggtctacttggaccatttgcaggtaaattgttagatactattggtttaaaaccattagctatctttggtattgctgtcatgacttatgcaacatgggaattaactaaattaaatatggatacaccatatatgacaatcatgggtatctatgtacttcgttcatttggtatggcatttataatgatgccaatggtaactgcagctattaatgcgttaccgggacgacttgcctctcatggtaatgctttcttaaatacgatgcgtcaattagcaggctctataggtacagcaatcttagttactgttatgacaacacaaacaacacaacatttatcagcttttggggaagagttagataaaacgaatcctgttgtacaagatcatatgcgtgaattagcatcgcaatatggtggtcaagaaggcgcaatgaaagtgttattacaatttgtaaataaactagcaacagttgaaggtattaatgatgcatttatagttgcaacgatatttagcatcatcgctttaattttatgtttatttttacaaagtaataaaaaagcaaaagctacagctcaaaagttagaagcaagctcaaataacaatcatgaataa

SEQ ID NO: 419364 - DNA, 1209 bp, Staphylococcus aureus; identical to SEQ ID NO: 415144

SEQ ID NO: 419365 - DNA, 969 bp, Staphylococcus aureus; identical to SEQ ID NO: 415142

SEQ ID NO: 419366 - DNA, 1479 bp, Staphylococcus aureus; identical to SEQ ID NO: 415135

SEQ ID NO: 419367 - DNA, 1674 bp, Staphylococcus aureus; identical to SEQ ID NO: 415337

SEQ ID NO: 419368 - DNA, 1035 bp, Staphylococcus aureus; identical to SEQ ID NO: 405026

SEQ ID NO: 419369 - DNA, 1278 bp, Staphylococcus aureus
atgaatatatttaaaaataaattattatggattgcgccaatagcaactatgattatcttggtaatcttttctttagctttttatcctgcatataatcctaaaccaaaagatttaccaattggtatattaaacgaggataaaggtacaacgattcaagataaaaatgttaacattggtaaaaaattagaggataaattattagatagtgattctaataaaattaaatgggttaaggttgatagtgaaaaagaccttgaaaaagatttgaaagatcaaaaaatctttggagtagctattattgataaagacttttcaaaagatgctatgagtaaaacacaaaaagtagttatggatagtaaaaaagaagaaatgcaacaaaaagttgcttcaggtgaaattccgccacaagtggttcaacaaatgaaacaaaaaatggggaatcaacaagtagaggttaagcaggctaaatttaaaacgattgtaagtgaaggatcaagcttacaaggttcacaaattgcatcagctgtgttaactggtatgggtgataatattaatgctcaaattacgaagcaaagtttggaaacattaacgagtcaaaatgttaaagtcaatgccgcggacatcaatggtttgacgaatccagtaaaagtggataatgaaaaacttaataaagttaaagatcaccaagcaggtggtaatgcaccattcctaatgtttatgccaatttggataggttcaatcgtaacgtctatcttattgttctttgcatttagaactagtaaaaatatcgtcgtgcaacatcgtatcattgcttcaattggacagatgatatttgcagttgttgcagcatttgcaggtagctttgtttatatttatttcatgcaaggcgttcaaggatttgattttgaccatccaaatcgtatcgcaatttttgtagcatttgcgattcttggtttcgtgggccttattttaggtgttatggtatggctaggtatgaagtcagttccaattttcttcattttaatgttctttagtatgcaacttgtaacgttacctaaacaaatgttgcctgaaagttatcaaaaatatgtatatgattggaatccattcacacactatgcaacaagtgtaagagaactattatacttgaatcatcatattgaattaaatagtacaatgtggatgtttatagggtttatgatttttggcgctgtatcaagtttagtttcagctattgttagaaaacatagcacaaaacgtactgaagtgccgtcataa

SEQ ID NO: 419370 - DNA, 423 bp, Staphylococcus aureus; identical to SEQ ID NO: 415124

SEQ ID NO: 419371 - DNA, 357 bp, Staphylococcus aureus; identical to SEQ ID NO: 413342

SEQ ID NO: 419372 - DNA, 1278 bp, Staphylococcus aureus; identical to SEQ ID NO: 413343

SEQ ID NO: 419373 - DNA, 423 bp, Staphylococcus aureus; identical to SEQ ID NO: 415121

SEQ ID NO: 419374 - DNA, 654 bp, Staphylococcus aureus; identical to SEQ ID NO: 405008

SEQ ID NO: 419375 - DNA, 576 bp, Staphylococcus aureus; identical to SEQ ID NO: 415115

SEQ ID NO: 419376 - DNA, 1560 bp, Staphylococcus aureus; identical to SEQ ID NO: 416389

SEQ ID NO: 419377 - DNA, 3690 bp, Staphylococcus aureus; identical to SEQ ID NO: 415113

SEQ ID NO: 419378 - DNA, 315 bp, Staphylococcus aureus; identical to SEQ ID NO: 415111

SEQ ID NO: 419379 - DNA, 825 bp, Staphylococcus aureus; identical to SEQ ID NO: 416342

SEQ ID NO: 419380 - DNA, 183 bp, Staphylococcus aureus; identical to SEQ ID NO: 415108

SEQ ID NO: 419381 - DNA, 252 bp, Staphylococcus aureus; identical to SEQ ID NO: 404991

SEQ ID NO: 419382 - DNA, 780 bp, Staphylococcus aureus; identical to SEQ ID NO: 415100

SEQ ID NO: 419383 - DNA, 468 bp, Staphylococcus aureus; identical to SEQ ID NO: 415095

SEQ ID NO: 419384 - DNA, 693 bp, Staphylococcus aureus; identical to SEQ ID NO: 416047

SEQ ID NO: 419385 - DNA, 1008 bp, Staphylococcus aureus; identical to SEQ ID NO: 410061

SEQ ID NO: 419386 - DNA, 387 bp, Staphylococcus aureus; identical to SEQ ID NO: 415089

SEQ ID NO: 419387 - DNA, 1410 bp, Staphylococcus aureus; identical to SEQ ID NO: 416141

SEQ ID NO: 419388 - DNA, 2079 bp, Staphylococcus aureus; identical to SEQ ID NO: 415083

SEQ ID NO: 419389 - DNA, 936 bp, Staphylococcus aureus; identical to SEQ ID NO: 417815

SEQ ID NO: 419390 - DNA, 1401 bp, Staphylococcus aureus; identical to SEQ ID NO: 416379

SEQ ID NO: 419391 - DNA, 1077 bp, Staphylococcus aureus; identical to SEQ ID NO: 415074

SEQ ID NO: 419392 - DNA, 267 bp, Staphylococcus aureus; identical to SEQ ID NO: 415359

SEQ ID NO: 419393 - DNA, 1578 bp, Staphylococcus aureus
atgacgtttcttacagtcatgcaatttatagttaacattatcgttgtaggcttcctgcttacggttattgttatcgggcttatttggttaattaaagataaaagacaatcacaacatagtgtattaaggaattatcctttactagcacgtattagatatatttcagaaaaaatgggaccggaattacgtcagtatttattttctggggataatgaagggaaacctttttcacgtaatgattataaaaatatcgttttggctggaaaatataactctcgtatgaccagcttcggtactactaaagattatcaagacggcttttacatacagaacacaatgtttccgatgcaacgtaatgagatttcagtagataatacaacattgttatcaacattcatttataaaattgcgaatgagcgtttatttagtcgtgaagaatatcgtgtaccgacaaagattgatccgtattacttaagtgatgaccatgcaataaaattaggtgaacatttaaaacatccatttattttaaaacgtatcgtaggacaatctggtatgagttatggcgctttaggaaaaaatgccattacagctttatctaaaggtctagctaaagcgggcacttggatgaatacaggtgaaggtggcttatcagaatatcatttaaaaggtaatggggatatcattttccaaattggtcccggtttatttggtgttcgtgataaagaaggtaattttagtgaaggtttatttaaagaggtcgcacagttatctaacgtacgcgcatttgagctgaagttggcacaaggtgctaagactcgtggtggtcatatggaagctgaaaaggtaaacgaagaaattgctaaaatccgaaatgttgaaccttataaaacaatcaattcacctaaccgttacgaatttattcataatgctgaagatttgattcgtttcgtcgatcagttgcagcaattaggtcaaaaaccagtaggattcaaaattgtagtaagcaaagtttcagaaattgaaacacttgtacgtacgatggtggaactagataagtatccaagctttattacgattgatggtggtgaaggtggtactggtgcaacattccaagaattacaagatggtgttggcttaccgctatttacagctctacctattgtgtctggcatgttagaaaaatatggtattcgagataaagtgaaattggcggcatctggtaagttagtgacaccagataaaattgcgattgcactaggtttaggtgcagattttgtaaatatcgcacgtggcatgatgattagtgtcggttgtattatgagtcaacaatgccatatgaatacatgtcctgtaggtgttgcaacgacagatgcgaaaaaagaaaaagcattgattgttggagaaaagcaatatcgtgtcacaaactatgtaacaagtttgcatgaaggcttattcaatattgcagcagctgttggcgtatccagtcctacagaaattactgctgatcatattgtatatcgaaaagtcgatggtgagttacaaacgatacatgattataaattgaaattgattagttga

SEQ ID NO: 419394 - DNA, 750 bp, Staphylococcus aureus; identical to SEQ ID NO: 408064

SEQ ID NO: 419395 - DNA, 396 bp, Staphylococcus aureus
atgaaaaatggaccaaaattatctttagcacttataggtatctttttaatactttgtgagtttttctatggcattccttttttaggtgcaacgtttattttaagttttggatggcagcctttactctttaatgcattactttatctaattcttactattatattattagtgaatagacaaaatgcgattagacctatagcgattattccaatatttggtatagtaggtagttttttagctatcatccccttcttaggaattttgattcattggattttatttttcctaatgattctatttgtcctagttgtattatcagcgccaacctatatacctaataaaatgctcgtgtcatttacacacaatacaaagatggacatagagaataattcttaa

SEQ ID NO: 419396 - DNA, 288 bp, Staphylococcus aureus; identical to SEQ ID NO: 415066

SEQ ID NO: 419397 - DNA, 1536 bp, Staphylococcus aureus; identical to SEQ ID NO: 415485

SEQ ID NO: 419398 - DNA, 1029 bp, Staphylococcus aureus; identical to SEQ ID NO: 415484

SEQ ID NO: 419399 - DNA, 1206 bp, Staphylococcus aureus; identical to SEQ ID NO: 416098

SEQ ID NO: 419400 - DNA, 495 bp, Staphylococcus aureus; identical to SEQ ID NO: 416095

SEQ ID NO: 419401 - DNA, 1185 bp, Staphylococcus aureus; identical to SEQ ID NO: 415654

SEQ ID NO: 419402 - DNA, 1350 bp, Staphylococcus aureus; identical to SEQ ID NO: 415450

SEQ ID NO: 419403 - DNA, 558 bp, Staphylococcus aureus; identical to SEQ ID NO: 415562

SEQ ID NO: 419404 - DNA, 2046 bp, Staphylococcus aureus; identical to SEQ ID NO: 413364

SEQ ID NO: 419405 - DNA, 1455 bp, Staphylococcus aureus; identical to SEQ ID NO: 415557

SEQ ID NO: 419406 - DNA, 282 bp, Staphylococcus aureus; identical to SEQ ID NO: 405087

SEQ ID NO: 419407 - DNA, 1719 bp, Staphylococcus aureus; identical to SEQ ID NO: 408077

SEQ ID NO: 419408 - DNA, 444 bp, Staphylococcus aureus; identical to SEQ ID NO: 408078

SEQ ID NO: 419409 - DNA, 1434 bp, Staphylococcus aureus; identical to SEQ ID NO: 415649

SEQ ID NO: 419410 - DNA, 1776 bp, Staphylococcus aureus; identical to SEQ ID NO: 415546

SEQ ID NO: 419411 - DNA, 2007 bp, Staphylococcus aureus; identical to SEQ ID NO: 413360

SEQ ID NO: 419412 - DNA, 1077 bp, Staphylococcus aureus; identical to SEQ ID NO: 415539

SEQ ID NO: 419413 - DNA, 1557 bp, Staphylococcus aureus; identical to SEQ ID NO: 415534

SEQ ID NO: 419414 - DNA, 1185 bp, Staphylococcus aureus; identical to SEQ ID NO: 413356

SEQ ID NO: 419415 - DNA, 1506 bp, Staphylococcus aureus; identical to SEQ ID NO: 415527

SEQ ID NO: 419416 - DNA, 1563 bp, Staphylococcus aureus; identical to SEQ ID NO: 416083

SEQ ID NO: 419417 - DNA, 1476 bp, Staphylococcus aureus; identical to SEQ ID NO: 415526

SEQ ID NO: 419418 - DNA, 174 bp, Staphylococcus aureus; identical to SEQ ID NO: 405125

SEQ ID NO: 419419 - DNA, 468 bp, Staphylococcus aureus; identical to SEQ ID NO: 415470

SEQ ID NO: 419420 - DNA, 279 bp, Staphylococcus aureus; identical to SEQ ID NO: 415469

SEQ ID NO: 419421 - DNA, 717 bp, Staphylococcus aureus; identical to SEQ ID NO: 415607

SEQ ID NO: 419422 - DNA, 1026 bp, Staphylococcus aureus; identical to SEQ ID NO: 418817

SEQ ID NO: 419423 - DNA, 1026 bp, Staphylococcus aureus; identical to SEQ ID NO: 418340

SEQ ID NO: 419424 - DNA, 1689 bp, Staphylococcus aureus; identical to SEQ ID NO: 415667

SEQ ID NO: 419425 - DNA, 675 bp, Staphylococcus aureus; identical to SEQ ID NO: 418338

SEQ ID NO: 419426 - DNA, 438 bp, Staphylococcus aureus; identical to SEQ ID NO: 405148

SEQ ID NO: 419427 - DNA, 702 bp, Staphylococcus aureus; identical to SEQ ID NO: 415515

SEQ ID NO: 419428 - DNA, 792 bp, Staphylococcus aureus; identical to SEQ ID NO: 414985

SEQ ID NO: 419429 - DNA, 915 bp, Staphylococcus aureus; identical to SEQ ID NO: 418757

SEQ ID NO: 419430 - DNA, 405 bp, Staphylococcus aureus; identical to SEQ ID NO: 414319

SEQ ID NO: 419431 - DNA, 660 bp, Staphylococcus aureus; identical to SEQ ID NO: 415510

SEQ ID NO: 419432 - DNA, 1167 bp, Staphylococcus aureus; identical to SEQ ID NO: 415508

SEQ ID NO: 419433 - DNA, 294 bp, Staphylococcus aureus; identical to SEQ ID NO: 405170

SEQ ID NO: 419434 - DNA, 3030 bp, Staphylococcus aureus; identical to SEQ ID NO: 418335

SEQ ID NO: 419435 - DNA, 1740 bp, Staphylococcus aureus
ttgtccctgtttgcagatgacatgattgtatatctagaaaaccccattgtctcagcccaaaatctccttaaggtgataagcaacttcagcaaagtctcaggatacaaaatcaatgtacaaaaatcacaagcattcttatacaccaataacagacaaacagagagccaaatcatgagtgaactcccattcacaattgcttcaaagagaataaaatacctaggaatccaacttacaagggatgtgaaggacctcttcaaggagaactacaaaccactgctcaatgaaataaaagaggatacaaacaaatggaagaacattccatgctcatggataggaagaatcaatatcgtgaaaatggccatactgcccaaggtaatttatagattcaatgccatccccatcaagctaccaatgactttcttcacagaattggaaaaaactactttaaagttcatatggaaccaaaaaagagcctgcattgccaagtcaatcctaagccaaaagaacaaagctggaggcatcacactacctgacttcaaactatactacaaggctacagtaaccaaaacagcatggtactggtaccaaaacagagatatagaccaatggaacagaacagagccctcagaaataacaccacatatctacaaccatctgatctttgacaaacctgacaaaaacaagcaatggggaaaggattccctatttaataaatggtgctgggaaaactggctagccatatgtagaaagctgaaactggatcccttccttacaccttatacaaaaattaattcaagatggattaaagacttaaatgttagacctaaaaccataaaaaccctagaagaaaacctaggcattaccattcaggacataggcatgggcaaggacttcatgtctaaaacaccaaaagcaatggcaacaaaagccaaaattgacaaatgggatctaattaaactaaagagcttctgcacagcaaaagaaactaccatcagagtgaacaggcaacctacagaatgggagaaaatttttgcaatctactcatctgacaaagggctaatatccagaatctacaatgaactcaaacaaatttacaagaaaaaaacaaacaaccccatcaaaaagtgggcaaaggacatgaacagacacttctcaaaagaagacatttatgcagccaacagacacatgaaaaaatgctcatcatcactggtcatcagagaaatgcaaatcaaaaccacaatgagataccatctcacaccagttagaatggcgatcattaaaaagtcaggaaacaacaggtgctggagaggatgtggagaaataggaacacttttacactgttggtgggactgtaaactagttcaaccattgtggaagtcagtgtggcgattcctcagggatctagaactagaaataccatttgacccagccatcccattactgggtatatacccaaaggattataaatcatgctgctataaagacacatgcacacgtatgtttattgcggcactattcacaatagcaaagacttggaaccaacccaaatgtccaacaatgatagactggattaagaaaatgtggcacatatacaccatggaatactatgcagccataaaaaatgatgagttcatgtcctttgtagggacatggatgaagctggaaaccatcattctcagcaaactatcgcaaggacaaaaaaccaaacaccgcatgttctcactcataggtgggaattga

SEQ ID NO: 419436 - DNA, 780 bp, Staphylococcus aureus
atgttctttgaaaccaatgagaacaaagacacaacataccagaatctctgggacacattcaaagcagtgtgtagagggaaatttatagcactaaatgcccacaagagaaagcaggaaagatctaaaattgacaccctaacatcacaattaaaagaactagagaagcaagagcaaacacattcaaaagctagcagaaggcaagaaataactaaaatcagagcagaactgaaggaaatagagacacaaaaaacccttcaaaaaatcaatgaatccaggagctggttttttgaaaagatcaacaaaattgatagactgctagcaagactaataaagaagaaaagagagaagaatcaaatagacgcaataaaaaatgataaaggggatatcaccaccaatcccacagaaatacaaactaccatcagagaatactacaaacacctctacacaaataaactagaaaatctagaagaaatggataaattcctggacacatacaccctcccaagactaaaccaggaagaagttgaatctctgaatagaccaataacaggatctgaaattgtggcaataattaatagcttaccaaccaaaaagagtccaggaccagatggattcacagccgaattctaccagaggtacaaggaggagctggtaccattccttctgaaactattccaatcaatagaaaaagagggaatcctccctaactcattttatgaggccagcatcatcctgataccaaagcctggcagagacacaacaaaaaaaagagaattttag

SEQ ID NO: 419437 - DNA, 1854 bp, Staphylococcus aureus
gtgcatgacatgacaaaagatattgaatatctaacagctgattatgacaatgaaaagtcatctatccaaagtgtaatagatgcaatagagggtcaagacttcttagatgtagatacaacaatggatgatgcggtaagcgatgtcagttctttagacgaagatggcgcaatatcattaacaagtagtgtagtaggtccacaaggatctaaattaatggggtattatcaaaatgagctatatgattatgcatctcaattagattcgaaaatgaaagaaattattgacacgccatttatagaagatatagataaagcattcaaaggtataacgaatgttaaattggaaaatatattaataaaaaatggcggtggtcatggtagagatacctatggggcttctgggaaaattgcaaagggagatgccaagaaaagtgacagcgatgtttatagcatcgatgaaatattaaaatcggatcaagaatttgtaaaagtaattgatcagcattacaaagaaatgaaaaaagaagataagaaactatctaagagtgattttgaaaaaatgatgactcaaggtgcttcttgtgattacatgacagtagctgaagcggaagagatagaagagcaaaagaaaaaagaagaagctatagagattgcagcactagctggtatggtagttttatcttgtattaatcctgttgctggagcagtagctattggtgcttattccgcttattcagcagcaaatgcagccacaggaaaaaatattgtaactggaagaaagctatctaaagaagaacgaatcatggaaggactttcgcttattccattgccaggtatgggcttcctcaaaggtgctgggaaaagtttaatgaaattaggcttcaaaggcggagaaaaatttgcagttaaaacaggattgcaaaagacaatgcaacaagcagttagtcgtatttcacctaaaatgggaatgatgaaaaacagtgtgttgaatcaatctcgtaactttgctcaaaatactcatgttggacaaatgctgagtaacatgcgtggtcaagcaactcatactgttcaacaaagtagaaattggattggacaacaagcacaaaatgtcaaacgaatagtgaataatggacttgataaagaaatagcacatccatttaaacaacaacttgcaccagcgggaatgggtggtataaaatttgctgaaacaactactttgagaaacatgggtcaaaacatgaaacgtgctgttacaccacaaaatcacgtgacacatggtccgaaagatagtatggtgagaagtgaaggtaaacatagtgtaagtagccatgaaataaatttatcaaaatatgttgaatcaccaaactacaccaaggtcaaatatggagagcaatatgcaagacttagacctaagaaactaaaagcaaatatagaatatacaacaccaactggtcacatatatcggactgatcataaagggcgcataaaagaagtttatgtagacaatctttctctaaaagatggcggtcgtaataaccatgcacaaagaactgtgggaggagaggatagattaccagacgatgatggaggtcacttaatcgccagaatgtttggtgggtcaaaagacatagataaccttgtagcacaaagtaaatatatcaaccgttcatttaaggaaaatggtgattggtacaagttggaaaaactatgggaaaaggcaatcaagtctggaaaatcaatagaaaatattaaaatagaagttaaatataaaggtaatagtcaaaggccgactatatttaaagttgaatatgaaattaatggtaaaagaaatattagaagaatattaaataagtag

SEQ ID NO: 419438 - DNA, 312 bp, Staphylococcus aureus; identical to SEQ ID NO: 408087

SEQ ID NO: 419439 - DNA, 678 bp, Staphylococcus aureus; identical to SEQ ID NO: 408086

SEQ ID NO: 419440 - DNA, 393 bp, Staphylococcus aureus; identical to SEQ ID NO: 408084

SEQ ID NO: 419441 - DNA, 1335 bp, Staphylococcus aureus; identical to SEQ ID NO: 415504

SEQ ID NO: 419442 - DNA, 243 bp, Staphylococcus aureus; identical to SEQ ID NO: 415442

SEQ ID NO: 419443 - DNA, 3030 bp, Staphylococcus aureus; identical to SEQ ID NO: 418335

SEQ ID NO: 419444 - DNA, 903 bp, Staphylococcus aureus; identical to SEQ ID NO: 415507

SEQ ID NO: 419445 - DNA, 1524 bp, Staphylococcus aureus; identical to SEQ ID NO: 415387

SEQ ID NO: 419446 - DNA, 1167 bp, Staphylococcus aureus; identical to SEQ ID NO: 415508

SEQ ID NO: 419447 - DNA, 921 bp, Staphylococcus aureus; identical to SEQ ID NO: 415465

SEQ ID NO: 419448 - DNA, 993 bp, Staphylococcus aureus; identical to SEQ ID NO: 418337

SEQ ID NO: 419449 - DNA, 393 bp, Staphylococcus aureus; identical to SEQ ID NO: 405158

SEQ ID NO: 419450 - DNA, 999 bp, Staphylococcus aureus; identical to SEQ ID NO: 415512

SEQ ID NO: 419451 - DNA, 882 bp, Staphylococcus aureus; identical to SEQ ID NO: 415467

SEQ ID NO: 419452 - DNA, 915 bp, Staphylococcus aureus; identical to SEQ ID NO: 418757

SEQ ID NO: 419453 - DNA, 1437 bp, Staphylococcus aureus; identical to SEQ ID NO: 413351

SEQ ID NO: 419454 - DNA, 792 bp, Staphylococcus aureus; identical to SEQ ID NO: 414985

SEQ ID NO: 419455 - DNA, 705 bp, Staphylococcus aureus; identical to SEQ ID NO: 414318

SEQ ID NO: 419456 - DNA, 741 bp, Staphylococcus aureus; identical to SEQ ID NO: 415516

SEQ ID NO: 419457 - DNA, 1755 bp, Staphylococcus aureus; identical to SEQ ID NO: 415517

SEQ ID NO: 419458 - DNA, 1722 bp, Staphylococcus aureus; identical to SEQ ID NO: 410056

SEQ ID NO: 419459 - DNA, 717 bp, Staphylococcus aureus; identical to SEQ ID NO: 415607

SEQ ID NO: 419460 - DNA, 1260 bp, Staphylococcus aureus; identical to SEQ ID NO: 415519

SEQ ID NO: 419461 - DNA, 1530 bp, Staphylococcus aureus; identical to SEQ ID NO: 413355

SEQ ID NO: 419462 - DNA, 174 bp, Staphylococcus aureus; identical to SEQ ID NO: 405125

SEQ ID NO: 419463 - DNA, 357 bp, Staphylococcus aureus; identical to SEQ ID NO: 405124

SEQ ID NO: 419464 - DNA, 1476 bp, Staphylococcus aureus; identical to SEQ ID NO: 415526

SEQ ID NO: 419465 - DNA, 1230 bp, Staphylococcus aureus; identical to SEQ ID NO: 415474

SEQ ID NO: 419466 - DNA, 756 bp, Staphylococcus aureus; identical to SEQ ID NO: 414317

SEQ ID NO: 419467 - DNA, 2250 bp, Staphylococcus aureus; identical to SEQ ID NO: 415533

SEQ ID NO: 419468 - DNA, 969 bp, Staphylococcus aureus; identical to SEQ ID NO: 418346

SEQ ID NO: 419469 - DNA, 1557 bp, Staphylococcus aureus; identical to SEQ ID NO: 415534

SEQ ID NO: 419470 - DNA, 969 bp, Staphylococcus aureus; identical to SEQ ID NO: 415670

SEQ ID NO: 419471 - DNA, 1041 bp, Staphylococcus aureus; identical to SEQ ID NO: 415538

SEQ ID NO: 419472 - DNA, 1077 bp, Staphylococcus aureus; identical to SEQ ID NO: 415539

SEQ ID NO: 419473 - DNA, 840 bp, Staphylococcus aureus; identical to SEQ ID NO: 415540

SEQ ID NO: 419474 - DNA, 1269 bp, Staphylococcus aureus; identical to SEQ ID NO: 415541

SEQ ID NO: 419475 - DNA, 1098 bp, Staphylococcus aureus; identical to SEQ ID NO: 413359

SEQ ID NO: 419476 - DNA, 627 bp, Staphylococcus aureus; identical to SEQ ID NO: 415543

SEQ ID NO: 419477 - DNA, 774 bp, Staphylococcus aureus; identical to SEQ ID NO: 415544

SEQ ID NO: 419478 - DNA, 2007 bp, Staphylococcus aureus; identical to SEQ ID NO: 413360

SEQ ID NO: 419479 - DNA, 1164 bp, Staphylococcus aureus; identical to SEQ ID NO: 415617

SEQ ID NO: 419480 - DNA, 1434 bp, Staphylococcus aureus; identical to SEQ ID NO: 415649

SEQ ID NO: 419481 - DNA, 1593 bp, Staphylococcus aureus; identical to SEQ ID NO: 413362

SEQ ID NO: 419482 - DNA, 198 bp, Staphylococcus aureus; identical to SEQ ID NO: 408081

SEQ ID NO: 419483 - DNA, 177 bp, Staphylococcus aureus; identical to SEQ ID NO: 408080

SEQ ID NO: 419484 - DNA, 375 bp, Staphylococcus aureus
  misc_feature (354)..(363): n is a, c, g, or t
ttgggatgcttggtttattacttattaaatattgatttaggtaaaatgatagttgctcaagatttaaatttacaagagattttctttcataatttaatttatttcttctctgcaatatttggttttctgacacttggtctgttaaatataggtatgttactcataaattctgggatgttaggcttttttatagcacatggaatctatagcaatcaattaaaatctattctattagtattagcgccacacgctatatttgagattttagcacttttaattgcttcaacattctcattaggttttttatcatacctttatcaaagaatggtaaagaaaaataaaataaaaaataannnnnnnnnngatgttccataa

SEQ ID NO: 419485 - DNA, 192 bp, Staphylococcus aureus
gtggcgtttgcgaaagaagttgcttatacaagaagagcgttattagaagaccgtgaatatatcggtactagaaacgcatttaaccgtttaaatacggcgtttgaggagctttcaggctatatgtacgaccgtttttatcaactaggaggcacaccagtaaattatcacggacatgatgatagagttagataa

SEQ ID NO: 419486 - DNA, 156 bp, Staphylococcus aureus
atgttaaataaaatcttacttttattgctctctgttacttttatgttgttatttttctctttacattcagtaagtgctaaaccagatccaagacctggagaattgaatagagttagtgattataaaaaaaaacaaaggtactatggggaatgttga

SEQ ID NO: 419487 - DNA, 720 bp, Staphylococcus aureus; identical to SEQ ID NO: 414833

SEQ ID NO: 419488 - DNA, 321 bp, Staphylococcus aureus; identical to SEQ ID NO: 417883

SEQ ID NO: 419489 - DNA, 276 bp, Staphylococcus aureus
ttgaaattagaatttaaaaaaagtatttccaataaaattatttacacgcttggtgtgctattcatattccttttcttacttgggtattttttaccaataggaatagacaaagttaaaaatttaagctatggtcagtttttctttagttcttatacagttgccactgaatttggctttttattattttcatttgttattgcatattttattaataaagagtattcgaataaaaatatattattttacaagctgattggcgataatatattattttag

SEQ ID NO: 419490 - DNA, 171 bp, Staphylococcus aureus
atgtttgaagagatgattaaagctacgaaagagaatgctaatgatgttgtgttatccttttatgatgaaacgattaaacaaatgactactttaggctatattaatcaaaaagatagtatgtttaataattttatacaatcctttaaccctagtgatattaggcttatataa

SEQ ID NO: 419491 - DNA, 129 bp, Staphylococcus aureus
atgagaatgaaggaagaccatatgaaaaatggccaacttaagccaggatacaatttacaaatagcgacaaattctcaatttttttatcctatgacctatttcaaaccccaacagatactagaactttaa

SEQ ID NO: 419492 - DNA, 459 bp, Staphylococcus aureus
atgaccattttagcgatacttgtattaatcattcctttaaatatgttgataagcaggcaatatttattaatagtgaataaaataagattatataatgcgtcaattactattggtgcggtaatgaatttagtattatgtcttgttttgatatatttttatggaatttacggtgcggctattgcacgtttaattacagagtttatcttacttatttggcgatttgttgatattactaaaatcaatgtgaagttgaatattgtaagtacgattcaatgtgtcattgctgccgttatgatgtttattgtgcttggtgtggtcaatcattatttgccccctacaatgtacgctacgctgctattaattgcgattggtatagtagtttatcttttattaatgatgactatgaaaaatcaatacgtatggcaaatattgaggcatcttcgacataaaacaatttaa

SEQ ID NO: 419493 - DNA, 285 bp, Staphylococcus aureus
  misc_feature (264)..(273): n is a, c, g, or t
atgtataaaatcaatattattagatcagattccgtctataagaatatactcaaggcaccaataaacgaccgtgattcaattttcactaaagaaatattagtaccttttaaaaagaaatttgaggtacaacatatgcctatttataatgatgacaaacagacaatgagtgcgattcaatttttagatgcctttcaaatttctcccaaagatttacgcatgtctgaccaaatgtcaatacaatacctgaataatgatttctggagnnnnnnnnnntttctggagtaa

SEQ ID NO: 419494 - DNA, 240 bp, Staphylococcus aureus
atgaaaaagaaaaaaattccgatgcgaaaatgtattctttcaaatgaaatgcatcccaaaaaagatatgattcgtgttattgttaataaagaaggcgaaatctttgcggatgttactggaaagaaacaaggccgtggcgcatatgtttctaaagatgattttaaagcatctaaagagcaattggatcctgtttacaaagaaattattagattaatttatagagaagagattccaaaatga

SEQ ID NO: 419495 - DNA, 2046 bp, Staphylococcus aureus; identical to SEQ ID NO: 415871

SEQ ID NO: 419496 - DNA, 195 bp, Staphylococcus aureus; identical to SEQ ID NO: 410702

SEQ ID NO: 419497 - DNA, 207 bp, Staphylococcus aureus; identical to SEQ ID NO: 409232

SEQ ID NO: 419498 - DNA, 345 bp, Staphylococcus aureus
atgaacaaagtccacaaacctttatatttttatttaatgcttttcttctctacaactatcataggtgctcttttattatatttacctttcactggtaaaaagccaatatcttttttagatgccctatttatagcttcaagtgcatttacagttactggcctatccccagttgatataggatcacagtttaatatacttggtgaaatagtaatactattattaattcaaataggtggtctgggtatcgtgaccgtaaccctattgacactagtatttttaaatagaaagatatcaatgaaaaataggtttatttttaagcttattcacatcagtatcagcttttaa

SEQ ID NO: 419499 - DNA, 1341 bp, Staphylococcus aureus
atgaaaaatacatttaatccattacaaagattacatttctatgcagcaatatttattgctccactgttaatcactttaaccatttcgggcattggttacttgttctttccagaagttgaaaataatatttataagaatgagttttttggtgacagtgatgtaaaaacgcatcaaacattaaatgatgcagtacatcaagttgaacaacaatatgaaggattctttgtaagtaaagttagcatacttgatgaaccatataacaaacgaattacactgagtgatatggcaggaaatcaacgttacgtctttctagatcataacaatcaatttgttgcagatcaaaatgcgaaacatacgtattctaatgtgatgcgaagtatacatagttctttgtttactgaaaatactattattaattatttagtagagttaaccgcatgttggacgatattcatgattttatctggtacttatttactcattaagaagcatttaatttctaacaaaagtaaggcacttcgttggcaaaagtggcacgcaatgattggagttatcattgcaattccagtatttgtattagttttaactggattgccatggtctggttttatgggcagtaaaattgccggtatgatggacacaaacggtgaccttggtcaaggtgaattagcgattaatccacctaaatcagatttgaacgaattaccttgggctacacgtaaaaataaacagccagcttcatccgaaaaaggttcaagtggtcatcatggtaatgcagcaatgcctcaaaccaaattagattatcaaatatctattgataaggtcgttgtacaagcgcaaaaagctggtattaaaaagccgttttcaatcgtatatccaagtgataaaaatggtacctttattgtatctaatactagtaattcaggtgttactgggctagatgtatcaccttacaaggaacaaacactttatttcgaccaatatagcggtaaaaagctaggtacgattaaatatgatgactacggtattattgctaaatggtttacatggggcattccgcttcacgaaggtcatttattcggcattttaaataaaatcattaatttatttgtatgtatcactttattagtagccattggcatggggtttgtctcttggataaagcgtacaaaaaatactgcagtaaaagtaccacatcgcgtaaaaaaaccagcatctatatcactcataatatgtttaattgtattaggattattaatgccattatttggattatcacttatccttgtatttataattgaattaatattatatattaaagatcgtcgtgctaaacaataa

SEQ ID NO: 419500 - DNA, 276 bp, Staphylococcus aureus
atgagaaactcaaaaaaacaacttaaagataaatcacgtccatatgttgttacaactttatttagtactaaagataattttactaaagataatacaatagacgagatgattgatttttctgaagtactaaaaaagaaaaagaatattcctcatgatttgaatgtttctcttcaaatttctaataaatatataaatacaaaaagacctaactatagtaagaaggaagtaatagaagtaggtgtatttaatcatgaaaaagctaacacgaatgattaa

SEQ ID NO: 419501 - DNA, 384 bp, Staphylococcus aureus
atggcaatgaatgaaattgctttatttaaaggcgtacgtatacagccttatcagaagtatattgattttatgtttgcaggtgtattagcatttatttttttggtatatcgtatatacattttgtttattgattataaatcagttaataaaaaattggatatattgacgttgtttgcatattttaaaccgcatttattgtatttattaattggtacagcaattatatttgttatatgtaagcttatcgctcagcttttaattcgttttaaaacaaaagatttagctgaaatgattgaaacacaaggttttcataatcgtacagtaatcaagaaaacaaccgagtatatccctattgattataaacaaactgaatatgatatttaa

SEQ ID NO: 419502 - DNA, 816 bp, Staphylococcus aureus
gtgtttgatgaaattaaatcttttgaaaattatcatcatattgaaacggcaatttatcaagctatttctgatacggttgaagaacgtgaaaatggtaaaaaagttggttcattaaatgtaattgaaaaattacagaataatgaagatgagcatgtaaaaaatgcaggcgatttattatttgaaaaaacgcaaaacaatattttaaaacttgtttttagtgatggtacgaatccagctttaaatattcaagaaaaagcaactattttacaggttaaaggtttagatatgcctaaagcagatgatgatacatcaagttattcaacaagtgagaaaaatgggattacattaatgttattaattggtaagtttttagagaaattcggttctcgtagagatgttcaaacgactatatttattgatgagggttgggcttttagtgcttcaagacaaggtaaaaaagttggtaagcgtataaaaagaacgggacgttctgagaataattcacttgtatttattacacaatcggtaaaagataaagcagatgatgatggtggtaactttggttgtcattttgcatttgatgaaaaagatgaacgtgaggatattttaaaatctttaggcttagaatattcaaaagaatctcctgaaaatatggaaatgttgaaagatttgaagaaaggtcaatgtatatttagtgatttttatggacgtgttggaaaaatggttgtacattgtccatttgaggaaatgactgaagcatttagaacacaagaagattctgcaagctctaaagctgaagaaaaatttgcgatgtaa

SEQ ID NO: 419503 - DNA, 858 bp, Staphylococcus aureus; identical to SEQ ID NO: 407972

SEQ ID NO: 419504 - DNA, 1299 bp, Staphylococcus aureus
atgtttatgtcagcgattgaatcatctattatttcgcttgcattacctacaattaaacaagatttaaatgcaggaaatttaatttcattaatttttacagcgtattttatcgcattagtaattgccaatcctatagtgggagaattactttcgagatttaaaattatttatgtggcaattgcaggattacttttatttagtataggtagttttatgtgtggtttaagtactaattttactatgctaattatatcacgcgtgatacaaggttttggatcaggtgtattgatgtcattatcgcaaattgttccaaagttagcatttgaaattccgttacgatataaaattatgggcatagttggcagtgtttggggtatttcgagtatcattggaccgcttctaggtggtggtatattagaatttgcaacatggcattggttattctacataaatataccgattgcgatcattgccattatattagttatatggacatttcattttccagaggaagaaacagttgctaaatcaaaatttgatactaaagggctcacgctattttatgtatttattggattgattatgtttgctttattaaaccaacagctattacttttaaatttcttgagttttatcttagctatcgttgtggcaatgtgtttatttaaagtagaaaaacatgtttcttcaccatttttacctgtggttgaatttaatcgttcgattactttagtttttataacggaccttctaacagctatttgtttaatgggattcaatttatatattccagtctaccttcaagaacaactaggattatctccattgcaaagtggattggttatttttcctttatctgtagcttggattacattgaattttaatttacatcgaattgaagcaaaactatcaaggaaagttatttacttactatcatttacattgttactagtaagtagtattatcatttcatttggtattaaattgccggtacttatagcatttgtgttaattttggcaggattaagttttggatatatttatacgaaagatagtgtaattgtccaagaggaaactagcccattacaaatgaagaaaatgatgtcattttatggattaactaaaaatcttggggcatcaataggttcaacaataatgggatatctttatgcgatacaatcaggaatctttggtccaaacttacacaatgtgttaagtgctgttgctgtaattagcattgggcttattgttttatgggtcgtattttttaaagaacagtcatctcaatcaaaagaatag

SEQ ID NO: 419505 - DNA, 672 bp, Staphylococcus aureus
atggtaacttcagaaatgccaagagaacgtttgttaagccatggtgcaaaaagtctttcgaatacagaattattagctatattaattaacaccggaagaaaaggattctcgagcatagacattagtaatgaactgcttaaatctgcttcgaatctgaatgaattgaaaaaatcttcaattaacgatttgataaaagttaaagggattggattacaaaaagcaattactttaaaagcagcatttgagttaggggaaaggatggggagaagagctgaaaataatcgtataaaaataacgcaaccaagtgatgttgctgattatatgattccaacaatgaaagatttaacacaagaacattttgtcattttattgttaaattcaaaaaatgtagtgattaaagaaacctgtgtttttaaaggtacattaaatagttcgattgtacatccacgtgaaatttttagtattgcggtgagagaaaatgccaatgcaatcatcgcagttcataatcatccatccggtgatgtaacgccctcacaagaagatatcataacaacaatgaggttgaaggagtgtggtttgattttagggatagatttattggatcatattataatcggtgataatagatttaccagtcttgtagaagcgggttactttgatgaaaatgattga

SEQ ID NO: 419506 - DNA, 276 bp, Staphylococcus aureus; identical to SEQ ID NO: 415943

SEQ ID NO: 419507 - DNA, 318 bp, Staphylococcus aureus
ttgaaagataataaacgtgaagataatccgaaagcaaaagcatttattgaagatttctttaataaatattcttctagtaagtctgatgatatggcttatttaatggataatcctgagggattagaaggaactagagaagtttctcaaataagagaaattagattatatccaaaaggcgatgattatgttgctaaagttgaaattttgatgaaagataaagattctcctttggagaatttggaacattacacattagatataacgaaaaaagatggtaaatattacgttaaaaatatgactaattctattggaggttaa

SEQ ID NO: 419508 - DNA, 309 bp, Staphylococcus aureus; identical to SEQ ID NO: 411655

SEQ ID NO: 419509 - DNA, 366 bp, Staphylococcus aureus; identical to SEQ ID NO: 417911

SEQ ID NO: 419510 - DNA, 789 bp, Staphylococcus aureus; identical to SEQ ID NO: 410948

SEQ ID NO: 419511 - DNA, 393 bp, Staphylococcus aureus
atgattagtaaaaaagaactaaaagaaatgtataaaactgggttatgggaatttgaaacacatacccacgatttgcataacttatctaaaaataataagtcaaaattaatgaaagcttctgaagctacaatcataaaagatttaaacaaaagtgaaaaatatctaactaaaaactttaaaaagtcgcagaaaactatagcctatccttatggcttgatgaatgacgataaattaccggtaatcaaaaaagctgggttaaaatacggtttttcattagaggaaaaagcagtcactccgaactccaatgattattacatccctagaatattaattagtgatgatgcttttgagcatttaattaagagatgggacggattccatgaaaaagattag

SEQ ID NO: 419512 - DNA, 453 bp, Staphylococcus aureus
atgggttataactacgaacgtgtattaaatttcttagaacgttatttagttattatgattgtattagctgtagctacttattttgtgtttattgcgttagcaaatggagactattggaacgttaccagcttttcatattcattaacaccatataatagtattatgtttattgttatcttgggtatttgcacgcattttaaaacaatgttatttaatacgattcaaatgattagtgctttctcattctttatttatttattacatccaatcattctagactcattgtttgcatatacaaatatatttgaggataatacaatggtctttctagcgatatcactactattcattttagggttatgtataggtgtcggtatgatattgcgtgaattctatatctttaggtttattattggaaaacaaccatataaattgaacattaatgcttattaa

SEQ ID NO: 419513 - DNA, 174 bp, Staphylococcus aureus
atgggtattgatgatgcaagttatgctattaatgaatttattaaaccaaaaatttctgtaccgattcattatgatacattcccattaatcgaacaagatccacaacaatttaaagatgctgttaatgtaggggacgtgcaaattttaaaaccaggtgaatctgttcagttttaa

SEQ ID NO: 419514 - DNA, 624 bp, Staphylococcus aureus
ttggaaaacagaatagcagaattgagaaaagaaaataatatgactctaaaacagttagcaaaagagttaaacatacgcgataatactttaagccagtacgaaaccggaaaaaggaatccacaaatgggattgttacaagaaatcgcaaatttttttggtgtgtcaatggagtatattttaaaagctacaaacaagcgagattaccccatagcagatagcaaaagtgccattgaattacttgaaagaatggaaaacgaaaaagggtttaattatttacacatatcaaaaaataccgctcttaaccttagtttgtggattatcaataacatggattacattaaagaaaaacacccaaatctgctatatacggcatcttttttggtaaaaaatacagttagtgaaaataaaatattgcaacactactcagaaacgagaataaaggaactccagattgttgacgaaattgatgatatattgctcgaaagagagttttatggagcaagcgccgaacaagtccttgaatttatacatcaaagcgaaagaattggtcatcaacaaacagaagcgttaatgaattatataagagatttaccaactgaagagtatgacgacgaagatatttaa

SEQ ID NO: 419515 - DNA, 198 bp, Staphylococcus aureus
atgtttggtatagatgaaaatttatcctctaaattaagagagataagagcaagaaaaaatattacattgcaacaagcatctaaagaaatcgggatttcaagtaaaacgttatcgcttatagaaaatgaaatgcttgttaaagtaaagcggacaacttatgaaaaggtaactaaatggataataaatgaggtgaaataa

SEQ ID NO: 419516 - DNA, 261 bp, Staphylococcus aureus
atgcaagcatttcttagtgaacaagctagtcaacagttagctaatagcatagttgatattgccgaaaaaatagctttacaaaaagttgagcaatcacgtaagagatatctcattcaaaaagaagtcatggaagaatacaacgtgactcacaaggttataaccgagtgggaaatgatgggacttcgtaaagttaagattggtaaaacaattcgctatgatcgacaagatatcgaaaatgtaattgaaaaaatgaaaaagtga

SEQ ID NO: 419517 - DNA, 522 bp, Staphylococcus aureus
atgaaaaaggacgctaagttagccgctatcgttccacagagtacaatgattggtaaaactaataatgataagaattacaagcgcgaaatactagaaaagcattcgttagaaacagtaattacgcttaataaagataccttttatggcgtgggagtaaatccgtgtatagcaattttcactgcaggtgttccacaagacaacaaaaaacgtgttaactttgtaaacttttctgatgatggttatatagtgcgtaaacatgtgggattagttggagatggtaccgagaaatcaaaaaaagaatatcttttaaacgtgttaaatgattatgaagatgcggatactaactttttagttaaatcccctattacttggaaggatgaatggttgcatagcttcttttactacaatgaagaaattcctacagatgaagatttcgaaaagacaatagctgattacttatcatttgaatttgatatgaaactgcacggcaggggggatttattcgataatgaaactgagtga

SEQ ID NO: 419518 - DNA, 459 bp, Staphylococcus aureus
atggctaaaagattaaaacatgatatttatagagctttaggagagtatgttattaatagaaattctagattactgaatgaagaacaactaaaagtagctaaagagtataaacctatattaatgaaaatgtatagcaaagtatcaaaagaaaaaaagaaacgtaaaattaaaaatttcgttaaacagatacctgagtatattttgtcttttatttatacattaatgtattggatcacaataccttttgattatattggcgataaagcagatgatttgagagtgtcttatagtaacaatcgtggttataatcgattttcaaaggcacgaaaagaattaaacgagtatgcttataacgaagttttaccacgtttagaagaaaaagaaactgatgatatgacagagattcatcaacgatttttaaaagacaaaggtattgtaaaagagttgataaagaagtaa

SEQ ID NO: 419519 - DNA, 456 bp, Staphylococcus aureus
atgaaaataataagcaagtacattttaacacgattttctaaaaacggaaagcattttgatattcctaaagaacaacgccgagtaattccaaaatttaaaaatcgtcgtaagatgattgtaatttgtttttactcattattagctattttgttaattcttttattagcttcttttattaaagctacaagagcaaataatgacagtaaagaagcagttaataaaacgaatatgattcaaaaaaagtatgaagataatgcgaatacagttcagtatagtcctaaattaaagttatatgctgataagtttattgatacgtatatgaatatctcgaaagattcaaaagaattggaatctagagaaaaagaattgttgaaatattttccatcagattataaaaaacctgatgaaaaaatttcagatacagaacgaaaattcaattatacagtatattgttaa

SEQ ID NO: 419520 - DNA, 213 bp, Staphylococcus aureus; identical to SEQ ID NO: 408405

SEQ ID NO: 419521 - DNA, 225 bp, Staphylococcus aureus
atgaagaagaatttcaagttacgtatttcaacgctactattgatagttattttagttgttttttctgtattgctcatcgtgaatgaaactaaattgtttaaaaatgatgtgaattactcttttgatgaggctgtttcaatgcaacaagggaaaggtattgtacagacaaaagaagaggatgtaaatttgttgaagcaaataataatgaaattgctaaagcaatga

SEQ ID NO: 419522 - DNA, 741 bp, Staphylococcus aureus
gtgattaatttaaactcaaaaattagccaactgaatttgctttttgtcaaagatattaaaaagatagatgtcgatgttaaaacagggtcaaaagcgaaagcggatagctatgtaccatacacaatcgcagtaaatgggacatcaacacctattgcatcaaaactaaaactttcgaataaacaattaattggttatcaagatttaaataaaaaagttaaatcagttttaaaacatgatagaggtatcaatgatattgaattgaaatttgcgaaacaagcaaagtatactgtacactttaaaaatggaaagacacaagtagttgaccttaaatcagatatctttacaagaaacttattcagtgtcaaagatattaaaaagatagatattgatgtaaaacaacacactaaatctaataaagcgcttaataaagtggctaacatagcgactaaagtgaagtttccagtaacgataaatggattttcaaatgtagtttcaaatgaatttgcgtttttacatccacataaaataacaacaaacgacttgaatgctaaacttagactagcgttagcaagcgatcaaggtattactaaacatgatattggactttctgaacgcactgtgtataaagtgtattttaaagacggatcatcaaaatttgttgacttaaaagctgcgaaacaagattcaaaagtatttaaagcaactgacattaaaaaagtagacattgaaattaaattttaa

SEQ ID NO: 419523 - DNA, 744 bp, Staphylococcus aureus
atgactgaccaaccaagttactactcaataattacagcaaatgtcagatacgataaccgacttactgacagcgaaaagttactttttgcagaaataacatctttaagtaacaaatacggatactgcacagcaagtaatggttactttgcaactttatacaacgttgttaaggaaactatatctcgtagaatttcgaaccttaccaactttggttatctaaaaatcgaaattatcaaagaaggtaatgaagttaaacaaaggaagatgtaccccttgacgcaaacgtcaatacctattgacgcaaaaatcaatacccctattgataattctgtcaatacccctattgacgcaaatgtcaaagagaataatacaagtattaataatacaagtaataacaatataaatagaatagatatattgtcgggcaacccgacagcatcttctataccctataaagaaattatcgattacttaaacaaaaaagcgggcaagcattttaaacacaatacagctaaaacaaaagattttattaaagcaagatggaatcaagattttaggttggaggattttaaaaaggtgattgatatcaaaacagctgagtggctaaacacggatagcgataaataccttagaccagaaacactttttggtaataaatttgagggatacctcaatcaaaaagcagaaccaactggcatagatcaattggaacgtatgaagtacgacgaaagttattgggattag

SEQ ID NO: 419524 - DNA, 330 bp, Staphylococcus aureus; identical to SEQ ID NO: 409192

SEQ ID NO: 419525 - DNA, 240 bp, Staphylococcus aureus
atgagtgtgcctgctttcgttaagaaaaaggcacaaggcgcccgattggtcgcacccaaattggatcaagcaacgcgacaatcggtagcgaaagatttgagtatgttgggcgcaaatgccaatcaaattgccaaatattgcaaccaacatcaacacgaagcgccgaactatgaagcattagcgcgtaatatcagcgaattacgtgaaaggttagatgagatatggaacaaactaaattaa

SEQ ID NO: 419526 - DNA, 771 bp, Staphylococcus aureus; identical to SEQ ID NO: 408548

SEQ ID NO: 419527 - DNA, 246 bp, Staphylococcus aureus
atgtatgctttagtatattgctttaaattagatgaatttgaatttaatttaaaaaataagtataaaaaatacaagcctgttatatcaagggattcaagagttttgcatgcaatatatatgtgggttataaataataaaaaactcattatacataaagttaacaacaatcttaactttttattaactcgctttttttcattgcttttaaaaaccgaacaatatagaattgcatttattgagttttaa

SEQ ID NO: 419528 - DNA, 216 bp, Staphylococcus aureus
atgtcattgcctggttctgatccttcaccagtgattttcttgctgcctgactctgtatccttaacttttggtgcgtctggtgccgtcgtatctatgacgttacctgtaccacttgatgattcattgcctgatggatctgtttcttttgctgtaactttgtctccaggttttaactcttcacctgctggtacgtcgacttcccattggccatcttga

SEQ ID NO: 419529 - DNA, 147 bp, Staphylococcus aureus
atgcaatacaatactactagatatatagacgaaaatcaagataataaaacattaaaagatatgatgaaaaatgggaaacaacgtccgtggagagaaaagaaaatagataatttaaggttctgttgcaaagttagaaatatagtataa

SEQ ID NO: 419530 - DNA, 255 bp, Staphylococcus aureus
atgacaagagaaaaaggatcatttagttcagagtttaagttacaaatggttagattatatgaaaatggtaagcctaggaatgaaattatacgcgagtatgatttaacaccttcggcattaggaaaatggataaagcaacatcaaaacacgggtacattcaatcaccaagataacttatcagatgaagaaaaagagctgattaaattacgtaaagaagttcaacatttaaaaatggagaacgatattttaaagtaa

SEQ ID NO: 419531 - DNA, 177 bp, Staphylococcus aureus
atgttcataattgttgctgtaaactcgatattaaatgaaaactttaaaaatatacttataaataaaatgacaaacgacgcaattgcaataaaactgccgtatgtagctatctttgttacgaggttttatacagtaatgaaaatcatgatacttgtcgttgtagtgattaaaatgtga

SEQ ID NO: 419532 - DNA, 663 bp, Staphylococcus aureus
atggaaaactcactagatttatcaaaatttatgaaggctatcaaaaaaaattggaagttacttttaatattgccaattatttttatgcttattgctttattaatgactatgtttttgatgaaaccaaaatacgaatcaaatactcaagtcttggtcaatcaaaaagaaaaaaaatcagagctaatggctcaagaagttcaaagtaatattcagcttgttaatacatattctgagattgttaaaagccctcgaattttagatgaagtagcaaagaaaaataaaaaatattctgcttcagaaataaaaagtatgctaactgctactactcaagctggatctcaaattttaaacgttaacatagaaagtggcagtaaaaaagatgctgaaaaagtagccaatgacattgcaaaagtttttagtgatgagatgccagacattatgaatgtagataatgtaactattctttcaaaggcgaatggaactgcttcgaaagtttctcctagcttgataattaatttagctatcggattaattttgggattaattttagcattgataattattatattaaaagaaattttcgataagcgaattagaactgaagaagatattgaaagagaattaaatattcctgtattagggtctatccaaaaaattaaataa

SEQ ID NO: 419533 - DNA, 708 bp, Staphylococcus aureus
atggccagaaaagaacttaaaagaaataaactagaaaaaactctgtatgttcatgacaaacctaaatcgattgtgagtgaaaaattcagaggtattcgatctaatataatgttctcaggtgcaaatggtgagattaagagtgtagttattacatcagaaaaaccagcagcaggtaagagtactgtttcagctaacgttgccataacatacgctcaagctggttacaaaacattaattattgatggagatatgcgtaaacctacgcaacattataattttgaaacatcaaattatgatgggctttctaatttaatcattggtaaaagtgatttcgataaggctatacgcagtactagagttgataatttagatttattaacatcgggaccagtgccgcctaacccttcagagttaatcgcatctgaaagcttcagtaaactttataaccaattattagatatttatgatttcgtattaattgatacaccacctgtaatttctgttacggatgcccaagttttcttacaacatgttccacattgtgtattggttatcgatgcagaaaaaaataataaaactgaagtgaaaaaggctaaacatcttattcataaagcagatggacatatactaggagcagtattaaataaaactcctaaagataaatcttcggattattattactatggagatgaatcagataatgattga

SEQ ID NO: 419534 - DNA, 768 bp, Staphylococcus aureus
atgattgatatacacaatcacattttaatagatgttgatgatggtccaaaaaataaagaagagatgttaaatcttattaaacaagggaaaagagaaggagttactaaaattatagcaacccctcatcacttaagtccaacatatgataatgaatatgaaatagtacaacgtaaattagaggaattaaatcaaatggatgaagttaaacaattaggagtagaactttatccagggcaagaagttcgcataagcgatcaaattttacctcaattagatgagaaaaaagtaataggattaaataattcaaaatacattttaatagaattgccttcaggtagagtgcctcattacactaataggctgttttttgaattacaatctaaaggttatgtgcctataatcgcacatcctgaaagaaacaaagaaataagtcaaaacttagatacattgtttgaattagtaaatggtggtgcactcagtcaactaactgctgcttcccttaaaggaaaccatggtaaaaagctacagaaaatttcacttcaaatgattgataataatttaacacattttattgcatccgacgctcatcatagtgaaactagaccatttattatgaatagtttatttgaagataagaagttgagaaatcacaccaatgacattcaaaagatgattgataatgctgaattggtcatcaatgatcaagatttagccaaaaaacaaccgaccccaaattacaatactaagaagttgtttggtttattttag

SEQ ID NO: 419535 - DNA, 1824 bp, Staphylococcus aureus
gtggataaattaagttcaagaggacgaatactgttatttataataatagactcattaattgtagccttttcagtttttatttgttacaacattttagaaccttattttagaggatactctcataaaattttaattttaacatcaataattttgttgatttctcattatttctttgcatatatatttaatctttatcatcgcgcatggcaatatgcaagtgttaatgagttacttttaatagttgaatcagtaacgtgttcaattatagttacgattattactgtcccagtattcactggccatccaccttttttaagattatatttaattacttggatgatgcatttgattttaattggaggctcccgtatatcgtttagattaactaaaagatatataggaggaaaaaattataagaaaaaaccaaccttggttgttggtgctggacaaggtggttctttattaattcgtcaaatgttaagaagtccagatatgggacttgaaccagttcttgcggtagatgatgatccaagtaagcgaaaattagctattgctggtggtgtaaaagttcaaggtactattgacgacatacctaatttgacaaatagatatagaataaaaagaattattattgctatcccgacattaaaatccgaacgtttaaaagaaattaatgatatatgtaatagtacaggcattgaattattcaaaatgccaagtattgaacatgtattatctggagaactcgaagttaatcagttaaaacgtgttgaagttgaagatttactaggccgtgaacctgttgaattagatatggccatgatttctaaagaactcacacataaaacaataatggtaacaggtgcaggaggctctattggttctgaaatttgtagacaggtatgtaaatttgaacctaagagacttttattattggggcatggagagaacagtatatatctaatacaccaagaattattgaatatttatgaggaaagaattgaaattatacctcttatagctgatgttcaaaatactgaaagaatgcaagagataatgaattactataagccttatgcagtttatcatgcggcagcacacaaacacgttccattgatggagtacaaccctccagaagcatttcgaaataatgttttaggaactagaaatgttgctctggccgctaaaaatgttgaagttagaaaatttgtaatgatttctactgacaaagctgttaatccacctaatgtaatgggagcgtctaaacgtatggcggaaatggtagtgcaaggtttaaatgataaagaaggaaaaacaaactttgtagctgtaagatttggaaatgtattaggttcacgtggttcagttattccgttatttaaaaaacaaattgaagcgggaggccctgtaaccgttacacatccagatatgacaagatactttatgactatacctgaggcatcacgtttagttttacaagctggagcattggctaagggtggagaagtgttcgttttagatatgggagaacctgtaaaaattgttgatttagcacgtaatctaattaggttaagtggtaaaacagaagatgaaattggaattaagttttctggtgtgagaccaggtgaaaaattatatgaagaactattaaatgaagatgaaattcatcctgaacaagtgtacgaaaaaatttatcgtggcaaagttactacgtataatccagatgatttaaataatattatatacaatttacaaaaaaactttgacaagcagtttttaatagattttgctaataataaaaaaggtggtaaaagttatgaataa

SEQ ID NO: 419536 - DNA, 1290 bp, Staphylococcus aureus
atgaataataatactaaaataggtgtaattggtttaggctatgttggtatgccgttagcagtagcatttgctgaaaaattcgaagtagttggatttgatatagatgcaactaaagttgaaaaatataataataatattgaccctactggtgaagttggaacagaaggtttaaaacaaacaactatgaaatttacctctaaggaagaagacttaaaagatgtaaacttttatgtgattacagttccaacgccaattaaacaagataatacgccaaacctagcacctattgaaggagcaactgaagttgtaggacgctatttatcaaaagacgatgtagtagtatatgaatctacagtttatcctggcgtaactgaagatatttgcttacctttattagaacaacaatctggattgaaaggtatcgaagagtttaaagttggttattcacctgaaagaataaatccgggtgataaaaaaaatactgttaaaaatatagttaaaattgtatcaggtattgatgaagaagcattggaaattatttcaaatacttatggagcagttattgaagctggaattcataaagctccaaatattaaagtggctgaaagtgctaaagtggttgaaaatagtcaacgagacattaatattgctttcatgaatgaattgtcacaagttttcaatcgtatgaatattaatacttttgatgtaattgatgccatgaatacaaaatggaatgcactaggattcactccaggcctagtaggtggccattgcattggagtagacccttactatttcatatatcaagccgagaacgttggtttccactctcaaataataactgcaggaagaaaaatcaataatttcatgtctacttttgtaggagaaaacttaattaaagaattagttaaaaataaaatggcaaacgatcctaaagtagtagtatttggcttaacgtttaaagaaaatactccagattttagaaactctaaaattattaatatgatagaagaattaaacgaatatggtattgaaccattagtagtagatccttatatggattcatttagacctaaatatgaaaatatcaaagctacttatgctagtgatattagttcaattaactctaatattgatgtattagtatactctgtaaatcataaacagtttaaagaattagaagatcaaaaattcttaaatttacttaacgagaaacatgctattattgttgacttgaaaaatagatttaaaaattatgaaagcaataaaatttcttattggtcattttaa

SEQ ID NO: 419537 - DNA, 1230 bp, Staphylococcus aureus
atgagtgaaagaaacattccattttcaccaccaactattaatgaagaagatataaacaaggttgttgaagttctaaaatcaggctggattacaacaggaccaaaaactaaacaattcgaaaaagatatcacggaatatgtaggtagtgcctcaactgtagctttaaattcatgtacagctgctttagaaatgactctaaaagtgcttggcattggagaaggcgatgaagttattgtaccagcttatacttacactgctactgcttctgcagtagcgcatgttggagcaacaattaaaatgattgatactgctaatgaatcatttgaaatggattatgaaattttaaaaaattatattacaaaaaaaacaaaagctattattcctgttgatttagctggtaaaccaattaattacgatgaaatttttaaggctattgaaaataaaaaagaattatttacacctaatactgagattcaaaaatcttttaatagaattgtagttattgctgatggagcacattctttaggagcaaaaagaaataatatttccgtaggtaatatagcagattttacatgtttttcattccatgcagttaaaaatttaaccaccggcgaaggcggagcagtaacatggaaagaaaatccatctataaataacgaggctatttataagcaatatatgctattaagtttacatggacaatctaaagacgctttagcaaaaactaaagctggaaattgggaatatgatatcgttgctccattatacaaatgtaatatgacagatattcaggccgcaataggtattactcaattagaaagatacgaggctattttaaataggagaaaagaaataatctctatttatgacgatattttaagttctagtaaaattaatattcttcaacatttcaatgatattgaagaatcatcaggacatctatatctaactagagttccaaatatgtctcaagaacaacgtaacctggttattgaaaaaatggctgaaaaaggaatatcaacaaatgttcattacaagcctttaccattattaacagcttataaaaatcttgggtttaatattgaaaattatcctaatgcatataatcaatttattaatgaaatcactttacctttacatttggaaattactgatgaagatgctgttttcattgctgaatcttttgtggaaattgtaaatgaggtgactaataatgaactatcaaaataa

SEQ ID NO: 419538 - DNA, 597 bp, Staphylococcus aureus
atgaactatcaaaataattacaagcgagtacttgatcttggcttatctttagctgccatgcctgtagtgagcttggttctagtaggggcttcagtactaatcaaattagacgataaaggcacggtattttacaaaagttatagattgggtaaaaacaagacaaaatttttaatgtataagtttagatctatgaagatgtatgccccagatattagaaacgaggatggatctacttataattcggaaaacgataatagaattactaaagttggtaatataatcagaaaaaccagtattgatgagattccacaattaattaatgttattaagggcgatatgagcatagtagggccacgtcctgatacacctgaagcattaaatatatataaaaacgatcaagtacgaaagcttgaagtaaaacctgggattacaggctacaaccaagcatttttcagaaattctatccctcaagattataaatttaaaaatgatgtttactatgtagataatgtttctttcaaatttgattttataatcatttggaaaactatattgagcgttttaaaaagaagcaatatcaataatgaggagagataa

SEQ ID NO: 419539 - DNA, 501 bp, Staphylococcus aureus
atgtctcaaattaatttaagagctttaaaaaaaagtgacagtgatttaattttaaattggatgaaaaatgataagttaagatatctcattggtactacttttcctgttactgagctagaacatgaaaattggtttcaaaacaaaatgttagaaaaagataacagaatatttgtaatagaattagaaagtgaagctgctattggtatagttgggtttaaaaatttagactggataaatagcaattcagaattatttatctatataggtgatgagaactattggggtaaaggttttggtaaggaagctcttaaattattaattaattttgcttttagtagtctaaatttgcacatgttatacttagaggttttttcatataatgataatgcaaccaaaatgtatgaaaaattaggctttaaacaagatggagttttaagacaaagtaaatatcaaaatggtcaatattatgacaaaattataatgtcaaaaattaatgaatga

SEQ ID NO: 419540 - DNA, 1188 bp, Staphylococcus aureus
atgagaaaagtaatcattctaggtgcaagctttttacaagtaccgattataaaaactgcgaaaagaatcggctactatgtaatagtagccgatatgaatcctaaagctgaaggatttgaattcgcagataaaaaatatgtggtgagcacgattgatacagacgcattaatagaaatctttgagaaagaaaaaccagatggtatagtaactgcagcgactgatatgccaatgagatctatcgcttatataggtgaaaaattcaatttaaacactatcagttatgaaaccgcactcaaagctactgataaatttaaaatgagacagtcactaaagaaaaataatgttccaatccctgaatactatttagttagtaatcgtgaagattataaaatagctctttctaaaatcaaaggaaaaaaaattgttaaacctgtagattcttctggtagtagaggaatctttttattagaaaaagatgatgatatagaaatagcgtttaaacatgccattgaaaattcttctactaaaactattttagtagaagaatatatggaaggtgatgaagtctcagtagaaactttaagtatacagggagaaacgcatgtactagctattacagataagcttaccactggagcaccacattttattgaacatgcgcataaaatacaaagtaataaaaaagatagtataaaagaagaaattacaaaaatagctattcaagcaaataaagctctttcaattaataatggcccgtctcatacagaaataatggtgactccagagggacctaaaatcgttgaaattggtgcacgtcttggtggcgattttattacaagtcacttagtaaaatatgccactggaatagatattttagaggctcatttaaaacaaagtgttaaagacccattgaataatttggaaaacaatttaaacaaaggttgcgcagtgagatttatacaaagtaatccaggcgttttaaaaaaagctaaaattcctaaaaatattttaaatcaccctcaggtgattgatgtagggttaacagctaacgaaggtgaaaaactaggaaaagctaatagcagtactagtagaattggacatattatttgccaagctgaaaattcaacattagctttagaactttgtgatgaattgataaaagaaattaaaattgaaatagaaaattaa

SEQ ID NO: 419541 - DNA, 1239 bp, Staphylococcus aureus
atgaaaatatggatagtttcagatggtgaaccattaccaaccgatagtagtaatgtaagacttagacgtatgggaaatttaactaaaatattagatcaacaagggcataaagtaatttggttttcatcaaactttgatcattataataaaaaattccgttctgataacgacaaagtagaaaatttgtataatagatctaaattattacttctatcaacaaagggttacaaaaaaaacgtttcgttagctagatttttacattttaagatgttcggggagaagtttagacattatgctaatacactagaaaaacccgacttgattctatgcactatgtcaccaattgaagttgctcaaaaagtaaaaaattattccttaaaaaatagtgtgccatttattattgacataagagatttatggccagaaatttattatgaagtcacacctgaattatctcacccgcttgtaaaattattggtaaatagttctaaaaggagtttaagcgaggtacttaataatactactgctattactggcgtgacaaagggctttgtgaattacggtttaaaaataagtggttttccgccaagggaaaatgatgttcatttccatacagcttatccaaaattcgatttaaatgattataaaaatagatttaaaaagttttgggggaaatacgacgtaaaagatactgattttatagttacatttgttggtaactttggtaaacaatttgatttagaaactttagaatatgctatagataagattcagaataataatattaaatttattttgtgtggaactggggagaagtttaattattttgtagataagtataaaaataatgacaatgtggttattcctggatgggtaggtaaagatgaaattgcttcattaatcgcatcttcaaatgttggtattgcaccttataaagatagtaagaattttaggttaaatgctccaaataaattcggtgaatatctctcagcttcacttccaatactagtttctgtttctggtattatgtcagaattattatcagaaaatgaatgtggatattattatcaaaactcagcggaacttgttgatttaataaacaaatattataaatctaattatttacaaattaaacatgctcaaaacgctaggaaattattcgaaaaatcatttaacgcagaaaatgtttataaagattttggagaatatttagtaaacgtggccataaactctaaatag

SEQ ID NO: 419542 - DNA, 561 bp, Staphylococcus aureus
ttgataaaaaaaataataaaacgtttgttaagaataacaactttaaaaaaaggtatttatggaaaaattggaaaaggtaataaattttcatggagtgtatttattagtgaaggagctcaattaggatcttataattatgtaggaccctatacaatgattaataatgctcaaataggtaattactgttccattgctccaggtgttaagctaggtcaagctgaacatagtaaatatttttttactactgcacaagtacttagtagagatttaattaatcattccttgaataaagaaaaagcaattataggcaatgatgtgtggttaggagctaacgtagtagtacttcagggtgttaaagtaggcactggtgcaatcataggagccaacgcagtagttactaaagacatacctgagtatgctatagctgtaggaactcctgcacgagtactaaagtatagattttctgaagaagttataacttctataaagaaaacaagctggtttaatcaggatgtaaataatgctaaaaaaacgttaaaagaattacaaaaaaggatttaa

SEQ ID NO: 419543 - DNA, 396 bp, Staphylococcus aureus
atggaacaaattaatcgcagtgttattgaaattattaaaatgttacaagcacatccagctgtgcaacaagtgttccatccaagtattgaaagtcatttaaatcatgatgtccatatggctcaagcggatggacatacaggtgtgattgcatttgaagtgaaagatacagaaagtgccaaacaattgattaaagcaacatcgtattacacattggctgaaagtttaggtgcagtggaaagtttaatttcagtacctgcactgatgacacatgcatctatttcagcagatattcgagctaaagaaggtattacagacggacttgtaagaatttctgtaggtattgaagatactgaagatttagtagatgatttaaaacaagcactagatacgttataa

SEQ ID NO: 419544 - DNA, 270 bp, Staphylococcus aureus
atggcaaaacgttccaaatcacaacgtttatcaagtttactaaatgtcgcaggtttcatagtcgacggctacaatggctataaatatcatactaaaaataaaaaattaatatatctttcattaggtttaagcactgtaggaaccgtgttagacttttacatttcaattaagtcaccacgtaagttcaaaaaagcagtggcagttgttactttaataacaaacggtgctagattatttacaagcattcgcaaagtaaagcatgaatactaa

SEQ ID NO: 419545 - DNA, 291 bp, Staphylococcus aureus
atgtgggttcgtgaaatcactaaaaacaaaagtacggcctatcgctatttagagcgctatacagaccctttaactggcaagtataaaacagtatcagttacacgtaacaagaataatgtacgtagccaaaaggacgctcaattagaattaaataaaataattgagcaacgtttgaaacataacagtacgaaacaacttgaaaacttaacgttccatgatgcgtgcgatgaatggttagaacattacaagacacattcaggctcaaaaccaaccactattaaagaaaagtaa

SEQ ID NO: 419546 - DNA, 219 bp, Staphylococcus aureus
atgttgaaagttgaaaatagagcgatgaatcgtgtacataataatatttataactttaatcataacgaaaaaggtaggaagaaaacaaaaatttatactcaacatcgcaaatattttaagaaaatgttaagacaaaagggaaattgtatagaaatcactaatctgtgggttaggatagctaaagaaatgaaaactgctattgaaaaggttgtaaattag

SEQ ID NO: 419547 - DNA, 273 bp, Staphylococcus aureus; identical to SEQ ID NO: 412956

SEQ ID NO: 419548 - DNA, 519 bp, Staphylococcus aureus
gtgaatgtttactttatagcttctactgctagtaaaatgataggcttgattactacaccaatgaataatgtcatactatcatatttaagtgttaagaataataaggataatttaaaaagatttatccaaattaatgtaggtattattatagcaagtattccgatgttttttatagttaagtactcttctttattagtagtatttatattatataatagttatatggaaaaagttctaatgataattaatttagtagttattatatgcattttacaaatttttaatagtatttttcatccgtttgcaatgaaaatgcttcactcaagaattattttctttattcaagtaggctacggaataatctatttagtattagcgtttgtaggtagttatattaatgggttacaaggattttgttgggcgagtattctagcaatgctaattaagttaatagcaacgaatctaatagtacttagaataactactttaaagaaaggaaaaaatacaagtggaacataa

SEQ ID NO: 419549 - DNA, 1230 bp, Staphylococcus aureus
gtggaacataataataaagttaaaaaaaataacccaataataaataatataatactaagtattctttttgtgctacttttaataggatcattaaatgcaaatggttcgcgtgtaggtatatttgctttagccatcgtaataggttttactaatgttttctattttctaagaataatctatagaagacacatcaaattttcggatttaattatattattattaacgattatatatataatcgtttctttaatatcatctcaaagtggactgggaaatagaggtcttacaaatacttttgaatttgtagcctgtataggtgtttatttatatttctctaatagtgattggaatgaaaaagcgattcttatgctctatagaataggtattgtctttgtttcatttcactttcttgtttgggtaggtaaaggatttggtagacagtttgctagtatttacccgaactcaaatatattgggaccatttatgtttttaactatttactttattttaatgagaatattcacgactagaaaaagattaataccctatatttttctgttcatttcatttttattattaattgccagtgatacaagatcagtattattatcaatggttataggagtgtttgtttatttaatatgggataaagttattaagtatcgaatagttagtattgcaacttttatagtgatagtaatagggtttgggtcaattgtatttttatatcccaaattacctagatggagtcattatggaaaattagaatcctggatgttagagcatactgggaaaagtattatgtcaggtcgtgctgatatttggggaagattaaataatttgatagatttacgtcctttattcggttttggaccaaatactgtggcaacagatgttatgggaagagatgcttcttcccataacctatatatcaatatggcacttcaaattggatatttaggccttttcatttttatattaatactctttattatttttatgaagtatgtatttagaggcaataataagttagtaagactttcagctgcggcatttatagctatattggcacaccaattatttgaaattactttagttcaaaatcaactatctataggactattccaatgggtggttatagctacaggtgctggaatgacttttaaacagtacgatattaaaaaagaaagtagggaagttagctatgaagataaaatcgcgagtatttaa

SEQ ID NO: 419550 - DNA, 300 bp, Staphylococcus aureus
atgaagataaaatcgcgagtatttaaaattattgctggattgctaattttctttttattattggttgttattattggtatttatttatttattaaaataaaggatttgaatgatagtgttaattctccattggaacgttctcattcagaattgagaaaaacccctgctaaagaaggggatccaatgacagtagtattgtatggtatagatagtgattctcaaagacaacaagaaaattcagttcaacgtagcgattctattgtcttaatgtctataaacccagaagaaaaaaaactgtaa

SEQ ID NO: 419551 - DNA, 639 bp, Staphylococcus aureus
atggtaagtataccgcgtgatacaagagcaaaaatagtctgtaaaaatacaactgaaaaaataaatcacgcatacgcatatggcgggcctgatatggctgtgaaatcattggaaaaattgatggatgtacctgtagatcattatgtttccattaatatggatggcgttaagactgttgtagatgaattaggtggtgtaactctaacaagtaatgcttcttttacaacaaaggatactgaaaatacctatcaatttaaaaaaggtaaagaatacaaaatgaatggtgaacaagctttagcttatatgcgtagtcgtaaagaagaaggcgcgggcggagatgaaggacgtcaacaacgtcaacaacaagtcatcactgtagttgctaaagaagccttgtctataaattcggttaccaagttaaatggcattttcaaagctgcacaaaataacttgaaaactgatttaagctttgttcagttaaatcgtttaaaatcagattatgataaggctcaagataatgtagaacgcctaacaattgatggtcaaaacgccttgggtaatgataatctatattatttctatccttatgaaaatagtttaaaagatattaaacagaaactaaaagattctttaaaatag

SEQ ID NO: 419552 - DNA, 243 bp, Staphylococcus aureus
atgaactatttcaggtataaacaattcgataatgatgtcataactgtagccgtaggctactacttaagatacgtattaagttattgtggtatatctgaaatattaagagaacgccgtttgaatgttcaccgttcaaccgtttatcgttgggctcaagaatatgcacctattttgtatcaaatttggaagaaaaaacataaaaagcgtattaatgaaacatatatcaaaatcaaaaggcaatag

SEQ ID NO: 419553 - DNA, 417 bp, Staphylococcus aureus
ttgttacaacaaatatcaagaagtagaattagaaaaaataaattacaggctaagcaaaaagaaaacgaagaaagtaattctcaaactactagtgaaacatctaataatgaaaatcaatcgaatcaaagtcaaaagaatagtcaagatcaagctacaacagaagaaaatacaaatgatgaacaacaagtgactagagataatgtgtttgattacgctattgctgctgtaaatgaaataggggatgctgatttattaaaatttcaagaaccggaatacaatgggtcagaatggacaattaatgcaaataataaatcaggtgctagagctaacaccatcgtagttaaagatgatggaacagttcaaatatggaatggacctaaaacatctatggacgatgaaactaaaattgaattataa

SEQ ID NO: 419554 - DNA, 528 bp, Staphylococcus aureus
gtgaagaaaatttttgcaagcttaggtgttattttattagttgcaatattgggagttgctgttgtatttgcatatgggagttacaaagatttagaactaaaaaaagaagaagctaaactagaggataagaagaataagaaaatcgataaaaacaaaactacagaaaatgaaaatcaagaccagattaataatcaaacaattacagcaccaaatgaaaaagcacaatatggcaataacctaggagttcaagaaaaaagtacggataaaaatgatcctaatggtgtgcttagatttgatacaaacggagatggatttatctccactagtgaagtaacaccagaagctcaaaaattagttgatgaaggtaaactacagccatcttcagatagaatggttgaagagtggactaagaataaaaataatgtagataatacatatgactatgatgaatcatataaaaaacaacaagaaatgtacaaaaaagctgctcgtggcgaagttcatgaacctggagaaacaataaaataa

SEQ ID NO: 419555 - DNA, 489 bp, Staphylococcus aureus
atggaatttgcatattatgaagcgaaatctttaaatgattttgaaaatgaactaaaaacacttgctttaaataaaaaatatacatttagtaaagaaaccgaagtccttaaagaagatgaaatccttgaaaaatcaagtagccatgagcgtgaactattaaaagtatttaaagataatgcgcagataacaacgtatcattttaagagtcataaaagtaattatttaattattatgggagaaacaaaagcgcctaatattattggattaacagtcatatttaacaaaaaaccttttaaacaattgggcaaaattgcattaggatggctaattgctttgacttcaggtggaagtatattagccattggagcagtatttggaatacttacctcagttgcaagacgtacacttgtaatcaaaggaccattaggaaaagaaatttcacaaattatagaaaatgaattaggagaaccgatagaaattaaaaaataa

SEQ ID NO: 419556 - DNA, 291 bp, Staphylococcus aureus
atgggcaacataataaaaacgatagataaaggtattgggaaaggtgtcggtgcagcagcatattattcagttgcgactgttggcgctgccatcggtgcgatttgggaaacaacaggcgatagaggtttgatgagagatgctttaagtgatagttctaataaagatttgatggaaatatatgagatacagaagaaagatgatggtgattatgatacttatattgcggctaaatccttattacaagagagaggattcacttataatcacgaaacgaataaatgggaaaaataa

SEQ ID NO: 419557 - DNA, 873 bp, Staphylococcus aureus
ttggatcgtgcatttcgaatacttacgatatacaatcgtttactacaaaataaatccgtcaacaagcaatcactcacattagaactcgatacaagtcctcggacgatacaaagagatatcgacgatataagaaacttcttatatgaaagtaaatcatggataagtacacctaaagaaatcacgtacgattataaatctgaaagttataagctcgaacaagataagaatgaaaatgtgcattttatgtataatattttgactgctttatacctgacgacacctaaattaagtcattacttttatcaatatcttaaattattaatcatcaaacatcattcaaatcatcgaactacattattaaaatatcttgagcgctttgaaattgataagaatcaaacaggtatttcgacatcatcattagttgttcaagcaatgaacgaaaataaatatcttcaatacaatcaaaaaatattattacctttatcgatgtactatcaaatgcatgcttttcacttggtatatcgaatgaacgatgaaatttatatcgatgatattaatcaaatgaatctgagtttctctgaaaaatctgtggacacacatgaaaaatcaaaggtacaaacctatatcacgtttgaaatttctaaagatgtgtggtcaaaaatgcatcgatattatcaaattcatgtgatagagaaatatgatgtacattatcttatcgtcacttttaagatgacaaggcccgaagcgattcaactctgttttatgtatcgatccaatatacgtatcatttcaccccctgatttgagagaacaagtgattgatgagttacttttattgcagtcaacatatttaaaacaacaggttcaagaataa

SEQ ID NO: 419558 - DNA, 447 bp, Staphylococcus aureus
gtgtatgattttttagaatatttacatcgttattgtgtaaaatcgattaataattgggaggctgttgcagatatatcatgcaaagttgtacgtgaaaaagttagtaaaggttattatgttaaacaagatagcgttgtaattgatgataatgatataccttcaattattaaaataagtggaaattatatagcagcagatatattagttactagatatttagatggaatgggtgaatttataaaggtatcagaattagatcagtcgagctattacgaatggtttatgtttgttgaagaaactagaagaatatttagaggtacagaaatagtttatcgatttttaaaatatctatttacgcatacctatgaacataaaaacgaagaacaaaaaatagaaaaatatatgaaaaatattatcatagataatcaatttagagggggggcatag

SEQ ID NO: 419559 - DNA, 249 bp, Staphylococcus aureus
ttgaaatctaatattcaaacaaattctattcatagtgaagacattgcaggtaatgaatcatatgtattagatgtaagtgatggccacttatctcaagcaagtcatgtatcacatggcaaacttttagaaacagatttacctttcaataaaaatgacgttatttatgtacactgcaagtctggcattagaagttctatagctattggtcttttagaacacgaaagttacaaagatatacagctttcttaa

SEQ ID NO: 419560 - DNA, 159 bp, Staphylococcus aureus
atgtggttcattagcattattattttaatagcattcctaattatattaatgattgacgatttaattaaaacagaacaacttcacgcaaaacaatatgaattggatgtaatagagaagggagtaccaagaaatactcagtttattgaggataattattag

SEQ ID NO: 419561 - DNA, 507 bp, Staphylococcus aureus
atgtcaattgaactttacaacataaatgaggaatacagagaaaagttttatcaaataccgaaagtattttttacaaatcctaaatatatcaagttatccaatgatgcaaaaatggcatggggaattcttagagatcgtttagatttatcaattaaaaatggttgggttgattctaaaacaggtaatatttatttttattacaaaaatgagaacctacaaactatattaaattgtaaaaaagataaagtgattaaaataaagaaagaacttattgaagtcgaattactactacaagaaagacaaggtttaaataagacaaataaactttatttagttaaactagaagtaacagaagatgatatttataaaattcaaaagcaagaaaacactgttgagagcagcaatggcaaggaagtcggaaaaaccgacttcttgaagtcgataaaacagaatctaatgataaagattataaagaaatattactacaagaatttcctgaacaattaa

SEQ ID NO: 419562 - DNA, 375 bp, Staphylococcus aureus
ttgaagaggtctttatttattttacaaattattcttggtattatttctggtattgtgggcgcaggcggtgcttttattattattcctatatttttagttttattcaaactatcaatgaatacagtcgttactaatagcataataattgcttttatctcttccattggtgcctttgttattaaacttgtacaaggatatattcctcttgaagacgcattatttttagtaatagggagtgttatcttcgctccattaggcttaaaattaggtaaaaaagtccctagttttgtacaaaagttgatcatcagtattttaatcattcttgcaattattcaaattgtttatatagttaaaacattctcatatagcaagtaa

SEQ ID NO: 419563 - DNA, 195 bp, Staphylococcus aureus
atggaaaataggataagagaattgagagttagagaaaatttaactcaagaaaatttagcagaaatattaaatgtttctagacaatctatttcatctatcgagagtaataaagtgaacccttctcttttaattgctatgagaattgcaaaggtattttcaaaaagtgtggaagacttgttcatttttaataaataa

SEQ ID NO: 419564 - DNA, 186 bp, Staphylococcus aureus
atgaaactaaatagtttagctttgctaagttctcttttggtcatcatatcaattagtttaataacctataatcaatcttcaaatcctaacatttatattattattgtcttaagtgttgttttaggtattatttctatctacttacttgctaatgttttaaaatcaaattcaaaaaaaggtaattaa

SEQ ID NO: 419565 - DNA, 126 bp, Staphylococcus aureus
atgctaaaatttaaagaggttcaaactaaagaacttaattctgacggtacagatttttgggtaggagtaggaattggatttagtggtgtaggagcagcagcagggctcgctgcagtattaacttaa

SEQ ID NO: 419566 - DNA, 1167 bp, Staphylococcus aureus
atggatataggtatctgtaaattaaatatccaagaggatgtcttttttaaagaaaggttttcagatcaggaaaaggaaatactaacacaaaatcaagagtttgatttaatacctgaagaaatagagtgggaaaatataactatttcagattttatagattttatagatttttcagattatgaaaaattttttattattagtaataactattcaaatagatttcttaatatcattaattatgtaaaagacaaaacaggggtagatattatattatataacaccctccacccaaaatctatatttaaaaaaataaaatttaaggataatttgaatatagcaaacttgtataacaattctaatttgtcaatgaatacaggtttttatccacaatttgatagtttacatattaagcatatcattaccgataatttaaattcaataaaagatttagatatcagcgtacatgaaaatttaggatttaattctctcattattgttgaagataacaaaaacgaactcggagatagaaatatacaactcttttctaaagttcttttaattgatgattataaatccaaagtaagagatatgaatttcaaaaaaataactatttcagaattgaaatctaagattttatattttatacaaacagggaatatcaaattccataaggggatatatacagatataggtcgatatttgaaaaacaaacaactatcaactttgtttatttataataacaacatttattatgataaatataaaaatatattgttatctgagaatacaaatacaaatgtatatcaacttattaattccttgaatcagcatcaaacaattaatgatatagatgacgacgttataagaatattctttttaatgcatacacttgttgaagcccacaaagaagatttatcatttgtcactcattttagttattataatttaccaccagtaaatacatctcaaaaaagtaatgactattctaattggataggattcaatcataaaagcaaatgttatatgtacaacatcttcaataacaaaaccttcgaagttaatgaaaaattccttgaattatttgaacaaatagtcaaaaaaaatgtcagatcagatgcagaaatagaattgataaaagaagtcgaggagttattatcgaatgtttaa

SEQ ID NO: 419567 - DNA, 729 bp, Staphylococcus aureus
atgtttaaatatgtaaataacatgattaaaaaaagagcgaataaagatactaaaattataaatttatattccaacagcaagttggtggctttttacaattctataactaatgaatcaacattttttaatgatattggattttatgaaaaacgaatcaataaagatcaaaaaattgttgaattagcttctggatcaggaagaatattaaaacagttgattgagaatggatatgatactatcggtattgagttagaaaaaatgatgatagagtctatggaagacaagtataaaagttttgttgtcaacaataatatattgaatgtaaaagaattaaatgccatctacaaagaaaccgatatattcatattacctgcaacaacgatttccctgtttagtatagaagaaatcattaaatttttagttgacttaaaaaaaataaacaaaaattttaaattaatttttgatttattgagtttagacaaaataattaacaaaaaacctaaaaaagtagttaatgaactcgggactttttattatataaactttatatcaggaggacaagttgtttacaatttatttgataaggacacaaatatagttggtgtaagtagaaaacaaaatcatagcttaaatgatatattagttcagctaaaagagttagaattcaatgtatattacactaaaatttcagaggactattatatgattgaagggagttataatgagtaa

SEQ ID NO: 419568 - DNA, 1230 bp, Staphylococcus aureus
atgagtaataaatatggatttttaaatggctttttgagaaatgatactttgcatgacattgaactatactctggatctggagataagttgattgataaaaacaataaaaaatatgtagatttaaatagtggtctatggaatgtttctcttggatataatcatgaattaaacgaaaatattaaaaaatctttttccgatattttggataataatttaccgtatatagatatgacatcgtatagtcataaattatatgatgaagtatcacaaaaattgatagactttatgaaaacaccagatttaaataaagttatctttaccaatagtgggtctgaatcgattgaagctgcgttgaaaattatgcatactattggaaataaaaattatattgcaagtttttctaactcctatcacggcaccttctatggcgatatgtcaataagtggtctaacaaaacctttaaatactaaaaaaaatgttgattataaaaacacaatactgtttgattttccagaaaatcattccgatgaaatagaattatttaagaatattgaaaaatacagcgaaaaaataaacgctctctttattgagccagtgataggatccggaggtatatatttcagaagtactgaattttacaacaaattaattaaattgtgtaatgatttggatatttttgttgtgtttgacgaagtagctactggtttctataaaacaggaaacagattttttataaataaacttgatgttgctccggatataatttgtttaagcaaagcaattaataatggaacattacctgctggtgccttaatattaaaagaatcgctgagtaattctttagaaaacacgacaataaagcatatgtccactcaaaatggaaatttattagtaatgagctcgatatatgaaactttaaactattatattaagtatgacaattctttacttaataacgtaaatttgattatgcagaaaaccaaagaaatatgtttggaaaataatgtaaatggacgcattattggttctatgatagctataccagtaaataaaaaagatattgaaccattggtaaaattgttgaaaatgagtggtattatagtttatagacatataacaaaaaatggatccggattaaccttatatccaaatattaatattgatataaaagtatatgaaaagactttgaaatatattatgaagaaagtaaataaatatgaatatagttaa

SEQ ID NO: 419569 - DNA, 927 bp, Staphylococcus aureus
atgaatatagttaaagaacttatcatcaataacaaagtaattgaatatactctagaacaaccaagaaatagtgaagaacaatatattatttataataattataacaatagaactattattgcaaatcgagaggtcatagattatttaaatgccaataattgcatagactctcaaagtccactatataattttattgaaggtagaaagaaaatcaatccattagagtttcatttaattaatattttagttaacacacaatatataaatagatttcaaaagtttgctaaaataacaacaaataactatatagtgatactttccatattaataactattcttgcaatatcaatgaaaattgacgatattgctcaatttaaaactgttgaaattcacaccttaccttatttaatagtaataatgtatttttcacaattctgtattgtagtcttacacgagatgtctcattattactactataataattactttaaccctaaatatattaagtttggtatcaccttaagatattttgttatgatattattcttcactagtgttccgtttattgatggaatgaataaacaagctaaaaaagttttaattaccgcagggattaaaacacaactaacattgcaaggcgtattatcaatatttctagtgttttctacggataatattatcttacttatttttcttttaaatatggggattataataataaatacattgccattctttaagttagatggttattggtacctaaactcaatattaaatattaaagattatatgcagtattatagaaaaatgattttattaaaagaaaaatttaattattttattttttttataggaagcacgaacatttttttaataattagtgtaataatttattcagtctttaatatttataaattatttacatag

SEQ ID NO: 419570 - DNA, 714 bp, Staphylococcus aureus
atgagcaatattttaatagtcggagcaaatggcaacattggatatgaatgtttaagacaacttgaaggaaatattaaaatagcaatagattatcaaagtcacaatcttaaatcttttaatgaccctaaaattttaaaatttatctttgatataaatgactcaactaaatataaaaaaatagtaagttacttaaaactcaacgatataaaattagataaaatagtttttgctcaaggtataaatcccatgaaaaatttttttaattctaactttgaagaatttgagaatacaattaatacaaattttatcagcgtttatacatgtttgaaaatactatatgaatttttaaatgattttgcatctatagtagttattgcttctcaaaatggtatagtaggacacgaagatagaatagactatggatgttctaaagctgcgttaattcatttagtaaaaaatctttcattagattttgctaaatactctgataaggatataaagataaatgctctatctccaacttatgtattaaacgaaaacaatgaaaactactttaaaagtatacaaggaaaaaaacttaaaaccaaaataccatttaataaaattttggatatacaagatgtagtaaatggtgttgagtttttattgtctgaaaaatcaaaatcaatgcgaggaaataatttgattttagattatggatatacaataaaataa

SEQ ID NO: 419571 - DNA, 897 bp, Staphylococcus aureus
atgctcaaattagaaaacgtttcaaaaaaattcaaatcaaacgtagtggtagataatattagttttgaattgctgtccggtaaaatgttagggtttttaggtagaaatggtgcaggtaaaacaactactttcagaatgattttaggattagtagaagcttcctctggtgaaatcacatataataatcaaaaaattgatcctactacttataactatattggttacttacctgaagagagagggctacatcctaaattaaaagtaaagaaagagctacaatacatggcgggattaaaaaatatgaataaaagtgaaattgattcttctattacttattggttaaaagagtttaaaatcgaaaaatataaaaataaaaaaatagaagaactttccaaaggtaatcaacaaaaaattcaattaatagctagtattattcataatccccaactacttattttggatgagcctttcagtggtttagatcctgtaaatgttgagttattaaaaaaagcaattaaacaattaaataattctggaacaatgataatttttagtacacatcgtatggaacatgttgaagaattgtgtgatgatatttgcataatgaaagatggtaaaatagaaatttttggtaacataaaagaaataaaaaagaaatatagtttcaaacaagtattaatagaaagcaatgaaaatttagattatttaatgaaaataaatggtgttataaaaaggacaattttaaaaaatggttctatttttagggtaaaagacaacaaaactgctaacaatttatttgaagaatcaaaaaaaataaaacaacttagtaagtttgaaatattagagccatctataaatgagatctttatcgagacggtaggtgatttggatgaataa

SEQ ID NO: 419572 - DNA, 1227 bp, Staphylococcus aureus
atgaataaatttttaaaaacttttttccttacctattttggtaaggtttcaagcaaatcatttatttatataactacaattttaatcatgttagtaattatagtttttaacgctaataagattatggatatatttaatcaaaaaaaagaaatagctatcgttgcagaaaataaatatctgattcattctattaagaataaagaaagcgaaattttaaataaggatgctaaaattaaatattatggtcaaaataaagctaatagtgaattaaataaaggtaatatagactatgtattgaatataaagttaacaaaagatggtaaagtcgaaggtgaattaactagtaaagatacacttacaaaaaaagtagaaaatgatgtaaaacaagtactaaattctttacaatttgaaaatactattaggaatttaaacctgacaacctcacaattaaaaaacttaggtgctaaaagtgaattagttatcaaaaataataaggaatttgaaaaaattaatcaaaaagaaaaagatttccaacttatatttactatgataaatttaacaataatgatatttattattatgaattatgttaatcaaatagctatggaagttgctattgaaaaaacatctagagttattgaaatgattataactagtataaaacccagtatacatattatagctaaaatattaggagtttttgcagtagcattaacccaaattttcatatttataataactattggaatttgtctccttgtttttgatgttcagaactttttagatcaacttaatttaaaagtttcattcgatagtataggtattattatattaaatattgtgttttggactataggagtaatatcttattctttaatagctgctattttaggatctttaacttcaagaatagaagaggtcggacaatcattaatgccgttaattttagtattattaggtagttactatatagtactttttagtgtgaacaacccaaataatttattggttacaattacaagttatgtaccattaatatctccatttacaatgttatttagattagctaataataatgttgataatatcagtgtagcaattagtatcgggatttctatcttatttttaatcattttcttctttgtagctggtcgaacttataagtattcagtactaacttatgataaaaatataataaaaaatatcaaaagagtaatatctaattga

SEQ ID NO: 419573 - DNA, 549 bp, Staphylococcus aureus
atggccaaaattggttatgcacgtgtatcaacacaagatcaaagtctcgatggacaaattgatacacttgaagaatatggttgcgaacgtatctttagcgaaaaagcgagtggtcgcaaaacgaaaagaacagaacttgataaatgtttagactatttacgtgaaggagatattcttgttatttataaactagatcgtcttggacgtacgacaaaacaattaatcgagttgtctcaatggttgggtgacaatagtattgatttacatattattgatatgaatatatcgactaaagatgcgatgggcaagatgttttacactatgatgagtgcattcgctgaacttgaagctaacttattaagtgaacgaacgaaaaaagggttagcttctgcgagggcaagaggtagattaggaggtagaccgtctttaccagaccataagaagcgtgaaattaaatttttatatgatgaacaaaaacttacaggtgaagaaattgcgaaagagactgatgtaagccgttttacagtctatagaatcgttaagcaataa

SEQ ID NO: 419574 - DNA, 351 bp, Staphylococcus aureus
ttgttaattgaatataataataaagcattttatacatcgaaagatttagccctgtctgtcattggtggaagatggaaaattgccattgtttaccatcttttgcatagtaatcgtttaaggttaagtgaattacaaaataaactacccgatatcaaccagcgaatgttaataaggcaacttagagaactagaacaagacaaaattctcgaaagaacggtttatccagtagtccctcctaaagtagattatagattgactgaaataggtttaaagcttgataaagtagtattttcaatttgtgattggggtgatgattttctagatacagttaaaattaataatcatagataa

SEQ ID NO: 419575 - DNA, 636 bp, Staphylococcus aureus
atgaaattacaattagctatcgatttattagaccaaaaagaagcagcaaaattagctcaagaagtagaggaattcattgatatcgtagaaattggaacaccaattgttattaatgaaggactatctgctgttgaacatatgagtaaatcagtcactaacacacaagtgttagcagatttaaaaattatggatgctgctagttatgaagtaagtcaagctataaaattcggtgctgatatcgtaacaattttgggtgtttctgaagatgcttcaattaaaagtgctatcgaagaagcgcacaacaatggcaaagaattattagttgatatgattgcggttcaaaatttagaacaacgtgcagctgaattagataaaatgggtgctgattatattgcagtacatactggttatgatttacaagctaaaggtgtatcacctttagaaagtttacgtactgttaaatcagttatttcaaattcaaaagtagctgtagcaggcggtatcaaacccgatacaattaaatcagtggtggttgaacaaccagatttaattattgttggtggtggcatcgcaaacgctgacgatccaaaagctgctgctaaaaaatgtcgtgatataattgatggaaatgcttaa

SEQ ID NO: 419576 - DNA, 519 bp, Staphylococcus aureus
atgactaaaaaagtagcaatcattttagcagatgaatttgaagatatagaattaactagtccaaaagaagcattagaaaatgctggatttgagactgaaattattggagatacagcaaaacaagagcttgttggtaaacatggtgagaaagtaactgtagatattagcatttcagatgccaagccagaaaattatgatgctttattaattcctggcggattttcacctgaccatttacgtggtgatgaagaaggacgttatggtacctttactaagtactttactcaaaatgatgtaccaacatttgcgatttgtcatggtccacttttactagttgatactgacgatttaaacggacgtacaataactggtgttatcaacgtacgtaaagatttatctaatgcaggagcacatgttgtcgatgaatcagttgtagtagataacaatattgtaacaagtcgtgtaccagatgacttagatgatttcaatagagagattattaaacaattagaagcataa

SEQ ID NO: 419577 - DNA, 132 bp, Staphylococcus aureus
ttgaagagaaaaaagagggcagaagtattagcggaagatgataaaccacctaaaaaaatagagaatggacatgatgataggaaagcagaatcacttaaaaaggggttttggagtcgtttgtttggtagctaa

SEQ ID NO: 419578 - DNA, 195 bp, Staphylococcus aureus
ttggagcgtaacgaagaacagattaaagaacatgaagcacgtgtaaaaaaacaaaaattagatgaaattttaaacgctatacctgatgataaaaaacacatagcacaaggtcttatcgttcaagctgcacgtatgagtattttattagatgatgcctggttggatattcaagagactctacttaccaaaaaataa

SEQ ID NO: 419579 - DNA, 273 bp, Staphylococcus aureus
atgttacataaccatcctggacagtcaggattttcattgaatgatttagcagtttttactattaataattctattaagactatgacaattgtaactaataaaggacgtattaaatttataagtaagacagaacattttaaagaaaaagtaatgaataaaatgatagcaaacttattaatagaaaaatctctagatgtaattagtacaaaagatattgaaaggttattaaaagagttatacaataacgataatataatatatagaaataggtga

SEQ ID NO: 419580 - DNA, 192 bp, Staphylococcus aureus
atgagtattaaacaaatgtgggaagaattattaaataaaaaatggaagttcgaagattttaggtttttgggtttaatgatttttttagctagtatttttactatgctcttattcggtattcctattggtatcgtagtttattttttacttttttataaagatgatgattttgatgagatagaagaaaaataa

SEQ ID NO: 419581 - DNA, 159 bp, Staphylococcus aureus
atgctgaaaactcctagagactactcatgcgatatttgtgatttaaagagagaaaatgattatgaaatcgataaaatttatgaagacgataaaactttgaaatctgaagatataagtcatatagacgtaaatttatacacaaaaaaggagggtaattaa

SEQ ID NO: 419582 - DNA, 774 bp, Staphylococcus aureus
atgaattactcaaaaataatagtacctttaattattatattactttgtatttttccattcgaattttcattcaaccgttttgttctagcagatgaatctagacctacaacagaacatctaaagaaaaaatccgagttagacttaacagcactatataatattaaaactgcatattcgcaaaacactagtttcttagatattaaagataaaacaaactccacgcaactattatcaaacgatttaatatttaatgatattaaaattaaagagtggaatacagatagtttaaaaactgagtttaataattccgaaatggccagtcatttcaaagggaaaagggtagatatattcggagtatactatggagcaaattgcattggagaagtaggtaaaagaacttcttgtttatatggtggagtaacacttcatgaagaaaataaactagatcaaaaacaatcaataggtgtgaatgttttcaaagatggtactcaacaaaaaagttttgttattactactgaaaaaaggaatcctacaattcaagagttagaccttaaaacgagaaacgttatgcaaaatcaatataaaatatataactcagagacaggtaacatacaaaaaggatatatagaattccattctgttaaatccagtttttattatgatttgtttgattttaaagggaaatattttgtagatttcttaaagttctacaatgataataaaactataagttcttcaaatttacatatagatgtttatttatatgctcaataa

SEQ ID NO: 419583 - DNA, 573 bp, Staphylococcus aureus
ttgaattttacaaaagatttagatcaaaaagaaaacaaattaagaattaatatcatacataaattttgtgaaaaccctaataaaaaaatagatgtaatacctcaatataaatctttaatagacaaaaaagttataactactgaaaataacaaaatcaaatgtatatatcctatatcttctgaaaaaacaaataaacttgtttatacaaacaaaagcaaagaacctttatttgcaatgtgtgcaatagacgctataggtatatattatacaacaggcttaaacatattaattttaagcgaagacgaattaactaaagaaaaaattaagctagaaataaaagatgataaaatagtcaatcacagtaaaagtgatatttacatttcatacaaaaatgtttgtgaaaaagaagattgtgacaaaaattgctgtccttacatacactttttcacaagtagaaataacgccgcaaactatttgaatagtttgccaaataaagaatatcataaaatactaaatcttaaacaagcaaaagaaatttcaaaacaattatttgaaattgacaatttgtcttaa

SEQ ID NO: 419584 - DNA, 156 bp, Staphylococcus aureus
atgactgagtttacacctttttttgatggttcaaatcaattaaattatcttaaatttgtaattttaagatttcatggtgtttctaaaagaaaaatttgtaaaatgtatcatatttcaattgaagacttagaattttttgaggtgatgaaccgatag

SEQ ID NO: 419585 - DNA, 183 bp, Staphylococcus aureus
atgaacagaaatcttttaaccattttattattgatagggtatacttatttaatatttaactttctaacaactgaatactccttggcgccaagaatattctatacattgaactttattagtttatccttaatattattagcaaaggctaaaagtaagaaattaaataaacacacacttccttga

SEQ ID NO: 419586 - DNA, 225 bp, Staphylococcus aureus
ttgattaaagagatgtttccgaacgctaaaatagttatcaatcgattccatattgttcaattattaaatcgcgctttaaatgtcattcgagtcactgttatgaatgaattaagaacgacgaatcaatctttatataataagtttaaaagatatgctaaattactattaaaacccggagaagatttagaggcctttgaatatgtaaatggcgattataaaatgtag

SEQ ID NO: 419587 - DNA, 336 bp, Staphylococcus aureus
gtgacagtaccagtaacagtaggagaacaaccagaaaatgagaatccaaaaatatcaaaacaacaaaaagttctagacccagataaacgtaatccagataatggagtggtcaaaggaactgataaatttgctagcgattctaaacatcatgttacacaggtggaaaaagcatcacaggtaagaaatgcttcagtgaagaaaaaatcaacagaacaaaaacgtggtcaattacctgaaacaggtgatgaaactaatgcaccattatttgctacattgtttggcgcattaggcgcaacgttattatttactaagcgtcgcaaaacagatgagcaataa

SEQ ID NO: 419588 - DNA, 1023 bp, Staphylococcus aureus
atgaattcaataaaaaaattaattgaagctgagttattaacaacgactaatgattttgaagttagtatatataaaaagacaaaatctgaattacaaagtattttaaaaagttttggtatgaaaacaataggtaataaacctgacttaattaaacgtattgacgataattatcatattattgataacttaaatttaccatatgtatatatgccaactaaaaaaggcgaagaagttttaaggagtacagagtatttaacctcttttatatacagttataaaatttcccccgagcgtgcttattatgtggttgaaaattatattgatgaaaattgcaatgataaaattgcagaaatatacaagtttgaatttcaaacaaaatatgataaaggagagttaaattttaattatggatataatttagaattgaatatgttgattgatcactataaaagagatgtaaaagactacgataatgccagaaagtattcaaatgtttatctttactttggtttgagagacttcttagaaaaattaatgagtgattattcatattacgatgataaagggaatctagatttggacaaaatacaagacgatctgaatagatttatcaactcttgcgtttttgatatgtacgagatattaatatataatgaaaatttatccaatattattatgtttgaattatttaaaaaagatacacaatattataatgatttagaagaacaattgattgaaaagttcatagattatgtagtgtcttatgttaaaaaagaaagtaggagtaatacgcttttagagatatcaaaaatattagaaaatggatatacaattgataaagaggaatttaaagaagatgaatataaatctaagcatataactactgacatagattatttgaaaaagttagaatcaaacataaatgttgctattgatagtcgaagtggagaaattcatttgatattagatgatgatagccttgatatattaataaaaaatcaaaaaaacgacaatgaggtttga

SEQ ID NO: 419589 - DNA, 549 bp, Staphylococcus aureus
atggctaaaattggttatgcacgtgtatcaacgaaagatcaaagtcttgacgggcaaattgatacgcttaaagaatttgggtgtgagcgtatctttagtgaaaaaataagtggtcgaaaggttaaacgtacagagcttgataagtgtttagattatttacgagagggagacacgttagttatctataaacttgataggttaggtagaacaacaaagcaactcattgaattatctcaatggttcgatgataacgggatcgacttacaaatcattgatatgaatatttcaacaaaagacgcaatgggcaaaatgtttttcacaatgatgagtgcattcgctgagcttgaggctaacctattaagtgagcgtacaaaaaaagggttagcttctgcgagggcaagaggtagattaggaggtagaccgtctttaccagaccataagaaacgagaaattaagttcttatacgatgaacaaaaattaactggagaagaaattgcgaaagagactggtgtaagccgttctacagtctatagaatcgttaagcaataa

SEQ ID NO: 419590 - DNA, 2214 bp, Staphylococcus aureus
atgaatgatactttacgtttaaaaggcacattaaattataaaaagaatagtaatcggcctggttctcctcaattacctaagaatggtgtagtaacaagtaaccatttaaaaaagttaaggtctcaattacagagattattgaatttctgggaaaaagaagacttatttgaaggagctttattaagtatatattataaaggggttattgctaaaagtaatagaattaaagcatatattaaacaaaagtcaagtagtcctaatgatacgatagtgggcgctaggtttcatgggaaaaagaagaagcatgttattacacacttagtatatttagatttaatacgtagcgatatagagaatttaaatatagttattcaaaatatagacgaaaattttagtggagaagtaacatatgatattattaatcaagttaataatgaagtaattgccttaaaaggaataaagaaaaataagtttagtcaatatgttgttgatagtttctatatagaaaaatttgatatattttacaactcggatttaaaagaagaagactcaattgttagtttatttgatttaaaacaaaatttaaaagatactttagaaaaattaggaatagatataggagagcatcgattttttgataatacaactgtcttaatgacaccaagcgagattaatatattaaaaaatagggcttcttatttaatatctatgtcagtgactgatatttcaaaatttgatagatttgaattagaaatggagcctggtgaaaatggtcatataaatattcctagaccaaacaatgaaccaataataggggttattgatacattatttgatgagagggtttacttttcagattgggtagaatatcatgatttagttagcgaagatatagataaacaagctagagattacgaacacggcacagctataacatcgatattagttgatggtccaacaattaatccagaacttcaagataattgtggaagatttaaagtacggcattttggtgtagcagtatctaaaagttttagttctttcaatattatgaaagccatttctgatatagttactagtaatcctgatataaaagtttggaatttatcacttggatcaaataaagagaagccggaaaacttcatctctccagaagcctctattttagataagattcaatatgataataacgtgatatttatagtatctggtactaataagccgttaagtgtaaaagggagcatgtcaattggagcacctgcagattcgataaattcaatagtagtaaattcagtggatattgaaaataacccagcaacatattcgagggaaggtattgtcctttcgttttacaacaaaccagatgtaagttgttttggcggagataaaagtaaattaatgagagtctgtatgccgaatggggaagctatagttaaaggcacatcttttgcagcaccatggattactagaaaagttgcatatttaatagaagtattaggtttttcaagagaggaagccaaagctttaattatagactctgctacaacttggaaagaaaataaatataaatcaaatttagtaggttacggggttgtgcctaaggatgtaaatgaaatagtaaaatcaagggatgatgaaattaaatttattatttctggagaatgtaaaatgtacgaaacatattcacatacaatacctgttccagtagttaatgatgaacatccatatttagcaaaagcaacattgtgttatttccctttttctgaacgaaatcaaggtgtagattatacaagtacagaattggattttaaatttggaagaattgataataaaaataatatcaaagctattgataaaaataaacaagatactgaaggtagttatttttatgaagatgaagcaagaaagaattttagaaaatgggataatgttaaacattatactgaagaattgaaatcgcgaagtagaggtcgtaagagctataataacggtatgtggtctttcaatattaaagttaaagaacgggttggcaaaaagtatggtgaaaatatcaaatttggtgtagttattcgtttgaaagaattggaaggtaaaaatagaattgaggattttatttataattgccaattaaaaggttggttagtagaacgtgtaaacgttgaaaatagaatagaaatttataatcaagctgaagaagaaattacttttgattaa

SEQ ID NO: 419591 - DNA, 435 bp, Staphylococcus aureus
atgacaagagaaagaagatcatttagttcagattttaaggtacaaatggttagattatatgaaaatggtaagcctaggaatgaaattatacgcgagtatgatttaacaccttcggcgttaagaaaatggataaagcatcatcaaaacacgggtacattcaatcaccaagataacttatcagatgaagaaaaagagctgattaaattacgtaaagaagttcaacatttaaaaaatggagaacgatattttaaagtaagcagcgctgatcatgggacgaaaatagaagtcattcaaaagaatgcacatcaatattcagtaccagcaatgtgtaaagtcctaaaaataccaagaagtacctattataattctataaaaagaaaagatacaaaaatcatcaaaaagaaactaatgaaaaacgaattaaaaatcatttga

SEQ ID NO: 419592 - DNA, 594 bp, Staphylococcus aureus
ttgctacgagcttttaaaggtaatgataatttaaatgaaaaattaaaacgttcaactattaatccaaatggaatagataagttatggattaattcctctatgatctcttctaaaaaactagataaagatagtgtgaaaattttatttgtaggtagaatctatagtaataaaaatttgcataatttattatctgctttagaagtttataaaaactgtgaattaacaattgtaggtaatatagtagatgataaatattttagcaatctcaataaaaaatataaattaaattatttaggtccaaaaagtaaagaagaattgatagaagtaatgaatgaacatgatatttttgcaatgccttcatttaatgaaacttttggtttagtttatattgaagcgcttagtcgaaatttacctatcctttatactaaaggagaaggaatatataactattttgatgaaaaaaaatacggtattgctgtagagccaggaagtataacagatataagaaaagggattagttttataattgataattatgatgaaaatattggaaaagtttatgaaaaactatacttaggtgagtataatgaataa

SEQ ID NO: 419593 - DNA, 2001 bp, Staphylococcus aureus
atgaagttaagattgttatggcacatagtgcgacgtcaatttattacgcagcgacttgtaatcattccattcattttagcggtaagtgtactattcatgattgaatatacgcttgtatcaattgggttaaatagctacataaaacagaagaatgacttcctagtaccatttattatcatagctaatttttttatggcgcttttaacttttatttttattttctatgcaaatcactttatgatgtcacaaagacgaaaagaatttagtatttttatgacattgggcatgaccaagaaaagtatgcgtttaattgtagtgatggaaactatcttacaatttatgataatttcagtcattagtattgccggcggatacttacttggtgcgatatttttcttgtttatacagaaaataatgggcagtgaagttgctacgttaaggtattatccatttgattctgtagcgatgtttattactttgattatcattgctgtattaatgggcatgctacttatattcaacttgttcagtattaattttcaacgaccgataacttatcaacatcgttccgattccagtgtcatatcacgatggttgcgttacgttttaattgttataggaagcgcagcactatatttaggctactttattgcattacaacaagatacgacgtttggtgctttttttaaaatatggattgtcataggattagttattatcggtacttatacattttttgtaggtataagtgaaataattattagtatattgcagcaggtatcaaaagtttactatcatccacggtatttttttgtggtagttgggatgcgtgtacgtcttaaaatgaatgcagtcagtcttgcaacaatcactttgctgtgtacatttttgattgtaacgctcacaatgacattaacaacctatcgcgatatgaatcataccattatgaaattgattaccaatgattatgatctgtcatttaacgacaattctaagacacaaatagaacgtcaacaaacgattgagcatattaaacgtgatatacagggtttggttaatgcaaaagactttaaagtatatgaaacgacattatttagagcttctttagaaaagaatcgtgcttattacaagttaaaacaggctagtgatgatattccaatagacttcattggtaatgaaggctcgatattttctaagcaatcagtaatgattacagcacttactgtgcaagattataatcgatatcaccaaaacaaattacacttagacaatcaaagtataggtatgattacgaatgtacctatttttaaaaagcagtctaaggtcggtcttaataatgaagtctttaaagtgaaacaacttgatgcacatgcgttaaatttgatgatgattcaagatagtatggttttaattgttaaagataaaaatcaattacaaaaagtaaaaggattttatgcacatgaacaaaagaattcgacaatatcgataaactttaatgtatctggaaagacgaaattaacaacatcacaaattcaaaagctttcgaaaaagtacgatgcatcaataaattctaaatcagaaatgctaatggtttgggatcgtctgacaggtggactaatatttgtaggtggcgtggtatcaattgtacttgtcattggaatatttctaatgatgtactataagcaagtttcagaagcctatgcaaatcagcacaattatgacattatgaaaaaacttggtttagataatgggagaatatcaaagataacacgaaatcaaatgactttcttgttcgcaataccaataacagtagcactgattcatacattaatttctagcaacattgtttatacgttactaaatatgatagggattaataaccatcatatatttttaacaagttacgtactagctgtcattataatttcgtttctatatatggcgatgtacaaaataacttcctacatttatgctaaagttattcatcaacaacgcaattaa

SEQ ID NO: 419594 - DNA, 756 bp, Staphylococcus aureus
atgttgctagaagtgaaacatgtaaaaaaggtttatggtaaaggtttgaatgctacgacagcacttaatcaaatgaatttatcagttggagctggtgaatttgttgcaattatgggtgagtctgggtcagggaagtctacactactaaatttaattgcttcttttgatggactaactgaaggtgacattattgtggatggcgcacatttaaataatatgaaaaataaaagtaaagcattgtatcgtcaacaaatggtaggttttgtttttcaagattttaatcttttaccaacaatgacgaataaagaaaatataatgatgccattaattttagctggtgctaaacgaaaagatatagaacaaagggtacatcagttgacagtacaattacatttagagggatttttaaacaaatatccttctgaaatctcagggggtcagaagcaacgcattgccattgcacgtgcattagttactaaaccgacgattttactagccgatgaacctacaggtgcactggattcaaaaacatcaaaggcattgatgatgttatttcaagagattcatcaattggaacagacaattttaatggtaactcattcaaatatcgatgcgtcttatgcagagcgtgtcatttttattaaagatgggcgtctatatcatgaaatatatcgtggtgaagaaagtcaattagcttttcaacaacgaataacagatagcttagcacttgtgaatggaggaagtgtcaatatatga

SEQ ID NO: 419595 - DNA, 201 bp, Staphylococcus aureus
atgatactagtaatgttatctccattattaatcatattctttatagtgttgtctattttagaagagcgtaaacgtacgaagaaaaagcaactcgagaaagaaaaagcaaatacactaaatcaaaatacaaatgacacgggaagttcaaatcaagagccgtcattgcagcaggctaaagaacaaaaagatgacaaaggataa

SEQ ID NO: 419596 - DNA, 1425 bp, Staphylococcus aureus
atgttatcagttaaaaaagccacaaaatttgcagttgctaaccttattatcgtgtcaacagtttttagctctgtcacacctgcaattgcgcaatccgataaaagttctaaagatgaaagtttcgcggttggtaatactaaaaatccaaaaaatgttatctttttagttggcgatggtatgggtccatcatttaacacagcttatcgttattataaaaatgatccgcatgctaaagaaatgacccctactgcttttgattcatatttaaaaggcacaaatcgtacatattcaaatgacccaaaacagaatattactgattctgcagctggcggaacagcctttagttctggtcataagacatataatggtgccatcggtgttgacagtaacaagcagaaagtaaagacggtgcttgaacgtgcaaaagaaaaagggaagtcgactggtcttgtttcaacagctgaattaacagatgcaacaccagcagcatatgctgcacacgtgacttctagagatgataaaaacgaaatcgctaaacaattttataaagataaaatcaacggaaagcataaagttgatgttttattaggcggtggcgctaaatatttcggtaaaagtaatggcaatttagataaaaaattcaaaaaagatggttacgaccttgccacgaacagtaaggagttatcaaaatctgataaagataaagttcttggtttgtttgcagataaaaatatgccactagcaatagatgcttctaaagacgaaccatcattagctgatatgcaacaaagtgcaattagtaagcttgagcgtaataaaaaaggtttctttttaatggtcgaaggtgcttctatagataaatcagcgcattccaacgatattacaggcgttatgtctgaaatggaaggttttgaaaaagcattcgatgacgccattcaatatgctaagaaacataaagatactcttgtcattgcaacagcagatcactctactggtggtctaacaattggtaaagataaaggatacgaatggaatcctcaaccgattaaatcgatgaaacactctggatcatatatgacagaaaaaatggctaaaggtgaagaccctgaaaaagttattaatgaaggctatggctttaaattttcacaagatgatatgaaaaaggttaaaaaagagaataaaaagctaaaaagactacttaaaaaagaaaaagacgaaaaatccgcagatgtagaaaaacaaacaaaagccttacaacacgcaattcagaagccagtaaatgataaatcttatacagggtggacttccgatggacatacaggcgaggatgttaatacctacgcttatggacctagatcagaatcatttagtggtaatatcgaaaatacagaaagcgcaaaaataatatttgatatattcaagtaa

SEQ ID NO: 419597 - DNA, 456 bp, Staphylococcus aureus; identical to SEQ ID NO: 415909

SEQ ID NO: 419598 - DNA, 762 bp, Staphylococcus aureus
atggcttatatttcattaaactatcattcaccaacaattggtatgcatcaaaatttgacagtcattttaccggaagatcaaagcttctttaataacgatacaactgctaaaccattaaaaactttaatgttgttacatggattatcaagtgatgaaacgacatatatgagatatacaagcatagaaaggtatgcgaatgaacacaaattagctgtgattatgcccaatgtggatcatagcgcgtatgctaacatggcatatggtcatagctattatgattatattttggaagtatatgattatgttcatcaaatatttccactttccaaaaagcgtgatgacaattttatagcaggtcactctatgggaggatatggcacaattaaatttgcattaacacaaggggataaatttgccaaagctgtaccattatctgctgtgtttgaagcgcaaaatttaatggatctagagtggaatgatttttcaaaagaggccataattggcaatctttcaagtgttaaaggaactgaacatgatccgtattacttgctagacaaagctgtagctgaagataaacaaattccaaaattgctcattatgtgtggtaaacaagactttttatatcaagacaatttagattttatcgattatttatcacgcaaaaatgttccttatcaatttgaagatgggccaggagatcatgattatgcatattgggaccaagcgattaagcgtgctataacatggatggtgaatgattaa

SEQ ID NO: 419599 - DNA, 2748 bp, Staphylococcus aureus
ttgaaaaaaagaattgattatttgtcgaataagcagaataagtattcgattagacgttttacagtaggtaccacatcagtaatagtaggggcaactatactatttgggataggcaatcatcaagcacaagcttcagaacaatcgaacgatacaacgcaatcttcgaaaaataatgcaagtgcagattccgaaaaaaacaatatgatagaaacacctcaattaaatacaacggctaatgatacatctgatattagtgcaaacacaaacagtgcgaatgtagatagcacagcaaaaccaatgtctacacaaacgagcaataccactacaacagagccagcttcaacaaatgaaacacctcaaccgacggcaattaaagatcaagcaactgctgcaaaaatgcaagatcaaactgttcctcaagaagcaaattctcaagtagataataaaacaacgaaagatgctaatagcatagcaacaaacagtgagcttaaaaatcctcaaacattagatttaccacaatcatcaccacaaacaatttccaatgcgcaaggaactagtaaaccaagtgttagaacgagagctgtacgtagtcttacagttgctgaacctgtagtaaatgctgctgatgctaaaggtacaaatgtaaatgataaagttacggcaagtaatctacagttgcaaaagactacatttgatcctaaccaaagtggtaacacatttatggcggcaaattttacagtgacagataaagtgaaatcaggggattattttacagcgaagttaccagatagtttaactggtaatggagatgtggattactctaactcgaataatacgatgccaattgcagatattaaaagtacgaatggcgatgttgtagctaaagcaacatatgatatcttgactaagacgtatacatttgtctttacagattatgtaaatgataaagaaaatattaacggacaattttcattaccattatttacagaccgagcaaaggcacctaaatcaggaacatatgatgcaaatattaatattgcggatgaaatgtttgataataaaattacttataactatagttcaccaattgcaggaattgataagccaaatggcgcgaacatttcttctcaaattattggtgtagatacagcttcaggccaaaacacatacaagcaaacggtctttgttaaccctaagcaacgagttttaggtaatacgtgggtgtatattaaaggttaccaagataaaatcgaagaaagtagcggtaaagtaagtgctacagatacaaaactgagaatttttgaagtgaatgatacatctaaattatcagatagctactatgcagacccaaatgactctaaccttaaagaagtaactggtgagtttaataatagaattttttatgaacatccaaacgtagcaagtattaattttggtgatataaataaaacgtatgtcgttttagttgaaggtcattatgataatactggtaaaaacttgaaaacacaggttattcaagaaaatattgacccagcgacaggtaaagactacagtattttcggttggaataatgagaatgttgtacgttatggaggcggaagtgctgatggtgattcagcagtaaatccagttgatccaacaccgggaccaccagttgacccagagccagaaccggaaccaacgccggatccagagccaagtccagagccagaaccggaaccaacgccggatccagaaccaagtccagagccagaaccggaaccaacgccagatccagaaccaagtccagacccagatccggattcggattcggacagtgactcaggctcagacagtgactcggattcagacagcgattcggactcagacagtgactcggattcagatagcgattcagaatcagacagtgactcagactcagagagtgactcagaatcagacagtgactcggactcagatagtgactcagattcagatagtgactcagactcagatagtgactcaaactcagacagtgagtcagattcggacagtgactcagattcagatagcgattcagacagtgactcagactcagacagcgattcggactcagatagcgactcagactcagacagtgactcaggttcagacagtgactcggattcagacagtgactcagactcagatagtgactcagacttagacagtgactcggactcagagagtgactcggattcagacagcgattcggattcagatagcgattcagaatcagacagtgactcagatttagatagcgactcggattcagacagcgactcagactcagatagtgactcagattcagaaaacgactcggactcagacagcgattcggattcagatagcgattcagaatcagacagtgactcagactcagatagtgactcagattcagacagcgattcagaatcagacagtgattcagattcagatagcgattcggattcagacagcgactcggactcagacagcgattcggactcagatagcgactccgattcaagagttacaccaccaaataatgaacagaaagcaccatcaaatcctaaaggtgaagtaaaccattctaataaggcatcaaaacaacaccaaactgatgctttaccagaaacaggagataagagcgaaaacacaaatgcaactttatttggtgcaatgatggcattattaggatcattactattgtttagaaaacgcaagcaagatcataaagaaaaagcgtaa

SEQ ID NO: 419600 - DNA, 705 bp, Staphylococcus aureus
atgacagaaaactttattttgggtagaaataataaattagaacatgaactaaaggcattagcagattacattaatatcccatatagtatattacaaccatatcaaagtgaatgttttgtcagacattatacaaaaggccaagttatttatttttcgccgcaagaaagtagcaatatttactttttaattgaaggtaacattattagagaacattacaatcaaaatggagatgtatatcgttattttaataaagagcaagtattatttccaatcagtaacttatttcatccgaaagaggttaacgaattgtgcacagcattaaccgattgtacagttcttggattgcctagagaattgatggcctttttgtgcaaagctaatgatgatatatttttgacactttttgcattaataaatgataatgagcagcaacacatgaactataacatggcattaacaagtaaatttgctaaagatcgaattatcaaattgttatgccatctatgtcagacagtaggatacgatcaagatgaattttatgaaatcaaacagtttttaactattcaactcatgagtgatatggctgggatttcccgggaaacagctggtcatattattcatgaacttaaagatgaaaaacttgttgttaaagatcataaaaattggttagtaagcaaacatttattcaatgatgtatgtgtttaa

SEQ ID NO: 419601 - DNA, 942 bp, Staphylococcus aureus
atgaaagagaaaattgtcattgcattaggcggtaatgcgatacagacaaaagaagcaacagctgaagcacaacaaacagctattagacgtgcgatgcaaaaccttaaacctttatttgattcaccagcgcgtattgtcatttcacatggtaatggcccacaaattggaagtttattaatccaacaagctaaatcgaacagtgacacaacgccggcaatgccattggatacttgtggtgcaatgtcacagggtatgataggctattggttggaaactgaaatcaatcgcattttaactgaaatgaatagtgatagaactgtaggcacaatcgttacacgtgtggaagtagataaagatgatccacgatttgataacccaactaaaccaattggtcctttttatacgaaagaagaagttgaagaattacaaaaagaacagccagactcagtctttaaagaagatgcaggacgtggttatagaaaagtagttgcgtcaccactacctcaatctatactagaacaccagttaattcgaactttagcagacggtaaaaatattgtcattgcatgcggtggtggcggtattccagttataaaaaaagaaaatacctatgaaggtgttgaagcggttatagataaagattttgctagtgagaaattagcaacgctgattgaagcagataccttaatgattcttacgaatgtagaaaatgtatttattaactttaatgaacctaatcaacaacaaatcgatgatattgatgtagcaacactgaaaaaatacgcggcacaaggtaagtttgcggaaggatcgatgttgccaaaaatagaagctgcgatacgatttgttgaaagtggggaaaacaaaaaagttatcattaccaatttagagcaggcatacgaagctttgattggtaataaaggtacacacattcacatgtag

SEQ ID NO: 419602 - DNA, 1431 bp, Staphylococcus aureus
atgaacgaatcaggagataacaaactcagtaaatcttctttaattggactagttataggatccatgattggtggcggtgcgttcaatataatgtctgatatgggcggtaaagccggtggattagccattattattggttggattattacagctataggaatgatttcattagcgttcgtatttcaaaatttaaccaatgaacggccggagctagacggtggtatttatagttatgctcaagcaggatttggcgattttgtaggctttatcagtgcttggggatattggttctcagcatttttaggcaatgttgcctatgcaacactattgatgtcagcagttggtaactttttcccgatttttaaaggaggcaacacattaccaagtattattgtcgcctcgttactactctggggtgtgcatttcctaattttaaaaggtgttgaaacagcagcctttatcaatagtattgttactgttgcaaagttaataccgattttacttgtaatcatatgcatgataattgcattcaattttgacacttttaaaacaggctttttcggtatgacgtcagagggtgtattgccatttagttgggcgagcacaatgagccaagttaaaagtacgatgctagtgacagtttgggtgtttatcggtatcgaaggtgcagtaattttttctagcagagctaaaaataaaaaagatgtaggtagtgccacggttataggacttatatcagttttaattatctatttcttattaactgtattagctcaaggcgtgattttgcaaaatcatatttctcaattagattcgccaagtatggcacaggtgcttgcatctattgtaggtggttggggatctacacttgtaaatattggtttaattatttcggtactaggtgcatggttaggatggacattgcttgctggtgaattacctttcattgttgcaaaagatggattatttccaaaatggtttgctaaagaaaataaaaatggagcacctgtaaatgcactgcttattaccaatatattagtacaattatttttaataagtatgctatttacacagagtgcgtatcaatttgcattttcactagcatcaagtgctattttatacccttacatgttcagtgcattttatcaagttaaatacacgttagagcaccgacagcaagcaactactaaacaatggacgattggtatcatagcctcaatttatgctatatggcttatatatgcagcaggtatcaattacttattattgacgatgttactttatattccagctcttcttgtttattcaatcgttcaaaagaataatcagacacgtttgattaaatcagactatattctttttatgattattatcgtacttgcagttatcgggttaattaagttattgatgggaacgataaatgttttttaa

SEQ ID NO: 419603 - DNA, 1011 bp, Staphylococcus aureus
atgacagaaattcaaaaaccgtatgatttaaaaggcagatcattattaaaagaaagtgattttaccaaagcagaattcgaaggacttattgattttgcaattacattaaaagagtataagaaaaacggtattaagcatcactacttatctggaaaaaatattgcactactattcgaaaagaattcgacgagaacgcgtgcagcgtttacagttgcgtctattgatttaggtgcgcatccagaatttttagggaaaaatgatattcaattaggcaaaaaagaatctgtagaggatactgcgaaagtattaggtagaatgttcgatggtattgaattccgtggtttttcacaacaagctgttgaagatttagcgaagttctctggtgtaccggtgtggaatggattaacagacgattggcatcctacacaaatgttagctgattttatgacaataaaagagaattttggatatctagaaggaataaatttaacttacgttggagatggacgtaataatattgcgcattcattaatggtagcaggtgctatgttaggtgttaatgtaagaatttgtacacctaaatcattaaatccaaaagaggcatatgttgatattgcaaaagaaaaagcgagtcaatatggtggttcagtcatgattacggataatattgcagaagcagttgaaaatacagatgctatatatacagatgtttgggtatcgatgggtgaagaaagtgaatttgaacaacgtattaatttattaaaagactatcaagtgaatcaacagatgtttgatttaacaggtaaagattcaacgatattcttacattgtttaccagcattccatgatacaaatacactttatggacaagaaatttatgaaaaatatggattagctgaaatggaagttacagaccaaatttttagaagtgaacattcaaaagtgtttgatcaagctgaaaatagaatgcatacaattaaagcagtaatggcagcaacattggggagttaa

SEQ ID NO: 419604 - DNA, 1236 bp, Staphylococcus aureus
atgacagatggtccaattaaagtaaatagcgaaattggagctttgaaaactgtgttacttaagcgtcctggaaaagaattagaaaatttagtacctgattatttagatggattactatttgatgatattccatatttagaagtagctcaaaaagagcatgaccattttgcacaggtgctaagagaagagggtgttgaagtactttaccttgagaagttagcagctgaaagtattgaaaatcctcaagtaagaagtgaatttattgatgatgtattagcagagtctaaaaaaacaatattaggtcatgaagaagaaattaaggcattatttgcgacactttctaatcaagaacttgtagataaaataatgtcaggagtacgtaaggaagaaattaatccgaaatgtacacatctagtagagtatatggatgataagtatccattctatttagatccaatgccaaacctttattttactagagatccacaagcctcaataggacacggtataacaatcaatcggatgttctggagagcacgacgacgagaatcaatatttattcaatatattgtaaagcatcatcctagatttaaagatgcgaatattccaatctggttagatcgagattgcccattcaatattgaaggcggcgatgaacttgttttatctaaagaagtcttggctataggcgtttcagaacgtacatctgcacaagctattgaaaagttagcgcgacgtatttttgaaaatccgcaggcgacgtttaaaaaagtagtagcaattgaaattccaactagtcgaacatttatgcacttagatacagtatttacaatgatagactatgacaaatttacaatgcattcagccattttaaaggcagaaggcaatatgaatatatttattattgaatatgatgatgtaaataaagatattgccatcaaacaatctagtcatttaaaagatactttagaagacgttctaggtatagatgatatccaattcattccaacaggaaatggtgatgtcattgatggtgctagagagcaatggaatgatggctcaaatacattatgtataagaccaggtgttgtagtgacttacgatagaaactatgtatcgaatgatttattgagacaaaaaggtataaaagtcattgaaatatctggtagcgagttggtacgtggacgtgggggtcctagatgtatgagtcaaccactattcagagaagacatttaa

SEQ ID NO: 419605 - DNA, 450 bp, Staphylococcus aureus
atgaagaaaagtaaacgattagaaattgtttctacaatagttaaaaagcataagatttataaaaaagaacaaatcatttcatatattgaagaatattttggtgtaagatatagtgcaacaacaattgctaaagacttgaaagaacttaatatatatcgtgtccctatcgattgtgagacatggatttataaagctattaataatcaaacagaacaagagatgagagaaaagtttaaacattattgtgaacatgaagtacttagctcgattatcaatggcgcatatattatagtcaaaacctcaccaggtttcgctcaagacattaactactttatcgatcaattaaatattgaagaaatattaggtacggtgagcggaaatgatactacattaattttaacagcttcgaatgaaatggcagaatatgtatatgcaaagttatttagatag

SEQ ID NO: 419606 - DNA, 1530 bp, Staphylococcus aureus
gtgaggaaattttcaagatatgcatttacaagtattgcaacagtaacgttgctgagctctttgacacctgcagcactagcgagtgatacgaatcacaaaccagcaacttcagatattaattttgaaatcacacaaaagagtgatgcagttaaagcattaaaagagttacctaaatctgaaaatgtaaaaaatcattatcaagattactctgttacagatgtaaaaacagataagaaaggattcacgcattacacgttacaaccgagtgtggatggtgtgcatgcgcctgacaaagaagtgaaagtgcatgcggacaaatcgggtaaagtcgttttaatcaacggtgatactgacgcaaagaaagtaaagccgacaaataaagtgacattaagcaaggatgaagcggctgacaaagcatttaacgcagttaagattgataaaaataaagctaaaaacctccaagatgacgttatcaaagaaaataaagtcgaaatcgatggtgacagtaataaatacatttacaatattgaattaattacagtaacaccagaaatttcacattggaaagttaaaattgatgccgacacaggagcagttgttgaaaaaacgaacttagttaaagaagcagcagcaactggcacaggtaaaggtgtgcttggagatacaaaagatatcaatatcaatagtattgatggtggatttagtttagaggatttgacgcatcaaggtaaattatcagcatacacttttaacgatcaaacaggtcaagcgacattaattactaatgaagatgaaaacttcgtcaaagatgatcaacgtgctggtgtagatgcgaattattatgctaaacaaacatatgattactacaaaaatacatttggtcgtgagtcttacgataaccatggtagtccaatagtctcattaacacatgtaaatcattatggtggacaagataacagaaataacgctgcatggattggagacaaaatgatttatggtgatggcgatggccgcacgtttacaaatttatcaggtgcaaatgacgtagtagcacatgagttaacacatggcgtgacacaagaaacggcgaatttagagtataaagatcaatctggtgcgttaaatgaaagcttttcagatgtttttggatactttgtagatgatgaggatttcttgatgggtgaagatgtttacacaccaggaaaagagggagatgctttacgaagcatgtcaaacccagaacaatttggtcaaccatctcatatgaaagactatgtatacactgaaaaagataacggtggtgtgcatacgaattctggcattccaaataaagcagcttataacgtaattcaagcaatagggaaatctaaatcagaacaaatttactaccgagcattaacggaatacttaacaagtaactcaaacttcaaagattgtaaagatgcattataccaagcggctaaagatttatatgacgagcaaacagctgaacaggtgtatgaagcatggaatgaagtaggcgtggagtaa

SEQ ID NO: 419607 - DNA, 528 bp, Staphylococcus aureus
atgaatcaaacaactaaactttgtgcagcaacgacattagcattaggtactttaattggcgcaacagttgtagggactgcatcaccaatacatcaagaagcacaggcggcaacaacaccttactatacttatcatggatatatcggtcataacgctaattttataatggataagcattttattaacgctattaaatatgacaacgtgacatttaatggcattaaattagcgaagacaaatgcgacaaaaaaagtagagaaatacgatcaaacttttaaaggtgtaactgcaaaaggaaatgaagcgaatcaattacaatttatcgttaaaaataatatatcactaaaagatattcaaaaagcttatggtaaagatttgaaaaaagagaataataaaacgaaagaatctgatagcggtattttttattatcaacattctaaaaagtcattaggcatttggtttgttgttgatcataatagagtggttgaagttacagtaggacatacgccatacaaaacgagtaaataa

SEQ ID NO: 419608 - DNA, 444 bp, Staphylococcus aureus; identical to SEQ ID NO: 408600

SEQ ID NO: 419609 - DNA, 1875 bp, Staphylococcus aureus
atgcttgatagacacttaaaactactccagttttttattaaaaacccatcaaagcacattagttctaatgaaattgctgaacatgtcaatgtttcaaaccgcacagttcgcaatgatatccatgttatcaatagtaattttatggatgatatcatcgtaagtattaaatctaaaggatatcaattaaatacatcgcagtataccttagaaacgataactgaacgttacacgcatattcaatcatataaagaaaaactattattatctatggcgtatcaactgttaatgcacaataaatcgcagacattgcaacaactagagcaagattatctattatctaaaactgtgctcaacgactatttcgttcgaattcaacaatggtgtcaaaaatttaatattgctttaacaatcaagaaaaaacaaggcattattgtcgacggaactgataatgatataacaaatgccattattcatttaaatcaattatcaaccggacacgttaacgttgaagatcttattttaaatgaattacccgatgcccaccgacggatgatgtcgcatattatacaagagacacttcaacaacatagtattgaaacaactgatattcaaatacaacagcttttaattcatctcattttaatcattaaacgtaagcaatctttaagtgagctagacacgttaaaccacgatgcaaaattgatatctcaatcttgcattcagcaaatcaatacaagattaggttatgatttaaacgaaaaagtaatcaatatgttttcattctttattgcttatcattttaacaaactcgatattggcatagaacgtatatttatacaaagttatattgatcgcttaatcgaattgatgcagcaacgtattcatgtacctttcaatgaagattcgattttacaacaaaatttatataatcattttagtaaagcatatttacgtatcactcaaaacatttatttaaacaatcctttagttatagagattaaaaaactttatccctttgtgttcaacacactttttgaagcgattgataaattagcaattgatactgatatagagatgagcgaagatgaaattgcctttttaacaattcattttcaagctgccatcgagcgtcgtaccaaaacacaattaaatgtagtcattgcttgttattatggtctaggtgtgtcgaattttttagaaactaaaataaacaacttatccgaagagttgtcagtgataaatacgattaaactagaaaatataacacactatcactttgataatgtagatttattaataacgactcatgatattccaaaacaaacgctaaacatacttcctaagcacctaacgactatcaaggtttcaccattattttctgaagatgaccgccacaaaatcagacacgttgtgaagcaaaagcaaaatccggttcaagcacatcatcatatggacactgtcaatttccttgtcgtaaatactgaacaaaaaccacgacatactgtgcaaatttttgaagaagctcaaaaaatattacaagcacatcatgcgattgtagaaggatatatcgaatcagctttagagcgtgagaaatcatcttctacatatataggtaattttatggcgattcctcatggagatcctgaaaaagttttacaatcacatgtgcttatttttcgcacaaaagatgtttttccttggcgacaacacgatgtcaaacttgtctttttcttagcgatttcacataaagacaaagcttttacaaaacaaatgatgcaattaattgctaacttggatgatgattcagtgaatcatttatgtagtttagatgatcatagtttaaagcaacagttatttgaatacttacaagaataa

SEQ ID NO: 419610 - DNA, 939 bp, Staphylococcus aureus
atggcattatttttacaacccgtttttaaagacagaatttggggcggtcatgcattaaaagcatttaactatgatatccctaatgaaacaactggtgaatgctgggcaatttctgcacatccaaatggccctaatacaattatcaatggtccatacaaggatatgaccctagatcaactttggtcacaacatcgtgaattattcgataatgattcacgagatagtttccctctgctaactaaagtattagatgccaatgataaattatctgttcaagttcatccggatgattattacgctttaaaacacgaaggcgaactaggtaaaacagaatgttggtatattttagatgcagccccaggtgctgaaattatatatggcgtacatgcacataataaacagacgttaatcgacatgattgataatcatgaatttgacagtcttttcaaacgtatacctgttaagcccggtgacttttattatgttcctgctggcactgtccatgccattggttcgggtattttaattttagagacacaacaatcgtccgatacgacataccgtatttatgactatgatagacgagatcaaaatggtcaattgcgtgatttgcacttagagcaaagtaaagatgtgattgaattaggcaatcatgaaccaaatactactcctataacaactcacatcgacacacacactgtaactcaatttgtagacaatcaatattttgcagtatataaatgggatattcatggagatttaaaattcaataaaccacatgcttattgcttagttacaattatcgatggtactggtactttagcagtaaacgataagcactatgacatccaaaaaggttctagctttattttaactacggaagacgaggatattcactttgtcggtaatattagtgctatagtaagtcatcctggataa

SEQ ID NO: 419611 - DNA, 2982 bp, Staphylococcus aureus
atgaagaacgcatttaaattatttaaaatggatctgaagaaagtagctaagacgccagctgtgtggattatcttagcaggcttagctattttgccatcgttctacgcttggtttaacttatgggcaatgtgggatccatatggcaacacgggacacatcaaggtcgcagtcgttaatgaagataaaggcgacacaatcagagggaaaaaagttaatgtcggtaatacgatggttaatacactcaagaaaaataaaagttttgattggcagtttgtaagtagagagaaagctgatcatgagataaaaatgggtaaatattttgcaggtatttacatcccatctaagtttacacatgaaattaccgggacactacgtaagcagcctcaaaaagcagatgtagaatttaaggtgaatcagaagattaacgctgttgcgtctaagctaacagatactggttcgtcagttgtcgtcgaaaaagcgaatgaacaatttaataaaacagtaactcgagcattattagaagaagctaacaaagcaggtttaactattgaagaaaatgtgccgacaattaataagataaaaaatgcggtatattcagcagataaagctttacctaagattaatgactttgcgaataaaattgtatatttgaataaccaccaagcggatttagataaatatgcgaatgattttagaaaactaggaaattataaaggtgatattttagatgctcagaaaaaattaaacgaagtcaatggtgctattccgcaacttaatgaaaaggctaagttgatcttagctttaaataattatatgccgaaaattgaaaaagcgttaaattttgcagctgatgacgtgccagcgcagttccctaaaattaatcaaggacttaacattgcgagtcaaggtattgatcaagctaatggacagttaaatgatgccaaaggcttcgtcacacaagttagaagtagagtcggtgattatcaagatgcaattcgacgcgcgcaagatttaaatcgaagaaaccagcaacagattcctcaaaatagcgcggcgaacaacgaaacatcaaatagtgcacctgtagctggtaatggtgtagcatcaacgccaccaagtgcaccaaatggcaatactgcaccaaataataatgttacgcaaaataccgcaccaaatagtaataatgcgcctgtatcgactacaccacaaagtacaagcgggaaaaaagatggacaaagttttgcggatataacaacaacacaagtcagcacagcaaacgagaacacacaaaacattacagataaagatgttaaatcaatggaagcggcattaacgggctctttattatcattatcaaataatttagatacccaagcgaaagccgcacaaaaagatagtcaggcattacgtaatatttcgtatggcattttagcatcggacaagccttctgattttagagagtctttagataatgttaagtccggtttagaatacacaactcaatacaatcaacaatttatcgatacattaaaagagattgagaagaatgaaaatgttgatttatcaaaagaaattgataaggtaaaggcagctaataatcgaattaatgaatcattaaggttagttaatcaattaagcaatgcattaaagaatggtagttcaggaactgctgaagctactaaattactagatcaactgtcaaaactagattcatcattatcatcatttagagattatgttaaaaaagatcttaacagctctttagtatcaatatcacaacgtattatggatgaattgaataaagggcaaacggcattgtctaatgttcagtctaagctaaatacaattgatcaagtcatcaacagtggtcaatctattttaaaaaatggtaaaacacgtatcgatcgtttacaaacagtattaccaagtattgaacaacaatacattagtgctgttaaaaatgctcaagcaaacttccctaaagtgaaaagtgatgtagcgaaagcagctaactttgtacgtaacgatttaccacagttggagcaacgtttaaccaatgcgactgcaagtgtaaataaaaatttaccaacgttattaaatggttatgatcaagcggtaggattactaaataaaaatcagccacaagcgaaaaaggctttatcagatttagctgatttttctcaaaataaattgccagatgttgaaaaagatctgaaaaaagcgaataagattttcaagaagttagacaaagacgatgcagtcgataaattaatcgacacacttaagaatgatttgaaaaagcaagcgggtattattgcaaatcctattaataagaagactgttgatgttttcccagttaaggattatggatcagggatgacaccattctatactgcattatcggtatgggtaggcgcactcttaatggtaagcctattaactgttgataataaacataagagcttagagccagtgttaacgacaagacaagttttcttaggtaaggcaggattctttataatgcttggtatgttgcaagcactcattgtatcggttggagatttgttaatcctaaaagcaggagttgagtcacctgtattattcgtacttataacgattttctgttcgattattttcaactcaatcgtatatacgtgcgtatcattacttggtaacccaggtaaagccattgcaatcgtattgcttgtattacaaattgcaggtggtggaggaacattcccaattcaaactacgccacaatttttccaaaacatttcaccatacttaccatttacgtatgccattgattcattacgtgaaacagtaggcggtattgttccggaaatcttaattacaaaattaattatattaacgttatttggcataggattcttcgttgtaggtttaattttaaaacctgtaacagatccattgatgaagcgcgtatctgaaaaagttgaccaaagtaacgttacagaataa

SEQ ID NO: 419612 - DNA, 1860 bp, Staphylococcus aureus
atgcctaaaaataaaattttaatttatttgctatcaactacgctcgtattacctactttagtttcacctaccgcttatgctgacacacctcaaaaagatactacagctaagacaacatctcatgattccaaaaaatctactgatgatgaaacttctaaggatactacaagtaaagatactgataaagcagacaacaataatactagtaaccaagacaataacgacaaaaaagttaaaactatagacgacagcacttcagactctaacaatatcattgattttatttataagaatttaccacaaaccaatataaaccaattgctaaccaaaaataaatacgatgataattactcattaacaactttaatccaaaacttattcaatttaaattcggatatttctgattacgaacaacctcgtaatggtgaaaagtcaacaaatgattcgaataaaaacagtgataatagcatcaaaaatgatacggatacgcaatcatctaaacaagataaagcagacaatcaaaaagcacctaaatcaaacaatacaaaaccaagtacatctaataagcaatcaaattcgccaaagccaacacaaccaaatcaatcaaatagtcaaccagcaagtgacgataaagcaaatcaaaaatcttcatcgaaagataatcaatcaatgtcagattcggctttagactctattttggatcaatacagtgaagatgcaaagaaaacacaaaaagattacgcatctcaatctaaaaaagacaaaaatgaaaaatctaatacaaagaatccacagttaccaacacaagatgaattgaaacataaatctaaacctgctcaatcattcaataacgatgttaatcaaaaggatacacgtgcaacatcattattcgaaacagatcctagtatatctaacaatgatgatagtggacaatttaacgttgttgactcaaaagatacacgtcaatttgtcaaatcaattgctaaagatgcacatcgcattggtcaagataacgatatttatgcgtctgtcatgattgcccaagcaatcttagaatctgactcaggtcgtagtgctttagctaagtcaccaaaccacaatttattcggtatcaaaggtgcttttaaagggaattctgttccttttaacacattagaagctgatggtaatcaattgtatagtattaatgctggattccgaaaatatccaagcacgaaagaatcactaaaagattactctgaccttattaaaaatggtattgatggcaatcgaacaatttataaaccaacatggaaatcggaagccgattcttataaagatgcaacatcacacttatctaaaacatatgctacagatccaaactatgctaagaaattaaacagtattattaaacactatcaattaactcagtttgacgatgaacgcatgccagatttagataaatatgaacgttctatcaaggattatgatgattcatcagatgaattcaaacctttccgtgaggtatctgatagtatgccatatccacatggccaatgtacttggtacgtatataaccgtatgaaacaatttggtacatctatctcaggtgatttaggtgatgcacataattggaataatcgagctcaataccgtgattatcaagtaagtcatacaccaaaacgtcatgctgctgttgtatttgaggctggacaatttggtgcagatcaacattacggtcatgtagcatttgttgaaaaagttaacagtgatggttctatcgttatttcagaatccaatgttaaaggattaggtatcatttctcatagaactatcaacgcatctgccgctgaagaattatcatatattacaggtaaataa

SEQ ID NO: 419613 - DNA, 561 bp, Staphylococcus aureus
atgtctcgaaaaacggcgctattagttttggatatgcaagaaggtatagcgagtagtgtacctagaataaagaatattattaaagcgaatcagagagcaattgaagcagcaagacaacatcgaataccagtcattttcatacgtttagtgttagataagcattttaatgatgtctcctcgagtaataaagtgttttcaacaattaaagctcaaggatatgcgattactgaagcagatgcatctacacgaatacttgaagacttagcacgactagaagatgagccgattatttctaagcgacgctttagcgcatttacaggtagttacttggaagtttatttacgtgcaaatgatattaatcatttagtattaacgggtgtctctacaagtggagctgtattgagcacggcattagaaagtgtagataaagactattatattactgttttagaagatgctgttggtgatagatcagatgataaacatgactttattattgaacaaattttatcacgctcatgtgacattgaatccgtagagtcatggaaaagtagtttatag

SEQ ID NO: 419614 - DNA, 411 bp, Staphylococcus aureus
ttgaatgataaagcggatgatttattgaatttacaaaagagactcaatcaaacgaaaaaagatatagactatgttttatcaccaatagtaaatcgtccaagtttactagatcgattgaataaaaatgggaaaacgacagatttaaataagttagcaaatttaatgaatcaaggatcaaatttattagacagtattccagatatacctacaccaaagccagaaaagacgttaacacttggtaaaggtaatggattgttaagcggattattaaatgctgatggtaatgtatctttgcctaaagcgggggaagcgataaaagaacattggttgccgatatctgtaattgttggtgcaatgggtgtactaatgatttggttatcacgacgcaataagttgaaaaataaagcataa

SEQ ID NO: 419615 - DNA, 1479 bp, Staphylococcus aureus
  misc_feature (1459)..(1468): n is a, c, g, or t
atggctaaatatcgagggaaaccgtttcaattatatgtaaagttatcgtgttcgacaatgatggcgactagtatcattttaacgaatatcttgccgtacgatgcccaagctgcatctgaaaatgatactgaaatttcaaaagagatattatctaagcaagatttattagacaaagttgacaaagcaaatcgtcaaattgagcaattaaaacagttatcggcttcatctaaagcacattataaagcacaactaaatgaagcgaaaacagcatcgcaaatagatgaaatcattaaacgagctaatgagttggatagcaaagacaataaaggctctcaaattgaaatgaacggtcaaagtgatatagacagtaaattagatcaattgcttaaagatttaaatgaggtttcttcaaaggttgataggggtcaacaaagtggcgaggacgatcttaatgcaatgaaaaatgatatgtcacaaacggctacaacaaaacatggagaaaaagatgataaaaatgatgaagcaatggtagataaggcgttagaagacttagaccatttgaatcagcaaatacgcaaatcgaaagatgcatcgaaagatccagtagtgtctacaacagataataatcatgaagtagctaaaacgccaaataatgatggttctggacatgttgtgttaaataaatttctttcaaatgaagagaatcaaagccatagtaatcgactcactgataaattacaaggaagcgataaaattaatcatgctatgattgaaaaattggctaaaagtaatgcctcaacgcaacattacacatatcataaactgaatacgttacaatctttagatcaacgtattgcaaatacgcaacttcctaaaaatcaaaaatcagacttaatgagcgaagtaaataagacgaaagagcgtataaaaagtcaacgaaatattattttggaagaacttgcacgtactgatgataaaaagtatgctacacaacgcattttagaaagtatatttaacaaagacgaggcagataaaattctaaaagatatacgtgttgatggtaaaacagatcaacaaattgcagatcaaattactcgtcatattgatcaactatctctgacaacgagtgatgatttattaacgtcattgattgatcaatcacaagataagtcgttgttgatttctcaaattttacaaacgaaattaggaaaagctgaagcagataaattggctaaagattggacgaataaaggattatcaaatcgccaaatcgttgaccaattgaagaaacattttgcatcaactggcgacacgtcttcagatgatatattaaaagcaattttgaataatgccaaagataaaaaacaagcaattgaaacgattttagcaacacgtatagaaagacaaaaggcaaaattactggcagatttaattactaaaatagaaacagatcaaaatnnnnnnnnnnatcggcattga

SEQ ID NO: 419616 - DNA, 1359 bp, Staphylococcus aureus
atgattaaattatttgattactttaacggtcattcacgaaagttatatgagtcttttaaagccagtaagttggaggaagatttaacaattgtactcaatgacaatggttttttaccggacgatgttatatcaccgtatcaattttttgcagataatcataatacagaaaatatgaaaccacgattttttaatcaggttactgtaccagctttttgggaaattaaaggtaacaacaattcggctacaattaatgatatgggacgtctacgaggcaaaatattttatcaaagtggagagcgccctagaattgttagtcgtgtcgaatggtttgatgaccaacaacgtgtccgatttgtcgattattattctaagaatggtattaaatttgcacaaactgtttacgatttaaatcgtaaagcgatcttgaagaaatatatgacagcagaaggtaaagaagtgatttatgaaaattttgtaacatctgatgtcatattggattggcaaggaaagtcttactttttcccttcaaagctcgcattcgtattattttttatcaagcaacttgaaattacggaacatcatttcgttattaactcactagccctaccattttcagtgttatataatttgccatcaaatggtagtgatgttttggtatggcaagaacagtgcgatggtaatgtcccgggaaatatgcaattgatgtgtaaaggtgatatgaaacgacattgtaatattattattccagataaaaacgaatatgaaacgatgctcaatatagcagacgcaaaggttaaatctcgtattttacaaggcggatatctatataattatcgtagtcgtaatagatatactaaagaaattgtaatattaactaactcggatcaacttcgtaacatcaaggtattggttgaaactttaccagattttaagtttcacatcgctgctattacagagatgtctgataagctaatgcaacttgatcaatatgctaatgtgcacttatacccatctattaatatagacagggtaaatgaactataccagttatgtgatatttatcttgatattaatgagggtaatgaaattttaaatgcggtggaacaagcgtttgactatgagttgttgattttaggttatcgtcaaacagcacaccatgctaaagtaacactatcagagcacttatttgagcataatgatgagataacaatggaaagtaaagaccaattaatacaaatgttagaaagtttgaaagatcaacaacagtttcgagatgctttattagcacaaaaagcacatgcacacgaaatctcgcgtgaacaattcgagcaagtttttaaacaggcgttcgaaagctaa

SEQ ID NO: 419617 - DNA, 1509 bp, Staphylococcus aureus
atgacaatatataatataaactttggtataggctgggcgagtagcggtgttgaatatgcacaagcttaccgtgctaaattattgagacgcacaaatcaagacactaaatttgtgtttttagattttatacagtcagagaacatacagacattaacgcaaaacattgggtttgaagatcaagaagttatttggttgtatcagtattttagtgatatttctatagcaccaacaacgtacacgttagatgacattgaacgtgagcttggtcatgatattagttttagagaaagaaatggtaagatagtccgcctatattttaatgggaaatcatcatttgtaacatgttatctgcaaaatgaacaaaaagacattgtggatcgtgcagaatttgtaattaatagtatgttagtacgtaaagatttttatagttatacacgcatattttctgagtattatgcaccagctgataataaagcgaaattatatatgcgacaattctataatgaaaatggctccatcgcttataacgaatatattgatggagacaactctatatatgtgtttgcagatgcggtgttgtataacaaaacggaatttattgcatactttttacaacgattgaatttaacccgagacgatattgtcatattagaccgcgcttctgatattggtcaggctgttttgcagcataaaggtgatagtaaagttggtgttgtgattcatgctgatcattatagtaataatatgatgagcgagcagcatatactatggaacaattattatgaatatcaattttcaaaagctaaatacattgatttctttattacagcgacagatattcaaaatcatatggtttgtcgacaatttgagcaatatcaaggttatcgcccacgtgtttatactattccggtgggaagcattgatgcattatcatatccaacattatcaagaaagccatacgcgatgattagtgcatctcgtttagcaaatgagaaacatattgattggcttgtcaaagcagttatcgtggctaaacgacaagtgccagaattaacatttgatatttatggagaaggtagtgagaagacgcgactgcgtaaaattattgatacacaccgcgcgcaagattatattcgtttactaggtcatgttaaacttgatgaaatttatactgattatgagttatttctttctgcatcaactagcgaaggttttggattaacactaatggaagcggtaggctcaggactaggtatgattggattaaatgtgaattatggtaacccaacctttattcgagatggggaaaatggctacttggtaccttttgataccgatgaagatagtgtggatgatgttgtcgcaaaactagctcatgccattgtaatgtattttaacaatggaccccagacaccacattacatctcttatgaagtggcacagcaatttatgactcaagatattattttaaaatgggaaacattagttcaagaggtgctgcatgattaa

SEQ ID NO: 419618 - DNA, 2391 bp, Staphylococcus aureus
atgaaacataaactagatgttacgataaacgaattaagactaaagtcgattagaaaaatagtgaaacgcatcaatacatggagcgatgaagttaaatcatattctgatgatgtgttaaaacaaaagacactagaatttaaagaacgtatagcatcaggagttgatacactagacacattgttacctgaagcttatgcagtggcacgtgaagcgagctggagagtattaggtatgtatcctaaagaagttcagttaatcggagcgattgtattgcatgaaggtaacattgcggagatgcaaacaggcgaaggtaaaacattaacagcaacgatgcctttatatttaaatgcactttcgggaaaaggaacatatttaattacaacgaatgattatttagcgaagcgtgattttgaagagatgcaaccattatatgaatggttaggtttaactgcttcattaggttttgttgatattgtggattatgagtatcaaaaaggggaaaaacgtaatatatatgaacatgatattatatatacaactaatggacgtctcggttttgattatttaattgataatttggcagatagtgcggaaggaaaatttttaccacaattaaattacggtattattgatgaagtggattcaatcattttagatgctgcgcaaacaccattagttatttcgggcgcaccaagattacaatcaaatctatttcatattgtgaaagagtttgtagatacattgattgaagacgtgcattttaaaatgaagaagaccaaaaaagaaatatggctgttaaatcaaggtattgaagcggcacaatcatactttaatgttgaagatttatatagcgaacaagcgatggtcttagtgcgtaatattaatctagcactgcgcgcgcaatatttgtttgaatctaatgtcgattatttcgtatataatggtgatattgttttaattgaccgtattacaggtcgtatgttaccgggaactaagttgcaagctggactccaccaagctattgaagcgaaagaaggtatggaggtttcaacagataaaagtgttatggcaacaattacctttcagaatttatttaaactttttgaatcattttcaggtatgacagctacaggaaaattaggcgaatcagagttctttgatttgtattcaaaaatagtcgtacaagtaccaactgataaagcgattcaacgtatcgatgaaccagataaagtgtttcgttcagttgatgagaaaaacatcgcaatgattcatgatatagttgaacttcatgaaacggggcgaccggttttactcataacgagaactgctgaagcggctgaatacttttcaaaagtatttttccaaatggatattcctaataatttactcattgcgcaaaatgttgcaaaagaagcgcagatgatagctgaagcagggcaaattggttccaagactgttgcgactagtatggcaggtcgaggcacagatattaaacttggtgaaggtgtcgaagcattaggtggattagctgttattattcatgaacatatggaaaatagccgtgtagacaggcaattacgtggtcgttctggtagacaaggggatccaggatcatcttgtatatatatttcactagatgattatttagttaagcgatggagcgatagtaatttagcggaaaataatcaattatattcattagatgcacaacgattatcgcaaagtagtttgtttaatcgcaaagttaagcaaattgtagttaaagcgcagcgtatctcggaagaacaaggggttaaagctcgtgaaatggctaatgaatttgaaaaaagcattagtatacagcgagatcttgtatacgaggaacgcaatcgagttttagaaatagatgatgctgagaatcgagattttaaagtgttagctaaagatgtgtttgaaatgtttgtaaatgaggaaaaggtgctaacaaaatcgcgtgttgtcgagtatatttatcaaaatttaagtttccaatttaataaagatgtggcttgtgttaattttaaagataagcaagctgtagtaacatttttattagagcaatttgaaaagcaaatagctttgaatcgtaaaaacatgcaaagtgcatattattataatattttcgttcaaaaagtctttttaaaagcaattgattcatgttggttagaacaagtcgactatttacaacaattaaaagcaaacgttaatcaacgacaaaatgggcaacgtaacgctatttttgaataccatagagttgcattagattcatttgaagttatgacacgaaatatcaaaaaaagaatggtgaaaaatatttgtcaaagcatgattacatttgataaagaaggtatgccagttatacattttccataa

SEQ ID NO: 419619 - DNA, 960 bp, Staphylococcus aureus
atgctgaaaaacaaaacatttaaagttacttggaattatatttcacaaactacatttatgtatggctcaaaagtatcattttcaaatggtgaagtaacttttataaatcctttgatgccctctggattaccgattcatgagtggttgatgttaaaacaattttcaaaatataaaagtgcaccaagtttaccaattttgcgtagaggacagcattataaattgcattttgattttgatgcaacgcctgctggttcagtgtattttatcatcattttttataataaaaatggcacaaaactaagtactgagattgtaaagtcaaatagtattacgattcaatatcctgatgaagcctatgcttataaaataaaaatgatgaatgcagcatcgacgagtcttatatttagatgtttaacaattacagagatgacgcatcaagataatttagaatataaaagcatgcgggtgacgaagataggcgatgaccaatatggaaatgataggatcaatgtcattattgcagaaccatctgacgcctatccaactatttcgaatgattttttgaaatcgtttggtcatgtttggctcgttgaacgttggatggacgacaatatcgagggaaatattaagcaactaaagaatgatttgcaaagtcaagataccctaaaggcaattaatttgattagttatgggtcaaagtcaaatgtttttgcaacttatgtcgctcagcatttggattgcaaagtgtatcgtacaagccatgaagatgatgatttaaaagaatggtttacagaacatgtcccaggaaatcatgaactaaaagatacaaatgtcgaggtttattttaaagaagagcaagacaaccatctaaattatatgtcacgtttaatgaatccggtacgatttttagattacttagatgtatcgaaactgaatggtggggaagtaaatgaaacataa

SEQ ID NO: 419620 - DNA, 1572 bp, Staphylococcus aureus
atgatgccacgtaaatttagagttttgcaaattggaggagacgatttagaacctattttccaacacaaaaaaggtgtgagttgggattacttcgatattggattgtttgaatttgatagtggttatgtagaggctattgaagcgattgttgaagcagaaggacgctttgattttatctatattcaagcaccatactcggagacattaacgaatttattacaaatgataagcgaaccatacaatacgtatgttgatgaatcattttggtctgttgaatatgaacaagacgaaaatgtccaaaaatacgttgttcaaccattacattaccggaacattgaagaacgtaataataaattagaggcagttagcttctcaggacagtatggagataaggtttctcctaagttagcacttgttcatccgaattttaaaggagatgtcgtttaccaaggtaattcagagctcacgttgagtggagaatttggaaaagaatttaaacctatcgcatcttggcaaaataatctcgtttacgataaagataaagtcattcaaatatggccagaatttgatattgatggtgcggtcgagttgcaatattcatttagattgattcaaactggcgctgatggtgcattaattgaacaaatcatattgactgatgatatgttagacagtcctttagagatacctacgaaaccatttgatgcttatataagtgtaactgttaaggcgcgagggaacgggacggtacatttaggacctatacacaaacgatggtctagattagacatgggtcaatttttactcggtggtagtcgttttgtagatagtcaacgacaggaatttatttattatttccaccctggtgatatgaaaccaccactaaacgtatattttagtggttatcgaacagcggaaggtttcgaaggatattatatgatgaaacgtatgaatgcaccctttttactaatcggcgatcctcgtgttgaaggtggtagcttttatatcggttcatctgaatatgaacaaggtattatcaatgttattgaagagacattagaaaagctgaattttaaatcacatgaattaatattatctggtttatctatggggtcatttggtgccttgtattatggtgctcagttaaatcctcaggcaattattgttggtaaaccacttgttaatattggaacgattgctgaacatatgcgattacttagaccagaagagttcggtacagcattagacgtcctggtgtctaatgaaggtgatacatctcaagcgtcgatacaggcattaaatcaaaaattttggcaaacatttcaaaagaaatcattgtcacaaactgtttttgccatagcatatatgcaacatgatgattatgatccacatgcatttcaagagctactacctgtattgacagcacaccaagcaagagtgatgaattgcagtattcctgggcgacataatgatgattcacctaccattgcaagttggtttgttaatttttacaacattattttggaagacaagtttgggagagttcaacatgctgaaaaacaaaacatttaa

SEQ ID NO: 419621 - DNA, 1554 bp, Staphylococcus aureus
atgaaatactttattccagcttggtacgatgaccaacgatggtggcaagacacgactgtgccgtattatcaactacaaaataatacggaatttgacgatatgattagtttgatggggatgcaccttgaaaatgacttagattatcgtctgattgttctcaatcatgcaccaaatttaagaacatttttacatcgatatgacttatatgagacaaagtattggtctgtgtttgatgaaattcaaggattcagtcaccatgcgccacaagcgattaattatcatcacttaaaatggccggatgatgttgagtttgtgtacacgccgtatttattaaaatgtgtgacgagtgaacagacctatacaaatatttattttagtcaagaagggtattcaatttggtttgaagaatttgaaagagatcagttacaacggcgttatatttttgatgatagaggttatttatcagctatacgttattttgatgatcagggagaggcttcttaccaagaatatttaacgattaatggagattgtgtgctttttgaaaactttaaaaatggacgagtcactgtttcaaaaagatatcaacatcactatcaacaaacagaatataacaatatggctcaactaattgaagaaaaatttcaagcaatgattgcacaacaaatacatgaagatgatcatgtgattgtggcttcagatgctaggcacaatcgacaaatagccaatcatattccggcgaaatcattaagttattcattttttaaaaatagaaatgaaactgtgtcagatgaggaatatcaatctatcgtaaagaatgcccatttaattgttgatagtgtgcaactagaacgtgatttaattagtcatcaagagaagtatcagcgagagaatacaatgattcgaatcacgccatttgaaacgagacaatcacctaatataagtagtcaattgatggaaacatttataggtgtatggatagacggtatgagtgacgttgatttgcaacaaatgatgcaacgacttgtggattatatcgcacaagaagataattaccgtttaattttattaacgcgccatcaaaatgatataccgatgtggcttcgtgaatgtattacgtcggtaaatgaggaataccaagctaaacagaatgccgatgttaatgtttcagcattaatgacacctgaagatcaagatgacatcattgctgttaagacgatacatgctgaacatgatgttgtagaagcattgcggacgttgcgacttgtgatagatatgtcaaaagaacctgatttgtatttacaaattagtgcaattagcgctgggattccacaaattaatggtcaacaaacagattacgtctctgattatgacaatggccgtattataaatacagttgatgaattagatgatgcgttaaattattatttattttatttgaaaaattggaattatgcgtacgcctattctttaaaattaatagatgcatatgcttctaagaatattattaatcagctcgatgagttaatagaaggtgaaaatgatgccacgtaa

SEQ ID NO: 419622 - DNA, 1212 bp, Staphylococcus aureus
atgttaaaacttttacaacaatacgaatataaaattatatataaacgtatactttacacatgttttatcttgtttatttatatattaggtacaaacatttccatcgtttcctataacgatatgcaagtaaaacatgagtcattttttaaaatagctatttctaatatgggtggagacgttaatactttaaacattttcactttaggattaggtccgtggttaacatcaatgattatcttgatgctgatttcttatcggaatatggataaatacatgaaacaaacaagtcttgagaagcattataaagagcgcatcttaacattaattttaagtgttattcaaagttattttgtgattcatgaatatgtttcgaaagaacgtgttcatcaagacaatatttacttaacaatcttgattttggttactggaacgatgttattagtttggttagctgacaaaaatagtcgttacggcatcgcaggaccaatgccgattgtaatggttagcattattaaatcaatgatgcatcaaaaaatggaatatatagatgcaagtcatattgtgattgcgttgttaatcactcttgtgataatcacattgtttatcttattattcattgaattagtagaagtgagaataccatatatcgatttaatgaacgtttccgcaacaaatatgagatcttatttatcttggaaagttaaccctgcaggcagtattactttaatgatgagtatttcagcatttgttttcttgaaaagtggtattcattttattttatctatgtttaataaagacgtttcagatgatatgccaatgatgacatttgatagtccaattggtatttcggtgtatttagtgattcaaatgttattgggttattttttatcgagatttttaatcaatactaaacaaaaatccaaagatttcttaaagagtggcaattatttttcaggagttaaacctggtaaggatacagaacgttatttaaattatcaagcacgacgcgtatgttggtttggatcggcattagttacagtcattattggtataccactttatttcacattgtttgtaccgcatttatctactgaaatttatttctcagtacaactgattgtattagtttacatcagtattaatattgcagaaacaattcgtacatatttatattttgataaatataagccatttttaaaccagtattggtaa

SEQ ID NO: 419623 - DNA, 6840 bp, Staphylococcus aureus
atgagcaaaagacagaaagaatttcatgacagcttagcaaacgaaaaaacaagagtaagactttataaatctggaaaaaattgggtgaaatccggtattaaagaaatagaaatgttcaaaataatgggactaccatttattagtcatagtatagtgagtcaagataatcaaagcattagtaaaaaaatgactggatacggactgaaaacgacggcagtgatcggcggggcatttacaataaatatgttacatgatcagcaagcttttgcggcttctgatgcacctttaacatctgaattaaacacgcaaagtgaaaccgtaggcaatcaaaactcaacgacaatcgaagcatcaacatcaacagccgattccacaagcgtaacgaaaaatagtagttcggtacaaacatcaaatagtgacacagtctcaagtgaaaagtctgaaaatgtcacttcgacaactaatagtacaagcaatcaacaagaaaaattaacatctacatcagaatcaacatcctcaaagaatactacatcaagttctgatactaaatctgtagcttcaacttcaagtacagaacaacgaactaatatatcaacaaatcaaagcactgcatcaaatactacttcacaaagcacagcgccagctccaacccatttaaaacaaactagcacaacgtcaaccagcacagcacctgtcaaacttcgaactttcagtcgattagctatgtcaacttttgcatcaactgcaacgacaagtgcagtaaccgctaatacgattacggttaataaagataacctcaaacaatatatgacaacgtcaggtaatgctacttatgatcaaagtaccggtattgtgacgttaacgcaggatgcatacagccaaaaaggtgctattacattaggaacacgtattgactctaataaaagttttcatttttctggaaaagtaaatttaggtaacaaatatgaagggcatggaaatggtggagatggtataggttttgccttttcacctggtgtattgggagaaacagggttaaacggtgccgcagtaggtatcggtggcttaagtaacgcatttggcttcaaattggatacgtatcacaatacatctacaccgaatgtatcagcaaaggcgaaagctgacccacctagtgttgctggtggaggtgcgttcggtgcctttgtaacaacagatagtactggtgttgcatcaacatatacatcaagttcaatagctgataatgctgcaaagttaaatattcaaccaacaaataacgcatttcaagattttgatattaattataatggtgatacaaaagttatgactgtcacgtatgcaggtcaaacatggacacgtaatatttcagattggattgcaaaaagtggtacgaccaacttttcattatcaatgacagcctcaacaggtggcgcgacaaatttacaacaagtacaatttggaacattcgaatatacagagtctgctgttacacaagtgagatacgttgatgtaacaacaggtaaagatattattccaccaaaaacatattcaggaaatgttgatcaagtcgtgacaatcgataatcaacaatctgcattgactgctaaaggatataattacacatctgtcgatagttcatatgcatcaacttataatgatacaaataaaactgtaaaaatgacgaatgctggacaatcagtgacatattattttactgatgtaaaagcaccaactgtaactgtaggcaatcaaaccattgaagtgggtaaaacaatgaatcctatagtgttgactacaacggataatggtactgggactgtgacaaatacagttacaggattgccaagcggattaagttatgatagtgcaacgaattcaatcattgggacaccaacaaaaattggtcaatcaacagtgacagtagtatctactgaccaaacaaataacaaatcgacgacaacttttacaataaatgttgtggatacgacagcaccaacagtgacaccaataggagatcaatcatcagaagtgtattcaccaatatccccgattaaaattgctacgcaagataatagtgggaatgcagtaacaaatacagtcacaggattgccgtctggattaacattcgatagcacaaataatactattagtggtacaccaacaaacattggtacaagtactataacaatcgtttctacagatgcgagcggtaacaaaacgacgacaacttttaaatatgaagtaacaagaaatagcatgagtgattccgtatcaacatcaggaagtacacaacaatcccaaagtgtgtcaacaagtaaagctgactcacaaagtgcatcaacgagcacatcaggatcgattgtggtatctacatcagctagtacctcgaaatcgacaagtgtaagcctatctgattctgtgagtgcatctaagtcattaagcacatctgaaagtaatagtgtatcaagctcaacaagcacaagtttagtgaattcacaaagtgtatcatcaagcatgtcaggttcagttagtaaatcaacatcattaagcgattctatttcgaactctagcagtactgaaaaatccgaaagtcaatcaacaagcacatctgattcattgcgcacatcaacatcgttaagtgattcagtaagcatgagtacatcaggaagcttgtctaagtcacaaagcttatcaacaagtacatctgattcggctagtacatcacaatcggtaagtgatagtacatcaaattcaattagtacatcagaatcattgagcgagtcagctagcacctcggactctatcagtatttcaaatagcatagccaactctcaaagtgcgtcaacaagcaaatcagattcacaaagtacatcaatatcattaagtacaagtgattcaaaatcgatgagtacatcagaatcattgagcgattcgacgagcacaagtggttctgtttctggatcactaagcatagcaacatcacaaagtgtctcaacaagtacatcagactcaatgagcacttcagagatagtcagtgactctatcagtacaagtgggtcattagctgcatcagacagtaaatcaatgtctgtaagtagttcaatgagcacgtctcagtcaggtagtacatcagaatcattaagtgattcgataagtacctcggattctgacagtaagtcattatcattgagtacaagtcagtctggctcaacaagcacatcaacatcaacaagtagttcagtacgtatgtcggaatcacaaagtacgtctggttcaatgagcacaagtcaatccgattcaacgagcatatcaacgtcgtttagtgattcaacaagtgatagcaaatcagcatcaactgcatcgagtgaatcaatatcacaaagtgtctcaacaagtacatctggttcagtgagtacttcgacatcgttaagtacaagtaattcagagcgtacatcaacatctatgagtgattccacaagcttaagtacatcagagtctgattcaacgagcgactcaacgtcgacgagcgattctatcagtgaagcgatatctggatcagagagtacgtctatatcattaagtgaatcaaatagtacaagtgattcagagtcgaaaagtgcatctgcttttttaagtgaatcattgagtgaaagcacatccgaatcaacatcagagtcattaagcagttcgacaagtgcgagtacgtcattatcagacagtaattctgaatctggtagcacatcaacatcattaagcaattcaacaagtagcagtacatctatttcaacgtcaacaagtggtagcgcatcaacatcagcgtataagagcgagagtgtctcaacatcattgagcacatcaacgagtacaagtttgtctgactctacaagtttgtcaacatcattaagtgattcagcaagtggtagcaagtccaattcactaagtgcatcaatgtcgacaagtgattcaatcagtacaagaaaatcagagtcattaagtacatcgacatcattaagcggttcaacgagtgagagtgaatccggctcaacatcatcaagtgaaagtaaatccgattcaacatcaatgagcctgagcatgtcccaatcaacatcaggaagtacaagtgtgtcaacatcagaaagtttgtctgactcaacgagtacatcattgtcactgagtgcctcaatgaatcaaagtggtatagactcaaactcagcaagccaaagtgtctcagcatcaacaagtacaagcacgagcgaatccgattcacaaagcacatcatcatatacaagtcagtcaacaagccaaagtgaatcaacatcaacatcaatgtcactaagcgattcaacaagtatgtctagaagtacgagccaatcaggttcaacaagcacatcagcatcattaagtggttcagagagtgaatctgattcacaaagtatatcaacaagtgcaagtgaatcaacatcagaaagtacatcaacatcgctcagtgactcagaaagtacaagcaactcaacatcagaaagcacatcgaatgcaattagtacgtcagcaagcgcaagtgaatccgattcgtcgtcaacatcattaagtgattcaacgtcagcgtcaatgcaaagcagtgaatccgattcacaaagcacatcaacatcattaagtaattcacaaagcacatcaacatcaaaccgaatgtcgactattacaagtgagtcagtatcggaaagtacatcagaatctggctcaacatcagaaagtacaagtgaatccgattcaacatcaacatcattaagcgattcacaaagcacatcaagaagtacaagtgcatctggatcggcaagtacatcaacatcaacaagtgactctcgtagtacatcagcttcaactagtacttcgatgcgtacaagtacgctggattcacaaagtatgtcgctttcaacaagtacatcaacaagtgtgagtgattcaacgtcattatctgatagtgtgagtgattcaacatcagactcaacaagtacgagtacatctggttcgatgagtgcgtctatatcgttaagtgattcgacaagcacatcaacatcggctagtgaagtaatgagcgtaagcatatctgattcacaaagtatgtcagaatctgtaaattattcagaaagtgtaagtgaatctaattctgaaagtgactcaaaatcgatgagtggttcaaccagcgtcagtgattctggctcattgagcgtctcaacgtcattaagaaaatcagaaagtgtaagcgagtctagttcattgagtggctcacaatcgatgagtgattcagtaagcacaagcgattcgtcatcattaagtgtatcgacgtcactaagaagttcggaaagcgtgagtgaatctgattcattaagtgattcaaaatcgacaagtggttcgacttcaacaagtacatctggttcattgagcacttcgacatcattaagtggttcagaaagtgtaagcgagtctagctcgctaagtgattcaatatcaatgagtgattctactagtacaagtgaatccgactcattaagtggatcaatatctttaagtggttccacaagtcttagcacttcggattcattaagtgattcaaaatcattaagtagctcgcaaagtatgagtggatcagaatcaacgtcaacaagcgtgagtgattctcagtcaagctcaactagtaatagtcaatttgactctatgagcatcagtgcatctgaaagtgactcagtgtctacaagtgattcatctagcatcagtggatcaaattcaacgagtacatcactttcaacatctgattcaatgagcggaagcgtatcagtttcaacatcgacaagtttaagtgactcaatatcaggttcaataagtgtaagtgactcgagctcaacgagtacatcagagtcgctaagtgattctatggcacaaagccagtcaacaagtacaagtgcatctggttccttaagtacatcgatatcaacatcaatgtcaatgagtgcaagtacatcgacatcacaaagcacgtcggtgtcgacatcattatcaacatcagacagtatcagtgattccacttcaataagtatcagtggttcacaaagtgctgtagaatcagaatctacaagtgattcaacttctatcagtgactcagaatcattaagtacatcagattcagactcaacatcaacaagtacatcggactcaacaagtggttcaacttcaacaagcacatctgaatcgctaagtatgtctggttcagattcaacgagcgtatctgactcaacatcaatgagtgaatccgattcaacaagtgtttcaatgtcattgagcacatccgattcaacatcaattagcgactcagaatcagtgtcaacaagcacatcaatgtcattgagcacatccgaatcgctgagtacatctatgtctggttcacaaagcatttctgactcaacatcaacaagtatgtctaactcgacttcaatgagcaactcaacatcaacaagtatgtccggctcaacaagtacatctgaatctaactcaatgcatccgtcagactcaatgagtatgcatcatacacacagcacgagcacatctcgctcatcaagtgaagcaacaacgagcacgagtgaatctcagtctacattaagtgcaacatctgaagtgactaaacataatggcacgccagcacaaagtgaaaaaagattgccagatacaggtgactcaataaaacaaaatggattactaggtggcgttatgacattattagttggtttaggtttaatgaagagaaagaaaaagaaagatgaaaatgatcaagatgattctcaagcataa

SEQ ID NO: 419624 - DNA, 693 bp, Staphylococcus aureus
atgaattattcgccgaagcaaggtgtaaagagtcatggcttaccacacgatccatttaaaagtagtacagtaccacgtccaataggttggatctctactgtatcgaaagatgggaaagataatttagcaccttatagtcagtatcaaaacttaacttgggatccgcctatggttatgttcgcagcaaatcaatctgtgcttggtgatcatgagcgtaaagatacagtaaaaaatgcagaagagacagggtggtttgtatggaacatggccacgtatgatttaagagaagctgttaatttatcgtcgaaggcactaccacctgaagaggatgaatttgaatatgcaggtgtgacgaaagaagcatgtatagaagcaccaggttttcgagtcaaagaatcgccagtacattttgaatgtgagtacgttcaaacgatacgtattccgacaggagatcctgtatcaacagttgatattgttataggaagagttgctcaggttcatattgacgataaggtcattcttgataatggtaaattagacattaagtcgattagacctattgctaggttaggatattatgattacacggttgtgaatgaaatatttgaaatgaaagcaccatcagcttctaaagaagagcttgcaggtttagaaggaagaaattttgataatcaatcagatgacaaggaataa

SEQ ID NO: 419625 - DNA, 264 bp, Staphylococcus aureus
atgccaaaaatcatagtaccaccaacaccagaaaacacatatagaggcgaagaaaaatttgtgaaaaagttatacgcaaaaccaacagaaattcatcaactattcggagtaagtagaagtacagtatacaactggttgaaatattatcacgaagatgatttaggtataaaaaacttatgtatcatctattctccagctggacagttaattaatattccgaagttagaagcgtatttaattaaaaggcaagagaaaatactttaa

SEQ ID NO: 419626 - DNA, 408 bp, Staphylococcus aureus
atgaaaatcaaagttaaaaaagaaatgagattagatgaattaattaaatgggcatgggataaccctggattagcaacaggaagaaatttttatccacaaaccaagagtgatattgattataagtgcttctctctttatgacggaagaaattgtatcataaaaggttttgtatcagctgatgatacttttgaagtcgaatttgaagaagatattacagaagagactaaggttgataggttgattgaattattcgagattcaagaaggagactataactctacactatatgagaacactagtataaaagaatgtttatatggcagatgtgtgcctactaaagcattctatatcttaaacgatgacatgacgatgacattgatttggaaagatggggagttggtagaatga

SEQ ID NO: 419627 - DNA, 201 bp, Staphylococcus aureus
gtgaagaagaaagaaaaatattatgttgtagaggttaataaaggaatttatttatataaaagtcgtgatgccggatattacttcactgatgatgttatgaatgcgtcgaaatatttggatgctaaagaagctagtaatgttgctagaaaatcaggcggaaaaacattatattacacaattacgcatgaggtaatagattaa

SEQ ID NO: 419628 - DNA, 390 bp, Staphylococcus aureus
atgcaaatattagttaacaaacgcaatgagattatttcatatgctgttattggtggttttgaagaaggtattgatatagaaagtcttccagaaaacttctctcaagtttttagacctaaagtatttaagtattcagatggaaaaataatttttaatgaagattattcagaagaaaaggatgacacacatcaacagattgataatgaagagaatattacaggtgcttctgatgatatattacggaaaatggttgctagtatgcagaagcaagttgttcaaagtacaaagttattgatgcaagttaataaacaaaacgctttgatggcaaaacagattgtagcattcaataaaaaattagaagagattaaaggagagacggaaaatgcttaa

SEQ ID NO: 419629 - DNA, 438 bp, Staphylococcus aureus
atggatattaactggaaattgagatttaaaaataaagcggtattaacgggattgattggggcattattgctatttatcaagcaaatcacagatttattcggattcgatttatcaaatcaattaaatcaagctagcgcgattataggcgctatcctcacgctacttacaggtattggcgttattactgacccaacgtcaaaaggtgttgccgattcatctatagcacagacttatcaagcgcctagagatagtagcaaagaagaacaacaagtcacttggaaaacttcacaagatgctagcttaacgcccgaattaagcacgaaagccccaaaagaatatgatacatcacagccgtttacagacgcctctaacgatgttggctttgacgtaaacgaatatcattatggaggtggcgacaatgcaagcaaaattgactaa

SEQ ID NO: 419630 - DNA, 180 bp, Staphylococcus aureus
atggctacaaaaagttttactacagattataaatttaataacaaagcagctgaaaaattagtgaatgccatgaataaaagtgaagatgctcaattcaatagatctaatgtttttgctcaacgtttaaaaacaatggaagacttacaaaattttaagaataaagtaaaggttattttataa

SEQ ID NO: 419631 - DNA, 528 bp, Staphylococcus aureus
atggaatggcaacctaataacacatacgttatagctcaaaacttgattacaaaatatcaagaaattaccggaaacagcatagtgggagacgagatgaaagtgcataaattaatgtactatatccagaaaacttctattgctttaacagggaacgctataatcgatgaacaatttgaaggttgggtacatggtccagttttaccgtccttaagagggttatttgattactttgtggaagacaatacttctagaaataaagttaatgatactgaagaatttataatcgagaatgctatttatcaatatggtaaatatgcaacatgggctcttagagagaaatcacacgaagaaatttcgtggcttaatagccgtaaaggcttaagtgctaatgaacgagggtatagaaatctcacaattgaggatatcaaagaagatgcaaacaaaataagattatatgattatagttacgatatgtatatagatgaatttgaagatttagatgaggaggaatttattagtgcacactag

SEQ ID NO: 419632 - DNA, 399 bp, Staphylococcus aureus
gtgcacactagatcccctcatgactatataggtaaaatcgttaaaataagattaccttattatgatgtgaaaagcgcaaaagttgcttttaaatctaggcctggtttaataataggttgcgaaaagaatcaattcccttgtgatttcacttatttgcctatttcgaaaataagtgatgaaagcaaaagacattctatatatgattttgaagtaaacgatgagacttgtaatttgttaaatttgaataacgttccatcatttgttaggtgtcataaggttagtactgtatatagcaagaatgttcacagaaattacattagtgatttaaacgaaacgaacaatcgactttttaatgagattaaatctatctttgatgcatttgcaactggtttattttaa

SEQ ID NO: 419633 - DNA, 504 bp, Staphylococcus aureus
atgttcttgagcttagatagaaacacacgtacagctaaggggtactactttgtcaggacattttatcgcaaggataagttaccttatagaaaaaattataaagttgaaatgaaaaataataaaatcattttattagataaagtagaagataaaaagcttaaacaaaaaatagaaaattttaaatttttcagtcaatatgcaaatcttaaagaattgaaaaactacagcaatggtgatgtctcaattaatgagaatgttccaagttatgacgtgaaatataaaatgagtaataaagatgaaaatgttaagcaattaagaagtcgttataatattcctactgataaatcaccggtattaaaaatgcatattgatggtaatttgaaaggaagttctgtgggttataaaaagttggaaattgacttttcaaaaggtgaaaaaagcgatttgtcagtaatagattcattaaatttccagccggcgaaggtggatgaagatgaaagataa

SEQ ID NO: 419634 - DNA, 297 bp, Staphylococcus aureus
atgggtgaacctgatgaagtatggaaagaacgacttgaattattgaaaccttatcaagtaaataaagaaatgatggataaaactggtaatccaaatgttatttttgagcattgcttaccatctttccacaatgctgatactaaaattggacaacaaatttttgaaaaatatggtattcgagaaatggaagttacagatgaagtattcgaaagtaaagcttcagttgtattccaagaagctgaaaacagaatgcatacaatcaaagcagtcatggttgctacattgggtgaattttaa

SEQ ID NO: 419635 - DNA, 279 bp, Staphylococcus aureus
  misc_feature (251)..(260): n is a, c, g, or t
atgagacttcaaaaagcacctctagtaacgtcaggactagtcttaggattattaggcctgggtaatctattaaaagatttatctcttactttaaacgctgtttgcggaatctttgctttcttgatttggattcaccttttatgtactatgctcaaatattttaataatgtgaaagaacaattaaatagccctctagtttcatcagtgttcacaacatttttcatgtctggctttttaggtactacttattnnnnnnnnnnatataacatttatcaataa

SEQ ID NO: 419636 - DNA, 285 bp, Staphylococcus aureus
atgttaattagtctcgtaatcccagtttttgctttgttagttattggtggtattatttgggcaattatagaaggtatagtacatatttcaaaaaagaataaagcaattgataatttttttaaccaagttaataaagtaagtgagacatataaattcgctactacttttttatttctaatcttggctacggctggtatttctcaattttatctatattatatagtatcagcgtttcttttttggcttgtcatatttacctttggtattgcaggtatcattttttaa

SEQ ID NO: 419637 - DNA, 1776 bp, Staphylococcus aureus; identical to SEQ ID NO: 408691

SEQ ID NO: 419638 - DNA, 129 bp, Staphylococcus aureus
ttgctatttacagaaaatgataaacagtttaaaggacaagcaattgatttagattacgatggctatctaattgttagagatgaagcgggtgaatcacaccgtttaattagtgcagatatagatttttaa

SEQ ID NO: 419639 - DNA, 543 bp, Staphylococcus aureus
atgatgaaaaaattgagctcaattatagtagcttcaggattagtattatcagcttgttcaactggtaacgaagaagaaaattctaaagatcaaaaacaagaaaaacatatgaatcataagagtgaaagtaaagccccagataatatgaaaagtacagatgacagtaaatataaaaaggacgataaaataacaattacagctgatcatatgcctggtatgaaaaatgccaaaggtactgtgaaaggtgcttataaaacgtatgcttatgtcgtgagttacacacctacaaatggtgatgaaaaagttaataatcacaaatgggtcgttaatgaggaagttgcagatgcccctgaaaatggattcaagaaaggtgatacagttaaattagaagctgaccatatgcctggtatgaaaggtgcagaagctcaaattgatgatgtagaaaaaacaaccgtttatatggtggattataaatcaacagaaaacgatgagatggttaaaaatcataaatggatgacaactgacgaactaaaatctcgttaa

SEQ ID NO: 419640 - DNA, 129 bp, Staphylococcus aureus
atgggaattaaagatgtattaaataaaatgaaacctcaggatcaatcatgctgttcggtagaaattgaagaaaagaaagagaaagatgaaaaagaacagcaagacaataataattgttgtaacaattaa

SEQ ID NO: 419641 - DNA, 225 bp, Staphylococcus aureus
atgacggttatagttcataaaggcaaagaaggtctttgtattgaaaaaggaccttctattatatataaaggtccatttaaacatattgcagatgatgataatcatagaataataaaggttgttgttaatgtcgtatcattaacaattaaattagggagcataaaagtatgctttcttttttatggaggttttgagatgattcaaaatttagctgattttacctaa

SEQ ID NO: 419642 - DNA, 690 bp, Staphylococcus aureus
atgtacgatttaaatgaccaagatagtcaatttcgagtgttaaaggaggacattttaattaatattatatttaataatctgaaaccagagaaacaaaaaacgattgttaatgcctcaatcaaagaatttgtgaaaagtggttttgacaaggcatcaacaaatgaaattgtgaaacaagcacatatatctaaagggtcattgtttaattattttaacagtaaaaaggagctttattgttatttgattagttatagcactcaaattttagaggatatgtatgaagaaattgatttaagcgaaacagatttgttcaatagaattgagaatattggtttacaaaagttatatgttcaacaaaaataccctgaaatttttgattttctaaaatctaccattgaagaagaatcgcccgaagtcaaagccaccattgaacaacatgttgctcgtatatatgaagatggaaggcaaaaaatatatattggaatcgactattctaaatttcgtgacgatatagatatcaataaagcaatcgaaatcctcaattggacaatgtatggtttcggagaaaaggggcttcaacaaatcaattcttttgaaagtctttctaattttggtgagcaatatcttaaagaatggaatgtttacgctcaaatattaaaacatagtttttataagaaaaatgaaatataa

SEQ ID NO: 419643 - DNA, 882 bp, Staphylococcus aureus
atggaggaagttgtaaaaattaacggtttacaaaaaaaatttggtaatttcaaagctttaaacaacgtctcttttacagtaaataaaggagaaacattaggatttattggtcctaatggtgccggaaaatctactactttacgtatattattaggggctattaaacgagatgcaggtgaagcagaaatatttagtaatgatgtatggaaagaaagtcttaaaatccataaacgtatatcttatgtcccaggagatattgcattatgggggaatttgactggcggagaaattatagatttattcatgaacttacatggcaatggagatacagaaaaaagagatgacttaattaaacgctttgaactagaccctaagaaaaaagctaaaggatattcaaaaggtaatcgtcaaaaagtaggtttgattgcagctttatcagtagattcagatttgtacatttttgatgaaccaacctctggtctagatccgttaatggaagttgtgtttcaagaagaagtggaaaaaattaaaaacaatggaaaatctattttattatcttcacatattttaagtgaagtggaacggctagcagacagagtggctattattcgtcagggagaaattgtagaaagtggcacactcgatgaattaagacatttaacacgttctacaataataatagaaacagaagaagatgtgaccaaattattaaaagtaaaaggtgtatttgattttaaacacgaaaataatcaagcgacattttctgcagaaaataaacaacttaattatattttaaatgaagcagtaaaattaggcgttaaaaaaattgaatctacaccaccgaccctagaagatttatttattcgtcattatgaaatttaa

SEQ ID NO: 419644 - DNA, 1608 bp, Staphylococcus aureus
atgcatgaaaaatttactggctggcacatactttttttacaatatctaaagcgtgattggaaaaaattaattatatgggtcctaagtattgttttgttttctgcaagttttgttccagcttttaaagagatagcccaaggaaaaggattacttggtatgtttgaaacattacaaaatcctgcgatgatttctatggtaggtccaacaccaatcgaaacagcaacagattatactgtaggcgcgatgtatgcacatgaaatgctgctattttgtggactctttgcaatgatagtatctatgttacatgtggttggtcatacgcgtaaagaagaagaattaggacttacagaattagtacggtcatttcaaattggccgacaagcaaattcacttgccgcaataatagaaatagtgttagtcaatatggtcatagcggtgcttatttttgtaatgatgatcagttttaatgtagaaacgatttctatacaaggatcgctactctttggaattacaataggaatggcaggcattatgggagctagcattgcgcttgttatgtctcaaatcatgccaacttcttcatccgcgactggagcatctcttagcattgtaggtttgctatatattattcgtgctggtacagatgtatccaatattgggttatctagcattaaccctctcggttggacatatctcacgtatccttttacagataataattggcttcctatagtgatagccttcttatttagtattattgtagttgttattgcaatcatacttgaaggtgcacgcgacatgggggctagctatattcctgaaaaaaaaggaagagcgcacgccaaaaaatcattattatctatccatggcctattatataaaattaataaaagtatcatcattagctggttaattgcatttatggttatgggtatggcctatgggtcaatttatggagacatgcagactttcttagaaagtaatgaaatgatgaaacaaatgttttctaattctaatgtttcaattgaagcttcgttcacaagtacaattatgatagttctagttagtttggttggtatattgccaattgcaattgttaataaactattttcagaagaaaacaaacttcgtctcagccaaatatactctactaaagtgacacgcagtagagtatattggaacactattgtattagcattttatagtagtattttaggtgtcttagtggctacgctaagtcttggcctgacagggataaatgcgatggaaggtcatggcgagttagaaatcattaatttccttgctgctggttacaattttttacctgctatattatttttcattagtcttgctgccctagctcttgggtgggcaccaaaactcggaaaattagcttatgcttatcttggttataattttgcaatcaattacttcggcaacactttagacttaccggaatggttttcaaaaacagctatattgaattggcttccacaaatgccaaaagacaattttgatattataatttttataaacttaactataattagtattatatttatcgttttaggatatataggatatcgaaaaagagatttgattggataa

SEQ ID NO: 419645 - DNA, 300 bp, Staphylococcus aureus
atgaaaataggagaaattttaaaaaaattaagattactgtactccgtttcagcaaaagatttagctcacgatatcaatatatctcctagctatctttctgaaatagaaaacagtaaaaagactccttctttagaattgttaaataaatattctcaaatatttgaaataaaagtttctacaattatgttaatggcagaagactatagtgaaaacaaacgtaaaagtaaacctgagatgtttatacagaaaaggttaatcaaaattttaaataaacacactgacgaattggaggaagaatga

SEQ ID NO: 419646 - DNA, 891 bp, Staphylococcus aureus
ttgaaacaatttaaaaaatatccaatccatcagtgtgctttttataaatgcaaatccaagaaaaaattagctagtttacttaaaaccgatttaaaaaatctaaacaggctttcaaaatctattgaacaagaatactatacgttcaataaaaaaaggcaaattacagcacctaaaaaggaattgaaagctatacaaaaaagagtgctcaatttactcaataaaatagaaaaaccagattgggtcatatcatctactaaagaaaaatcatatctagataatgctcattatcatatcggtgcacaatatgtctgtacaacagatattcgtagtttttataataattgttctcgcgatagagtatatcaattttttgcaaaaaaattgatgacttctccagatgttgcaaaattactatctgatataactactttaaagtatatcccaactggatccccaagtagccaaatcctcgcatattttgcatatgaagaaatgttcattaatatgtttaatattagccaaaaattcaattgtaaaatgactttatatgtagatgatttaacattttccaaagatagctcttttaactaccaaaacttgattaatcacattgatatagaagctcggaaatttaatcactctttaaaatacaaaaaaacaaattataaatcggtcaaaaaaggtgcaaaaatcacaggagttatattaaaaaattatgagttgaagattccaaatagtttaagaattagtatcttaaaagattttgaaaatataaaaaataaccaagaactaaagcaccaagtaatgtcattaaaagggaagattaatgccgctagattaatcgaaccaaatcattttaatggtactaattcatatgtaaaaagtctttag

SEQ ID NO: 419647 - DNA, 177 bp, Staphylococcus aureus
atgctaagctacggtggtttactcaaacaaaaacataaaattttaaatttagatgactcagaagacgggaacttaattaatacatcagacgaaaagacaacagaagaagaacaaaaagcacactcaatcatggcaatatggaattatcaaaaacaaaactactacatcaaaaaataa

SEQ ID NO: 419648 - DNA, 486 bp, Staphylococcus aureus
ttgcaacagaaccctgaacttaatgatactgattataatgatacgaatgatttgcatgatacatacaataatttttcaataaaccatacccattcaaatcagtcaaatcaatttttaaataactttgggaatcaagatgataaagaaatactactccaagaattcccagaacaactaactaattatttattaaaatatgattatagagatttagaaatcataaaaactgttattcttaaagcaaaaaaatcatttaattcaagacatgaagatatgcattacatgttagaggacattgaagatgaaatattaatatctttaaaaagagtaaaaaaagcgatacatgatagaggtgttaaaggccaaaaggaaacgatcatttcgatgcaagggtacttaatgaggacgattttaagtgaacttgaagaactttattcagccgatatgagaagacaaaatatgacgaaatataatatttttaattaa

SEQ ID NO: 419649 - DNA, 405 bp, Staphylococcus aureus
atgatcattgattttattataatcattttctttgtgtattttgtcatcgttggattcagacgaggtttttggttatctatgatacatttgagtgcaacgattgtatcattgtggattgccagtcaattttacaaatctattgtagaaagattaattgtatttattccatatcctaaaacaacagcatttaatacaacttttgcgtttcattttaatcatctacaacatcgatttgaagcgattgtagcttttttaatgattacattgtttgtcttacactttacgttatatctattggcattatatcccaacgaagcattacaacatcagcttaaaatatctattgtgagtcattcattgatttttcacatcccatatttatcggctttcaccattaatttataa

SEQ ID NO: 419650 - DNA, 360 bp, Staphylococcus aureus
atgtctggggtaattgattatcaattccgtttaaatggtgttttaaaatttaaaattgagtttttgatatattactatgtctgctacacaaatcaatgttttatgctttacaaagttatattggcagtagttgactgcgggcctcaaactcagaagctggcggaaagtcagcttacaataacgtgcaagttggcggggttccaacatagtgaaattggatcctcaatttctacagacaatgcaagttggcggaccacaaacacagaggctagcggaaagtcagcttctatgaatataataaaaaagctaggtaacaaaatgctacctaacttcatattcaagattatcaatcctatttga

SEQ ID NO: 419651 - DNA, 789 bp, Staphylococcus aureus
atgtttgaaaatgaagcatacaaatacttatctacaggacaactagaacaaatcccacatattactgctgaaacactatatcatacatatcaatcaatgattaataatgatcaatgttctgtttatgttgtcggcaatgtagaacctgaaagtgttgagaaacaaatacgtgaaaaatttgcacttaaaccattcgataaacatcaattccaacattctactcatcatttacacgatgaagaagttgattatattgttgaatatgatgacgtggatcaagctaaattaaatatgggataccgttttccaacacaatatggtcaaagtggatatgctgcctttgttgtatttaacatgatgtttggaggagatccttcatctgttttatttaatgaagtgcgagaaaagcaaagtttagcgtactctatacattcacaaattgatggcaaaaatggctatttatttgttttgagtggggtttcaagcgataagtacgaaactgcaaaaaacactattataagtgaatttgaaaaaataaaagcaggagatttcactgaagaaaaattagagttagctaaaaaagtaatcatttctcatcgatatgaatctgaagatcgtccgaaaagtgttatagagattatgcataaccaaatattattagagcaaccacaaagcaaagaaacatttataaaagatatacagaaggtaagtcgcgaagatattgtttctgttgctgaaaaagcatttttagatacaatctatgtgttgacaaaaggaggggataaataa

SEQ ID NO: 419652 - DNA, 864 bp, Staphylococcus aureus
ttgaaacacattaatcaattttctgaatcgacactagcacaactagaaaaagatcaacaacacgtattttatgtatactgtttgatggacccaagaaatgatgaatgcttttatgttggtaaaggtaaggggaatagaatatttaaacataaacaagatgcgcagaaaaaagtattgtacgaagatatatttatagaagaaaataaagataacttgaaatttaatagaattaacgaaatttgtagcaatgatttgaatgttttaggatatataatcagttatggattaaccgaatctgaagcattttctgcagaaaatgttcttataaactttcttaacctaacaaataaaactacattaacaaatatgattaacggtcatggatctaaggcatacttagttgaagatttagaaaatgaatttggctacgattcaattaatcttgaaaacataaatacgaatgaattaattttagcagtgaaaatcagagatgcatttctattagataaggatgaaagtaaagagtatcctattaatgaaagtaaacgtgatagaaataaccttaaatcgcgtacattaggtagttggataataggaaaagataaaatacataaaataaaatatattattggtatcaatacaggtgctaataatgcagttgtctcagcttatgaagtatcatttgaacaagcggagagtatcgaaacaaataatggtagaatgagatatgcgtttattgggctttcagaaagagatgctactctaaaaaaattgaatttatacaaaaaagcactaccagatttaagatttggtagtggtagcgctacagcatatataaataatgggacaatgaaagttgattaa

SEQ ID NO: 419653 - DNA, 306 bp, Staphylococcus aureus
atgaaaggaaatatacaatgcccacgattaataaaaggaagtttattagattttgtgttagaaacagtagatgtttttgtaaatggaagtaaaaatgattgcgaattagtaaattttaattataaagaaggaaaagtagtttcacgttatagtacaaaatttgaaagcaatcctaaattaagaaaaaagcaattgatatcgacggtaaaagttgtaaggtatgttatttttgattttgagaaaattttatggggcatagggaaagttttattgaagttcatcatattaaggcaatgtttactataa

SEQ ID NO: 419654 - DNA, 354 bp, Staphylococcus aureus
atgaaagcatcacgcattctattcggtatcggtgttggcgtagcagctggttttgtagttgcactccaaggacgagacgacaaaagtgtcaagaacaacacgatcgatcgtactgcccctactggttcaaaatcagaactacaacgtgaatttgaaacaattaaacaaagttttaatgacattttaaactatggtgttcaaattaaaaacgaaagtgcggaatttggtagttcaattggtggtgaaattaagtcattacttggaaacttcaaatctgacatcaatcctaatattgaacgtttacagtcacacatcgaaaatttacaaaataaacgagatgacattagaaattag

SEQ ID NO: 419655 - DNA, 990 bp, Staphylococcus aureus
atgacaaacatcaaagaattaacagagattcccaagatcgaactacattgccaccttgatggctctgtaagttatgaatatttgaaaagccaatcaaaaaagcaaaagattcaaattgacatgaataaggttacagttggagagcattgtgagagactagactactatttaaaatcttttgatgagatattaaaggttatgcaaacagaagaaagtttgattgagagtgttttggatgtagtgaagcaagctgaacaagatggtataaaatatatcgaaattagatatgctcctaaactacatacacagaaaaatttaaaaattttagaagtcttattagcggtatgtaaaggagcggaattggcagaaagtcaatgtgatgttataacaaggttaattgtttgtggaatgaaacactattcaaactttgaaaatatagaaatactcaaacacgttttaaaaaataaagatttacaacaatatattgttggcatggatttggctggtggagaagaagacaactctataggtaagtattcagaagcaattgaatatgccaaaaacaataattttaacataacaatacatgctggtgaatgtggatgtataaaaaatgtgtacgattctgtggaattgggagctaaaaggattgggcacggggttgcattacttaaaagcgaacaagaaattaaagaattttcaaaacgaaaagttttactagaaatttgtcccaaaagtaatgttcaaactaaagcaataaaatgcttggaggatttggatatagaattattaaaacaatataatgtgccatatttaattaataccgataatcgaactgttacaggtaccactttaataaaagaatatcgattgctattggagaataatttaatttctatggatgagataaagagaattaacaaagaagcaattggatatacatttatcgacaagtcagaaattgaattgttgatgaaaaaaattttatag

SEQ ID NO: 419656 - DNA, 300 bp, Staphylococcus aureus
atgaattgggaaattaaaagtttatttagcgatttaaagttgttgaaagatagttttgaggatttaaaagataatcatggttggtattttgataagttatatccacatgaaccaaatcatgttttaaataaaaccgaagcgattaaagaaggactttcttatcatgagagacgtattcacaataatcaaatgtttgatttattacatctctatacaaaacagtttgatagtattatccaaaagtttcatgaattagaaaaagcgtcatctttcgccgaccaaagccaagataacgcataa

SEQ ID NO: 419657 - DNA, 147 bp, Staphylococcus aureus
atgaaattgaatttactgtatataactttaacatcgttattgacaattttattactcgcaatatctaacacgtatgttgcttttagtacttatgcattgttgataacttatggatttaatttaacaggaggattagaaaatgaataa

SEQ ID NO: 419658 - DNA, 228 bp, Staphylococcus aureus
atgtttacgaaaaaatcagaattaaaacaacaatttttaaaacctaaaaccaaattgaaagaggagaggttaaaacgaggtctttctgctacttatttagctcaattaataggtattgatagaaggcaatatgaatctaaagaaaaagggttgttctcatttcatgactatgagataaaaattatttctgagttccttgatattgataaagaagtcttttttatctga

SEQ ID NO: 419659 - DNA, 138 bp, Staphylococcus aureus
gtgatcacgcatcaaaatgaggcaattgcgacgaataatgcagatcgattatattttctaaaacaacatacattagtgactgaacttaaatatgatgaaattgaaaatgtttatcgtataaaagggtttaaaaaataa

SEQ ID NO: 419660 - DNA, 1377 bp, Staphylococcus aureus
gtgaatacatcctattcacaatcgaatttacgacacaaccaaattttaatttggctttgcattttatctttttttagcgtattaaatgaaatggttttgaacgtctcattacctgatattgcaaatgattttaataaaccacctgcgagtacaaactgggtgaacacagcctttatgttaaccttttccattggaacagctgtatatggaaagctatctgatcaattaggcatcaaaaggttactcctatttggaattataataaattgtttcgggtcggtaattgggtttgttggccattctttcttttccttacttattatggctcgttttattcaaggggctggtgcagctgcatttccagcactcgtaatggttgtagttgcgcgctatattccaaaggaaaataggggtaaagcatttggtcttattggatcgatagtagccatgggagaaggagtcggtccagcgattggtggaatgatagcccattatattcattggtcctatcttctactcattcctatgataacaattatcactgttccgtttcttatgaaattattaaagaaagaagtaaggataaaaggtcattttgatatcaaaggaattatactaatgtctgtaggcattgtattttttatgttgtttacaacatcatatagcatttcttttcttatcgttagcgtgctgtcattcctgatatttgtaaaacatatcaggaaagtaacagatccttttgttgatcccggattagggaaaaatataccttttatgattggagttctttgtgggggaattatatttggaacagtagcagggtttgtctctatggttccttatatgatgaaagatgttcaccagctaagtactgccgaaatcggaagtgtaattattttccctggaacaatgagtgtcattattttcggctacattggtgggatacttgttgatagaagaggtcctttatacgtgttaaacatcggagttacatttctttctgttagctttttaactgcttcctttcttttagaaacaacatcatggttcatgacaattataatcgtatttgttttaggtgggctttcgttcaccaaaacagttatatcaacaattgtttcaagtagcttgaaacagcaggaagctggtgctggaatgagtttgcttaactttaccagctttttatcagagggaacaggtattgcaattgtaggtggtttattatccatacccttacttgatcaaaggttgttacctatggaagttgatcagtcaacttatctgtatagtaatttgttattacttttttcaggaatcattgtcattagttggctggttaccttgaatgtatataaacattctcaaagggatttctaa

SEQ ID NO: 419661 - DNA, 354 bp, Staphylococcus aureus
atgggaaatgacaaagaaaatccgaagcaattaacattttatgagttacagagctacctagcactaaaatacaaagaaggacgcacttcatctgctttgtttatgaaactagtagaagaaattggcgaggtagcagaggtactaaaccagttagaagggcgaaaggcaaacacggggaatgcttctttagaaaaagagcttgttgatgttatccattacgctgttgccattgcaagcataaatcatattgatctaacaaaggccattattaagaaggataaacaagctgcaattaaatataatcaatctccaaatttagaagagtttttagaagaagaaattaaagtaaattaa

SEQ ID NO: 419662 - DNA, 888 bp, Staphylococcus aureus
gtgaagaaatcgttaattgcttttatattgatttttatgcttgtcctgagtggctgtggtatgaaagataatgataaacaaagtagcgatgataatggctcgtctaaatcgccgtaccatagaattgtttcgttaatgcctagtaatactgaaattttatatgaattaggattaggtaaatacatagttggtgtttcaacggttgatgattatccaaaagatgtgaaaaagggtaagaaacaatttgatgctttgaatctaaataaagaggaacttttaaaggcaaagccagatctaattcttgcgcatgagtcgcaaaaggcaactgctaataaagtattatcatcattagagaaacaaggcatcaaagtagtgtatgttaaagatgcacaatcaattgatgaaacttacaacacatttaagcaaattgggaaattaacgcatcatgataagcaggctgaacaacttgttgaggaaactaaagataatatcgataaagtcatagattcaattcctgctcatcataaaaaatcaaaagtatttattgaggtttcatcaaagcctgaaatatatacagcagggaagcatacatttttcaatgatatgttagaaaaattagaagcccaaaatgtttatagtgacattaatggttggaaccctgtaacgaaggaaagtattattaaaaagaacccagatatattaatttcgacagaagctaagacaagatcagattatatggatatcatcaaaaaaagaggtggattcaataaaattaatgctgtcaagaatacacgtattgaagttgtaaatggtgatgaagtatcaagaccaggtccacgtattgatgaaggattaaaagaattaagagatgcaatttatagaaaataa

SEQ ID NO: 419663 - DNA, 360 bp, Staphylococcus aureus
ttgaataaagtagagtttttagacacgtttctaagtctttatattaatcatcatgaagttcttaaagatatggaaaatgaaacaagtaaatatgtagttatcgatgttagaaatgcacctaaaagtgttaaaaaagataaaatcaagaattctgttgaaatacctgctaaagatttaaaaaatcatttatctagtttagacaaagataagatatatgtagtttatgattggactggtggaactattttaggtaaggcagctttattagaattttataaacatggatttgaagcgtatgaattatctggagctttagaaggttggaaaggtatgagtttacctttagaagatgtagaataa

SEQ ID NO: 419664 - DNA, 516 bp, Staphylococcus aureus
ttgaaggaattttatttaattgatagtccgtcttttgaaaagttgaaggatttaaaagatgaatataataatttagacattacatcagtcttgttttatttagaaattcataaagcttataaaaaaatgaagttaaatcatgatacgttattacagaaattcgatttatctgaatctaaattcacaatcatgatgttattgtcttatgaaaaaaatatgacgttagctccatcaaaattatctgagaaaatagctagtaagaaatctactataacgggagttttaaaaggtttagaaaaaaatgggttagttaaaagagtagctttatctaatgataagagaacaaattatgttcaattaactgatcttggtttgatgaaattaaaagaatttttaccttataactatgaagttgtttcaaaagttttcggagtttttaatgaagaagaaaaagaagaattttatagattagcaaataaacttaaaaataatttagaaaaggatcatctattttga

SEQ ID NO: 419665 - DNA, 366 bp, Staphylococcus aureus
atgaaaaagacacttttaatgtgcattaccctctttatggctttcattttggttgcatgtggtaaaccgagtgagaaattagaaggcgattggatatctaccaatcctgaaacagcaaaggtatttggtaaagaatttagttttaaagatcatacatttaaatcaaaagatgatggcgtatttattaaatattataaattcatggatgataatgaaaaaaatattaatttctatgatgaaaaacctagcgaagacaactttgatgaagattcaccatcagaagaaggtgtattaaaaattgatggggacaaagcgtctatcacaactgaattaaacggtgaaatgacttttgaaagaaaaaactaa

SEQ ID NO: 419666 - DNA, 1002 bp, Staphylococcus aureus
atgcaaaatcaatattttacagttcaagaaaattacaaagaaagattttatcaaatccctaaagtattctttactagtgataattataaagatctaactaatgatatgaaaatagcctatgctattttacgtgatcgcttaaatttatctattaaaaataactgggttgatgaagatggtaacatttactttatttattcaaatgaaaagctaatggaaatcttaaattgtagaaaagaaaaattaacaaaaataaaaagagcgttagaaaatgctggtctactcattcaaaagcgacgtggtttaaataaaccaaatattctatatttaatgaaacctgttgttacagaatgtgatatttacaaaatagaaaaagaagaaaatgacgttgaaacttacggcgagaaggaagttcgaaaatcgaacgtccagaagaccgataatcgaacgcccggaagttcgattttcgaacgtccagaagttcgaaaatcgaacactaatgatactgactttagtgatactgactttagtgatactgactttagtgaaatgaatggaatgagtggtaataatatagatagtatacctgaaataaatgaccattcactccattcaaaccatgaaaatgattattatttaattgatgaacaatctcttttattaaaccccttacctaaagacttacaagaattcattaaaagtagatatacattagctgatagcataagtattataaataaaattatgcaagctaaaagagaagcagctaatagacgtggtgatggtttattctttatgttcgaagaaaaccccttcttatctgaaaaaattattgatatcttaataactgtcaatcgagaaatgaagaagaaacgagaatcagttcaagcactgttaggctattactataattcattagtgaatggtttagaagaatatcattttacagaacaagcaagaaaaacagtacaaaataaagaaaatccatttctagataactaa

SEQ ID NO: 419667 - DNA, 792 bp, Staphylococcus aureus
atgtcagttataactattggtaatttcaaagggggagtaggtaaaactactgtatcaactttattatcatatattgcttctgagaggtatgacaaaaaggttttattagtcgattttgatccccaaggtaatgctactcaaattatgaaaagaacatatccagaagctatagatgagaaacaaacatttatagatgcccttaaaaatggtgagttagaggatagtattataaacttatcaactaaattatcattaatacctgcagattcttcactggctaatttgtcagatattattgcaaaaacagatattgttaaaaagcgatatattcttaaatcagttattgatcaaattaaaaaggattatgattttgactatatatttattgatgtaccaccaacaataaattcagacttcacaaataatgctgtgtatgcaagtgactatattgccatggtatttcaaactcaacaatcagcttatgagagtagtttgtcttttgttaactttttacgagatagaaaaaaggaatcaaatttgccgtttgaattaataggtgcaatcccagtattaattaagaaaaacggtaatattgatgaacagatactagaaatatctaaaaaaactttttcaaatgctttatttaaaaatcaaatatttcaaagagaaagaattaagaaattcggtgcagaaggtattagagataaagatacgcatgataaaagagtattgcatatgttagaagcgatatataaagaactagttgaaagaatagaattaatagaaggatag

SEQ ID NO: 419668 - DNA, 243 bp, Staphylococcus aureus
atgtcaggatttttagatgatataaaagttgaagaacaaaagaaaaaagggtttttagacgatatagatacttcggcagtgaagtacacagaaaattataaaccagttgctaaaagttcgactatgagagtagatactctgataaaaaaaagacttaaccaaatggcattagataaagacacttccataaaagcaatatcagataaagttttaaatgagtttttagagaaaaatggttattaa

SEQ ID NO: 419669 - DNA, 1473 bp, Staphylococcus aureus; identical to SEQ ID NO: 417027

SEQ ID NO: 419670 - DNA, 219 bp, Staphylococcus aureus
ttgttaaaattatactataaattcaactttgcaacagaaccggcatatgcttataataaattttattataataagaatccttacaatgaagtgagaagtcaaaatgttaaaggttctgctttgtcattttggggtgaacatgcaactgatatgactcaagaagcattgattaatcaagaagtacctttgattaaaggatatttaaatataaaaaaataa

SEQ ID NO: 419671 - DNA, 168 bp, Staphylococcus aureus
atggttatgaacaacaggaaaggctattatgaagatatcagtgatgatttgttgtatgtttcacaatctattagccaaaaaatctcatctgaagattttaatttatcagatgagaaagagattattaaagacattctagaaaagttggaatcccaatcctcagaataa

SEQ ID NO: 419672 - DNA, 573 bp, Staphylococcus aureus
gtgaataatacatctgagaaactcatccatataagtatgagaagcttttctgaaatgggctattatggaacatcactaaataatattgccaatgaactaggaataaaaaaggcaagtttatataactatttcaatagtaaagatgaattgtatgaacaatgtattgaaagatgtatgaataaaggtatgaaattaatcgaaagtatagatacacaagctcataatgctcatgaagaactcctaaagttttttcaagaatatatatatgattcatcgtgtttagtaaaattctacattcaattatcatttgcaccatctaactttacagagatgattttagagcacaataaaaaacttgcaatcgtgtttaacagtaaattagtagatatccataaaaataatgaattcaatgttaatcgcgatgattttattttatttattaatatgtttgtatacggatggctttatagaagatcatttatacaaaataacgtaacacctgacaagattataaaagaatttgatcaacatattaagatattaacgaatcagtcaaacgctgataattcataa

SEQ ID NO: 419673 - DNA, 1233 bp, Staphylococcus aureus
atggaaattttattaatgttttttatcgtttatccaatagctatgtcaattttttggataatcggaactttgatttactatgtttttattgaaagaaagttgaaagctaagcatattaactatcaaccgcaagaagggatttcatttattatcgcttgttacaacgaagcgagtaccattgcagacacgattaagaatttaaatgaactctcatatccgatcaaagaaattattgctgttaatgatgggagttcagatcatactaaggcagaattattaagacttaaacaaatgtacaaaattaagtttattaatttagaggaaaataggggtaaagcaaatgcgttaaatgttgcagctcaatatgctcaatatccatatttgatgtgtgtggatgcagatacgattatcgacgatgatgcaccgtattatatggtggaaagtttggttgatgatccaacaatcggagcagtaacagggaacccacgtattagaaataaatctactttactagggaaaattcaaacaatcgaatatgcaagcatgataggcagtataaagagagcacaaacgattaacggatttgttaatacgatatctggtgtgtttacattatttaataaaaaagcactagagaagaatcaatattgggatacggacatgattactgaagatattgccgtgtcatggaagtttcatttatcaggatacaaaataaaatatgaaccgagagcgttatgttggatgcttgttcctgaaacatttaaggggttatggaaacaaagggtaagatggtcccaaggtggacatgaagtgattttaagagattttaagaacatgtttaaagtaagaaacgtttcattatggttgttatttattgaacaaattctttctgtaatatgggtatatggcatagttgttatcttatgttacacactacttcgattaaacttcttggattactacttctataattatcaattaaatatctttttaatatcagcattcttactgacgtttattaacattattcaatttactatttctttattgattgacagtagatatgaaagaaaaaacaatttatttctcatatttttaagttggtacccaactttctattggttaatcaatgcgattgtcgtcattgttgcatttccaaaagcacttaaaagaaaaaaaggagcgtttgctacatggacaagtccagacagagggaacataaaagagtag

SEQ ID NO: 419674 - DNA, 318 bp, Staphylococcus aureus
atggacaagtccagacagagggaacataaaagagtagaatcaaatttaaatatttttagagagtcaatcgtatttatagcatcatcaatattatggctatattgcacaacagtattatttgtaatggtaggttcgttattaccaatagacaatcattttatacaaattgtaagagtaatattgaatcttgagaaaggtgatattgtctcgatttttaattattttgtgattgggtcagtcatcattgcagtatatctgatgattacgtttctattcaacgttagaagaaagagagctgtaccacatgagaattattaa

SEQ ID NO: 419675 - DNA, 867 bp, Staphylococcus aureus
atgagaattattaagataagccttaagtggtcgatgatgatagctttgatattattcatgttcatttctagtgatcaatcagcacttgctaagaaacaaaaaacactaggtggcgagaaaaatggatgtcttgcattaaactatcaccgcgtacgagaagacacatggatagataaattgctatcagcattctcgaatagtaaagaattaaaaatttatagtgtcactgacacacaattcgaatctcatattaaatggttaaaagaaaagaatgctcaatttttatctttagatgaattcattcattacaaagaaaaaggtaagttccctaaaaattgtgtgtggttaaattttgatgatatggatcaaagtatttatgaaaatgcctttccaattatgaaaaaatacgatgtccaaggaactgggtttgtaataacggatcatgtgggtgaccctgattttcataatattcgtatgtcgcctaaaaaagaattactcgaaatgaagaatagtggtctatggtattttgcttcgcatacacatgatatgcatacaatgaaaaaagaaaaatcaaaattagtatcatatgctgaaaaggggaacattaaacaggatatcgataaaagtacgaactatattaaagatgaactagatggaaatgaacaagcgatcgcatatccatacggtcaagcaagcgataaattaattaaacaacttgatcaagatacatcaatcaagtatggatttacattggaagaaaaagcagttgttccagatagtgataatttttacattccaagagttatggtaagtgatgatgcttttaacaagcttgttaagaaatgggaaggatttaatcatgagtaa

SEQ ID NO: 419676 - DNA, 1041 bp, Staphylococcus aureus
atgagtaaaggaagatatattgaatttatatatttaagaacatttttatgtttattaattgtactaacacatgtttttaccgagtttacaaacacaaatgaacctgataatttgcaattacaagtcttatattggatcagaatgatcttaattattgggacaccttcatttattatattgtctcaactattaacgacactaaattataatgataaattaaaaacaggctatttaagaacaagattaaaatatatattattaccttatttaattatgggtgcattctatagctattctgaatcacttaaattaaatgattcattcttaacgcaatatacagaaaatgttattcaaggtaattggtatggctattttattgtaatcattattcagttcttcttgctaaattggatcatctatcggataaacgctaaaatacttttttcaaaatggagtcttgtcatttcgttcataattaatacattctatttgtatagctaccaaaatgttgaacctgttagagaatttataagtcattattatccatttagtcctgaaacatttataattggttggttattttattactttttaggttcttacgtaggtcataattatcaagctattaaagctttcgtatcgaaatacatcgctttaatcgtatttttagctatcgctgcatacatagcttttgtatttgtaggagaacatgattattggatggttagtagtatggactatcgtattttattatatatcacttttgcatttttaattttaattaactttagcacacagtttgatgaatttatgtttagttctgttgaattgattagtagatattcatttttcgtttatttattacatccgattatcttggaatatatgttccaatatacaagtatatttgaagaacaaacattcatctttattccaatatcattactgtttattgtgggatgttgtctcgggattggaattttattaagagaatttcaaatttttaaattcgtaatgggcagacaaccttacaacaaataa

SEQ ID NO: 419677 - DNA, 333 bp, Staphylococcus aureus
atgtgtataagagacagagctattggtgtagctgcgtcgtcaattggagtatacgagggttctgctaaagctagtacagataaacaaatcactgcaaatgaatattatgatcaaaagttagctaaagaattaaaagatttacttaatgaacttaatgtaaatgttttagctgcaagcagcttagatccatattataaaagaaatgtacagatgtatggtttcaaagcaaaaatggtagtaaagtctaagaattattcaaaaatgtcgatagcgaaagaagagcttgaaaatatttatcgtgaaatagatgaagctctagctaattattactaa

SEQ ID NO: 419678 - DNA, 711 bp, Staphylococcus aureus
atgctaaaacgttcacaaagagctgatagtaattttatcgaaagtttagagaagaaaaacaaattgagaaaaaatattcataaagattccattaaaagtatatctaagttgattgatcatgaattagttaaaaataatagaaagtgggacgtagcagaattttataaaaatcaacaattttggaataatagtacattaagacgtagctctcaaaattttggaattttatattacaaaaagaataggttacatacaatgaatcaaagtaatattattaagaaaataaaaattatcgaagctaatatagagagtgcaaataaacagccgagctatttagatttctttttacaagctaagtttgatttagagaggttagaaagtgaattaatgaaatatagcattaatccgaaatattttaataagataaatagtgattacgtaagatatgctattgaagatgtacataatgcaattattaaaattgacagatatataagtaacgataaagtgaagttaaactattcaaatgtccaaatggtagtgagaaacgaaataacagaacaaggaagctactttgtaacccaggcattgaatacactgtcaaaggtagaagagtctggctacagctttgataatttcatggtaggacctttcgtagaagactttaaaaaagcaattaaaaatcgtagatttggttctaaaaaagattaa

SEQ ID NO: 419679 - DNA, 1101 bp, Staphylococcus aureus
atggagacaagagacaaactgatgtcattgactcaaagtgacaaaacacagcaatggctaatggacaagtcatctaaccaagatgacattcaacaattgcagcaacaattcagtcagcagcttgatcaacaatataatgcacttttagctgatgaaaaagctaagttagaccaatacgtggaagtacatcaaggattggaatcattaaaggaagagattgaatcagaacctattacgcttaatatcgataaattacccgatatcaaagcaacaatgcttgaaagagccaagaatgatgaacattctgataaaatcgaaaagctatttgataggttagaacaggcattaaatggtacgaatcgattatatacgcaattatcgttgattggtacacgaacacatcgaattacaactaaaaattttaatcttcaaggcttacctaaagcagtccaacatacgattttaccttcaaaatttaagaaggtgtatacagtcgattttaaatcgtttgaaccatcagttgcagcgtacatgactcaagattcaaaactgattgacttgttaaatcagaaagacggactgtatgacgcattgctaagtgaattaggcttatcagatgagctacgtgtatttgttaaacgtgcatttattggttcgtttctatttggaggtaacttcaaaaatcctaaattcaagctgaatcaatatgtaagtgaagtacaatggttggatgcggtcagccaatttacaaaagtcattgaacttaagaagcacgttgaaaagagtaattccatgcctatgccttatagtattgagcatgatatgagcgcatttcaaggtagcagtattatggcaatctacgtacaaactgtagcgagttatattttcaagcacattctgctaaaagtgtacaaagcacagtgcgatcaaaaaacgttcaagattatagtacctatacacgatgcgattatgattgaatgtgaagatgaagaaattgcacaaaatgtgggtcagttaatgaaagatacggctaaccagttgttcaatggtgaatttgcacatgtgacagtggaagaaataggaggcgtagaccatgaataa

SEQ ID NO: 419680 - DNA, 372 bp, Staphylococcus aureus
atgaataatgatagaggacaaagcctacacatcccaagtagtacaccaatcaaagaaaataatatatatgtagctacgttacattctgtgatccaaacagatttctcaggtgaaataaagcaccaattcacgtatgaaattgaagtgaacaatcagattgtatatgcgaatcgtaatattccaacaaaaccgagcgctaatcagttgtcaattcatgattggctgaaacgtcatagcaactatagcgcaagtcatgaaaactatgagccttatattgatcagaaacatttaattctattaggtcaatataacggtaactattatgtacaagatgtagcatcgttagatgcgtttggaggcgtattatcatga

SEQ ID NO: 419681 - DNA, 1617 bp, Staphylococcus aureus
atgaatcatattttagaaatgttaataaaattattaaaagtgggtatggaggcaatcgaccgtaaaggtctgattgccatcctaacaagtagtattggaaatgatgaaatggatgattctgaacaagctgtaatggtgtataacgagcttatcgataagctacagcttaacattcctaaagatgtcgactatagacctaacatatacagttattttggtattcaaaaaaagccaaatgacacaatattagtggaaatgatgatatgtatttttcatatcaagcgttttgattcagagttgtttgttttcaaagataaaggttggcaaaaggtaagtgaagatgaattgcaagggttgatatctaaaatgatacaagtgttgctagttgattataaaccttcactaagtactttgaaaaacgtagtagatggcatacagaaatcaacggacatagaaaaacttgttgagcatagacagtacattggttgtggacgaaatatgttcaatctaaagacctttaaagtggttgataatgaccttgaaatattccctaaaacacgcttagatttggaattagatataaatgacacgattacggacaagatacccccgaatttcaaacaatatatgttagagttggcgaattatgaccatgatttacaatatttccttttccaacatatggcagtgttattgacggcagatactaaactacgtcgtggactttttttgtatggaactgcaaaaaatgggaaatcggtctatattaaattagttaagtcattcttttatagtaatgatatcgtatctaaaacacttaatgaacttggcgggcgtttcgataaggaaagtctaattggtaaacgaattatggcaagtgatgaagtggggaaagctaatattgatgaagcaactgtgaatgatttcaaaaaattactatctgttgaaccaattcatgctgaccgtaaaggaagaacgcaagtagaagttactttagatttaaaactcatttttaatacgaatgctgtactcaattttccatcatcacatgcaaaagcattagagcgtagaattgctgttattccatgtgaatattatgttgaaaaagctgaccctgacttaattgaaaagttacaggatgaaaagaaagaaatctttctttacttgatgtatgtgtataagcaaattgtaaaaaatgatatcgagtacctccaaaatgatcgtgttactgaaatttctcatgattggttaaattttggatatgaatttgtttctagtaaatcagcaaatattgcacatcagaaagcgtgtattaatttactcagaaaacttatagaaatcaaaccagggtcacgtatcaaagtgtctaggctaaatgaggttattagagatgaaattaaagtaagctctcaagttattaatgatttggttcaagctaactttaatgtacaaagtagactaaataatggttataagtattgggtcgatttaggatggaaagaaactgataaaaaagatgacatgatttcattcgataaaaatgagaatgtaacagatgatgaattcttatacgaagatgatttgaacttaggttgggaggactttgacgatgaataa

SEQ ID NO: 419682 - DNA, 369 bp, Staphylococcus aureus
atgaataatgatagaggaaaaagtcttcaaattccccaaagtacattgttaaaagaaggatctatatacgttgctacgttacattctgtgtacgagaagaacttctcaggtgatattaaacatcagtttacgtatgaagtagaacttaaccaagaaacgcactatgtaaatcgcaatattaccgtaaaatctatgagtcaccaattatcaattgctgattggattaaacgtcacagtaactataacgtaaaccacattaattatgatccatacattgatcgaaaacatttggtccttgtagggcaatataacggaaattattatattcaagatgtagcaccattagatgaatttggaggggtattgtaa

SEQ ID NO: 419683 - DNA, 582 bp, Staphylococcus aureus
atgatttcgttaaataaccgattaacgacggtaagtcgatttttaaaacaaggtacaatcgcggatattggctcagatcatgcttatttgccaatctatgcaattcaaaaccatttatgcgattgcggtattgcaggagaagttattcaaggtccttttcaagctgctgtgaaaaatgtagctgcaaatcaattagtagatagaattgatgtacgtttaggggatggcttaagtgttattcatcctgaggatgtaatcgataatatcacaatttgtggtatgggcggaccacttattgctaaaattttaaaagatgggcaagataagttaagtcaacatccaaggttgattttacaaagtaatatccaaactgaaaatttaagacaaacattacaacaattgaattatgaaataattgatgaaataataatggaagaaaaaggccatatttatgaaattgttgtagcgcaaagagagttagaagcactttatcatattaaatcgaaactcaatactgaacaacatcatcaacgtttagctcaaattaatgacgaaattgctgtaattgaaagggtgttatag

SEQ ID NO: 419684 - DNA, 507 bp, Staphylococcus aureus
atggaaacaatcaaaagtacattaaaaacagaagccatattcagtgatgacaaacaacatcgctatctacttaagaaaacatggaatagtgaaaaacaatcaatcacaatcattacaatgtatccgcattatgatggcattctcaatattgacctaacgacccaactcatcatgaacaaagtttcagaaatggatgcatttggttcaatcaattttgtgaatctatactctaatattacaacccctatcaatctcaaacatttagaaaatgcgtatgataagcatacagatattcaaattatgaaggcagtgaaagagtcagatgaagtgatattagcttggggcgcttacgctaaaaagcccggtgttgaagcacgtgttaatgaagtattagagatgttgaaaccacataaaaagaaagtaaaacgactcatgaatccagaaaccaatgaaatcatgcatccccttaattcgaaagcacgtcaaaaatggatattaaaagtatag

SEQ ID NO: 419685 - DNA, 312 bp, Staphylococcus aureus
atgaatagatatatcacccggggtatcgccaacaacttacctaatatcttacaacaccaattatggcaactcgtatctgagcgagaacaagaacaaaccaaagataatacttcagtagattattttcatatattccagttcaataagcatcgcaatcaattatatatcaaacacaaacaagaacgacctgaatatgcgaaaatccataaagctaattattcaaaagcaatcaatatcaataaggtctacattattcgagaagatgatgtagacctttcttattatgtcatgttattacctgaagaatactag

SEQ ID NO: 419686 - DNA, 1068 bp, Staphylococcus aureus
atgtcacaatataaaacgaaacacattaatgatttcactaaaaaggaattagaagaattgggttctaaggatcaattaattgacgttcgacagcctgaagaatttgaattaggacacattaaaaatgctttattacattcagttgaaaatatagagacttttaaacaaagcaaaaataaaacttactatatctattgtaaaagtggtaatagaagtagaaaagccagtcaatttcttgcacaacgcggatacgatgtggtgaatttagacggaggttataccgcatacgaagaacaacatcataatgataatttatctaaagtaaaagaagatagagaaattaaagataatcgtaagacattcaattatagtaatctacagtgtccaggacctattgttaatattagtaaagaaatcaaaaacatcgctattggtgatcaaatagaagttgttgtgactgatcacggatttttaaatgatattaaaagttgggtcaaacaaactggacatacgcttgttagactcaacgattttggtaatgaaattcacgctattattcaaaaagaagaaaataaaaatatagaagtgacacacacgaaaagtggaacaacaattgttttatttagcggcgagctagataaagcagttgcagcaatgattattgctaatggtgctaaagctgcaggtagagatgtaaccatcttttgcacattttggggcttaaatgcacttaaaaaaattcaaagtcaacgcattaagaaaaaaggtattgcaaaactttttgacttcatgcttccaaattcaccaattaacatgcctatttctaaaatgaatatgtttggtttaggcaatctaatgatgcgttatgtcatgaaaaagaaaaatgtcgatactttaccttctcttattgatcaagcagttgagcaaggtgttaaacttatcgcttgtacaatgagtatggatgtgatgggcattacaaaagaagaactacgcgatgatgtagaatacggtggcgtaggtgcatatattggatatacagaacaagctaatcacaatttatttatataa

SEQ ID NO: 419687 - DNA, 867 bp, Staphylococcus aureus
atgtctcataatgaaaatcttaaattggcgcaacgcggtgcttatttgagtttaattgtatatataatcttatctattgttaagtatgtcacgggttttgtctttaactctgcagctgtaagagccgacgcattaaacaatatgacagatattatcgtttctttagctgttattattggattgaaaatttcaattaaacctgccgatcgaaatcatccttatggccatttgaagtctgaaaatatttcttcattattggtgtcatttgtcattatgtttgtaggtatccaagtagttattcaaaatgcacctcgtttgttcaaagaagatgacgttgtacctaacgcaataacaattatcgtcagcttaatcagtggccttgtaatgttgattgtatttgcagtcaatcaaagactagcgaaaagaacgaaaagtagttctttaaattctgctgccaaagataatttatcagatagtttagtcagcattggaacggcgataggattaatttttacgcaaatcggtttcccaattgtcgatattattttagcaacattgctaggcttactaatcgtttatactggttttggtatttttaaagaagcaatttttatgttgagtgatggtttcaatgaaactgaattagaagcgtatcgcaatgatattttagaagttgatgaagtacaagaagttaaaagtattaaagggcgttaccatggaagtagtgtgtttattgatgtcacaattgttgtagatgctaacctttccttagtagaagcgcatcaaatttgtgataatgtcgaacatcatttgcacaaaaaaggtatttcctcagtatacgttcacccagaaccagaccatctataa

SEQ ID NO: 419688 - DNA, 168 bp, Staphylococcus aureus; identical to SEQ ID NO: 408612

SEQ ID NO: 419689 - DNA, 306 bp, Staphylococcus aureus
ttgtcagcttttgctgcaggtttttcctcttttgcttccttaggggctttaacttcttttgtttcagtagtaggggccacaacttctttattagctactgagacagcattagctactggtttagcttctggagctttttcagttgttgttgttgttggacttgcaactgcttcagtttttggttgtgcttctgtatttgtaccacctgtttcttcagctgcttttgcttcgccatttgacattaataataaaagtgtactaatcgctacagatgcaacgcctagtgatgactttctaattgaataa

SEQ ID NO: 419690 - DNA, 1146 bp, Staphylococcus aureus
atgtttcaattacttgcagtttgtccgatgggattagaagctgttgttgctagagaaattcaagaattaggctatgaaacaaatgttgaaaatggtcgtatattttttgaaggagacgcaagtgcaattgtaaaagcaaatttatggttgcgcacagcagaccgaatcaaaattgttgttggacgttttaacgcaacaacgtttgacgaattattcgaacaaaccaaagcgctcccttgggaatctattattgataaagaaggtaacttcccagttcaaggtagaagcgttaaatcaacactacatagtgtgccagattgtcaggcgataactaagaaagctattgttgaacgattacgtcgcgcatataacgaaaaaggttggttaaatgaatcaggtgccaaataccctgttgaagttgccattttaaaagataatgtattattgactatcgacacatcaggttctggtttgaacagacgtggttatagattagcacaaggtgaagcaccaattaaagaaacgttggcagcaagtttaatccgtcttgcaaactggaaaggtgatacacctttaattgatccattttgcggttcgggtacaatagctatagaagcttgtttaattgctcaaaatatcgcacctggttttaatcgcgagttcgtatcagagcaatggaacatcatgccagcaaatatttatgatgattaccgtgatgaagccgataagatggctgattatgataaagaaatcaaagtatatgcttctgatatcgatccagaaatggtagagattgctaagcgtaacgctgaagaagttgggttgtctgatattattaaatttagtgtaaaagatgtcaatacattaacaattgatacagaagaaccagtggcgttaattggaaatcctccatatggtgaacgtattggtgatcgtgaagaagttgaagaaatgtaccgttatattggtaaactaatgaaacaacatccatttttatctacatacattttaacaagtaataaagaatttgaatatttagtaaatcgtaaagcaacgaagcgacgtaagttatttaatggatatatagaatgtacttattatcaatactggggtaaaaagacagaacgtaaaactattgaaaactaa

SEQ ID NO: 419691 - DNA, 615 bp, Staphylococcus aureus
ttgaaagaaccaaaagaatatcgaaaagagtgggcaacttggaatttgtcctctttaccaattctgccaaactactatgagtataaggtgtcttacgataagagagagcagttcaactttattaaacagctattcaatgactctagcattagaacaattgtaaacgggtgtgattcggaccgcgaggggtccaatattttttattcatcctactacatgactggagcaaaaaataaggaaattaaacgattatggattaattcactagaggttgatgaaataaggaaaggattcaataatcttcaagataacaaaaaagacttattactttattacgaagcaaagacacgtcaaataagtgattggcttgttggaatgaacggaagccggttatttaccctcctcttacaacaaaaggggtttaatgacagtctctcgattggacgggtacagtcttccacagtataccttatttatcaacgtcaaaaagaaatagaacaatttgtttctacacctttctatgaaattgaaggaagctttaccgccaaaaatggcatgtataaaggaaaagcaaaaattaaaagtgaaactctaaaattgcagctgatgctctaa

SEQ ID NO: 419692 - DNA, 201 bp, Staphylococcus aureus
atggagaacatcgtttcactttgtagtcattgtcataatttacttcattatggtaaattcgaagataaaaaacctattcttgaaaaactatttaatgaaagaaaaaaagcgttaagtgctgttggcttagatattacattagaaaaattagaagcttctgttttttccatgattcaagcatctttttgttatccaagttaa

SEQ ID NO: 419693 - DNA, 1290 bp, Staphylococcus aureus
atggttttaaatgtttctttacctgatattgcaaatcattttaatactactcctggaattacaaactgggtaaacactgcatatatgttaactttttcgataggaacagcagtatatggaaaattatctgattatataaatataaaaaaattgttaattattggtattagtttgagctgtcttggttcattgattgcttttattggtcacaatcacttttttattttgatttttggtaggttagtacaaggagtaggatctgctgcattcccttcactgattatggtggttgtagctagaaatattacaagaaaaaaacaaggcaaagcctttggttttataggatcaattgtagctttaggtgaagggttaggtccttcaatagggggaataatagcacattatattcattggtcttacctacttatacttcctatgattacaatagtaactataccttttcttattaaagtaatggtacctggtaaatcaacaaaaaatacattagatatcgtaggtattgttttaatgtctataagtattatatgttttatgttatttacgacaaattataattggacttttttaatactcttcacaatcttttttgtgatttttattaaacatatttcaagagtttctaacccttttattaatcctaaactagggaaaaacattccgtttatgcttggtttgttttctggtgggctaatattttctatagtagctggttttatatcaatggtgccttatatgatgaaaactatttatcatgtaaatgtagcgacaataggtaatagtgttatttttcctggaaccatgagtgttattgtttttggttattttggtggttttttagtggatagaaaaggatcattatttgtttttattttaggatcattgtctatctctataagttttttaactattgcattttttgttgagtttagtatgtggttgactacttttatgtttatatttgttatgggcggattatcttttactaaaacagttatatcaaaaatagtatcaagtagtctttctgaagaagaagttgcttctggaatgagtttgctaaatttcacaagttttttatcagagggaacaggtatagcaattgtaggaggtttattgtcactacaattgattaatcgtaaactagttctggaatttataaattattcttctggagtgtatagtaatattcttgtagccatggctatccttattattttatgttgtcttttgacgattattgtatttaaacgttctgaaaagcagtttgaatag

SEQ ID NO: 419694 - DNA, 339 bp, Staphylococcus aureus
atgacgctaagcaaacaacttaaaacgtatatcactgaacgatttaaattaaattatcaagaaacttgggcttgtgaaaccatagatgcggtggctgaagatgtattacctgaaaaatatattaaaaatagtccacttgaacataaaattttaaatacttttacctattacaatgatgaattacatgaaatcagcatttacccttttttatgttatctagataaggaattagtagcaataggttatttagataattttgatttagactttatatttttaaatgacactcatcaagttattattgatgaacgctacttgttacaaaaagggggccagtaa

SEQ ID NO: 419695 - DNA, 210 bp, Staphylococcus aureus
atgatgaacatttttgataaatactacgatactcataatctagaaaaaataagtccatatagcactttttcaaaaaaacaattagtgattgaagctgattatatgcatagatctctttttgaaattttaaagtatcttgatgaaggtggagaagatttaaattatattcgtagtaaagttatggacggaatatacgaaagtagaatataa

SEQ ID NO: 419696 - DNA, 657 bp, Staphylococcus aureus
atgacaagagaaaaatctaggtatttcacattcctactttatcctgatggtgaaggctttcctcatgattgggaagaaagattagaaaaaattggagtgccaatagcagtaagtccacttcatgataaggataaaaataaaaatagaacattaaaaaaacagcattatcatggaatttatattgcgaataatccagttactgctgagtcggtacgtaataagttaaaagctgtattgagttcagataagattgaatgtaaagcagttgcgaaagttcaaattgtttatgaatcagttgaaagtacttatctttatttaactcatgaaagtaaagatgcaattagaaaaaataaatatgtttatgataaagctgaaattaaacatataaataattttgatattgatcgttatataacgattgacgttgaaactaaaaatcaaactctaaaaatattactacaaattataagagcttattcaattccaaatgttcttgatttacatgattttattgagaagaacggtgaaggttatggaatagatatgaatttatttctgacgaccattgaaagcaaatcaagcattttgcgattatattttgatggggcttatcaacgttctaaacgaagtatagttcaagagaatagaaaggattga

SEQ ID NO: 419697 - DNA, 225 bp, Staphylococcus aureus
ttgagacatgacatttatgaaggagtgctattttacattatgaaaggtattaaaccaaattatgctgagcttggtcgacaatataattgtgatccaagaacagttaaaaaatattatgaagcaggaaaagaaaatgaattagaacgattgaagaagagacaacaaaataagaaagcatcaaaactagatccatttaaagaaattattaataaaaaattgaattag

SEQ ID NO: 419698 - DNA, 444 bp, Staphylococcus aureus
atgaagtctataaaaaggattggattgtgcataagtctgttgattttaagcatttttgtaacatcttgcgatggtgataataagatcactggagattcaaaagaaacacaaatcaaaaagagctttgcgaaaacattagaaatgtatccaatcaaaaacctcgaagatttatacgacaaagaaggatatcgagacggagaatttaaaaaaggtgataaagggacttgggttattagatctgaaatgaaaatccaattaaaaggagaaaatctggaatttaggggagtagttttagaaattaacagaaatactagaacggctaaagggaattatattgttagagaagttgttgaagatagcgatggaatgacacacaatcatacaaaaatgtatcctgtaaaaatggaaaataataaaaatcattccattaaaacaaatcgttga

SEQ ID NO: 419699 - DNA, 348 bp, Staphylococcus aureus
ttgataccaatattccaaattgacacagcttgtactgaagtaattattaataaagacgctaacttgctatctttagaaactttaaatgccgcaatcatacctagcaagattggtacaactgcccctgctctagctgttgcagaaggaacgaaaaatgcaagtacaattgaaacaatgattgctccaataactatatttctagttttattaccaacaattgataacactaaaagagctagtcttttatgcaaattcgtttcttgcatagcagcagccaaaaataatgcggctgcaacgagagctacagctgaagttgcaaatccactaaacgctaatgataatgcatga

SEQ ID NO: 419700 - DNA, 318 bp, Staphylococcus aureus
atgacaccaattttcggcattaacataacacctaaagcaataatagtaatggatgcagagtcaatcggatgtaatactttttcagttgaccaaaacagtaataataacatcgatataacaattaaacgccattcacgtgcgctaacggggccaagtttatgcaattcttcttttattaaatctttgccaccctctattgtattaatttctggaggcatcactttaatcatgatgaaatataaagctatagacataactatggaccaaggcgctgcatataagaaccactcgccccatgaaacatcaaatcctaattga

SEQ ID NO: 419701 - DNA, 930 bp, Staphylococcus aureus
ttgttagtcattttaatcgcaacggcttatatttcgtttgtaaccggtacaattaaattgtcatttaatgacctatttacaaaatttacaactggtagcaatgaagcagtggattcaattattgatttgcgattgccacgtatattaattgcattgatggttggcgcaatgttagcagtttctggagcattattacaagcagcactacaaaatcctttggcagaggcgaatatcattggcgtttcatcaggtgcacttataatgagagcactttgtatgttgtttattccacaattgtacttttacttaccattattaagttttattggaggtttaataccatttttaataattatattgttgcattctaaatttagattcaatgctgttagtatgatattagtaggtgttgcgttattcgtattattaaatggtgttttagaaattttaactcaaaaccctttaatgaaaattcctcaaggcttaacaatgaaaatatggagcgacgtatacatattagcagtatcagcattattgggattaatattaacattactattgtcccctaaattgaatttactaaatttagatgacgtacaagcgcgaagcatcggttttaatattgatcgttacagatggttaacaggtttattagctgtatttttagcaagtgcaactgttgcgattgttggacaactagcctttttaggtattattgtgccacatgtggttagaaagctagttgggggcaattacagagtacttattccgttttctacagttattggtgcatggctattgttagtggctgatttattaggacgagtgatacagcctcctttagaaattccagccaatgctattttaatgattgtcggtggtccaatgctaatttacttaatttgtcaaagtcaacgaaatcgaatctaa

SEQ ID NO: 419702 - DNA, 1116 bp, Staphylococcus aureus
atgaaaaaatggcaatttgttggtactacagctttaggtgcaacactattattaggtgcttgtggtggcggtaatggtggcagtggtaatagtgatttaaaaggggaagctaaaggtgatggctcatcaacagtagcaccaattgtggagaaattaaatgaaaaatgggctcaagatcactcggatgctaaaatctcagcaggacaagctggtacaggtgctggtttccaaaaattcattgcaggagatatcgacttcgctgatgctagtagaccaattaaagatgaagagaagcaaaaattacaaaataagaatatcaaatacaaagaattcaaaattgcgcaagatggtgtaacggttgctgtaaataaagaaaatgattttgtagatgaattagacaaacagcaattaaaagcaatttattctggaaaagctaaaacatggaaagatgttaatagtaaatggccagataaaaaaataaatgctgtatcaccaaactcaagtcatggtacttatgacttctttgaaaatgaagtaatgaataaagaagatattaaagcagaaaaaaatgctgatacaaatgctatcgtttcttctgtaacgaaaaacaaagagggaatcggatactttggatataacttctacgtacaaaataaagataaattaaaagaagttaaaatcaaagatgaaaatggtaaagcaacagagcctacgaaaaaaacaattcaagataactcttatgcattaagtagaccattattcatttatgtaaatgaaaaagcattaaaagataataaagtaatgtcagaatttatcaaattcgtcttagaagataaaggtaaagcagctgaagaagctggatatgtagcagcaccagagaaaacatacaaatcacaactagatgatttaaaagcatttattgataaaaatcaaaaatcagacgacaagaaatctgatgataaaaagtctgaaagacaaaaaataataagacgcaatttcaaatgtgtcttgaaacatgattttgatggtgaatcattatttagagtacaaagcttgatttatcgagacgctgattttgacattcagttagtctacaagcttatcaacttaaaatag

SEQ ID NO: 419703 - DNA, 231 bp, Staphylococcus aureus
gtgagtggagccctcgaagatttagatgaagaattggctgctttgctgatttacgaagaacataagcgtacgggatttataggattaacagaacatgcacaagtatttaaagaaattttaggtcataaagtgaatatcactacaccttctattgagaacttaatggtttatcttgaaaagagaaaacctaaataccatgaaaacatcaaattgatggaagaaggtttttaa

SEQ ID NO: 419704 - DNA, 576 bp, Staphylococcus aureus
atggtgtattctattcattttaaagagaaaaaagtacaacataatgatgcaaaagaagtgccttcaaaacatcaaaatcaagaaaataatcaagatcagcttaaaaaagatattgatgacaaaaaagatagtcaaaaatcagacattaaggaaagacgtactagcctttttactgaaaaaggattaaatgatattcctgtacaaaaagataaagtgcaacaagacagtgataaaaagattgaaaatgagcgacctaaagcatcaggtacattaaaagttgaaaatagccctccaacagtaaaaaaggttgaaaataatcacaaagagcaaccgaaacataaagatgaaaaatcaaaaaaggaaaagaaaaaagtagttgaaaaagaaaaagcgttaccagcttttaatagagatgatgatagcaagaatagtagtcaattatctagtgatattaaagaacttgatgaaccaaatcataaaaagcaatatatgttatttgcagctggcattgtgttagcaaccattttacttatttcggcacatttatacagcagaaagagaggtaaccaagtttga

SEQ ID NO: 419705 - DNA, 486 bp, Staphylococcus aureus
atgcattttttagaagatagtataaatatttgtttcttaggtaatagtggtgttggtaaaacgcacctagcaatctcattaggaatagaggcatgtaagcaaaatataaagactagattctatactttcaaagaattaatagacttattaactgtctcagattccaaaggaatcattaataaaacattaaaacaattaagcagaatagagttacttatcattgatgaaattggttatactcccatcaccaaagaacaagctgatttattctaccagttaatgtcactaaggtatgaatggaaatcaacaataattacgactaatattccattttcaagttggggagagtcatttagtaataagattgtatcagcagctataattgatcggttagttcaccattcaaaagtatttaaaattactggagaatcatatcgattaaaagattataaaaccgaaaaatcattaaatatacgacaatcttaa

SEQ ID NO: 419706 - DNA, 624 bp, Staphylococcus aureus
  misc_feature (534)..(543): n is a, c, g, or t
atgaaaagaagcgataggtactcaaactcaaatgaacattttgagcatatgaaacacgaacctcactataatacgtattatcaaccagttggcaaaccgccgaaaaagaaaaaaagcaaacgaatactattgaaaatattattaaccattctaatcattatcgcattgtttattggtatcatgtattttttatctacacgcgataatgtggatgaactaagaaaaattgaaaataaaagtagttttgtgtcagctgataacatgccagagtatgttaaaggtgcctttatttcaatggaagatgaacgattctacaatcatcatggattcgatttgaaaggtacaactagagctttattttcaacgattagcgacagagatgtgcaaggtggtagtaccattacacaacaagttgtcaaaaattatttttatgataatgatcgttcatttactagaaaagtaaaagaattatttgtagctcatcgagttgaaaaacaatataataagaacgaaattttaagcttttatttaaannnnnnnnnntcggcagcgtcagatgtgtataagagacagatcaatatacgcttgagggcgcagcaaaccattactttggaacaaccgtga

SEQ ID NO: 419707 - DNA, 210 bp, Staphylococcus aureus
gtgaataaaaatagtacaacaatgtctcacattacagttttacaaagtgctattttagctagtaaagtcaatgcacctagcgtatataatatcaataatatgtctgagaattttacgcaacgtgtaagcacgaacttagaaaaaatgaagcaacaaaattatatcaatgaaacacaatatcaacaggctatgtcacaattaaatcgttaa

SEQ ID NO: 419708 - DNA, 708 bp, Staphylococcus aureus
atgaactatcaaaatgcttcgtacctttcagcatttactgccggattaggcatttatttcattatgaaaggctcagttaaacataagtggatatatgttctatttacaataattgatatccctattgtgtttataccaggagggcgtggaggtgctattttattaattctttacggcttgtttgcatttatacttattacgtttaaaagaggaatacctatagcagtaaaaagcattatgtatatttttgcattaagcatatctagtgtattgatttactttctttttacaaaaggttcgaatactagaacattttcatatctacaaggtggaacacttaatttagaaggtacttctggaagaggaccgatttatgaaaaaggtatttactttattcaacaaagtccgttattaggctatggaccatttaactactataaactaatcggaaatataccacataacatcattattgagttgattctatcatttggcttattagggttttttatcataatgatttgcattttgtcactagtttataaaatgattaggaactatgatccaaacactatagatttactcgttatgtttatagcaatctatccaatcacattattaatgtttagttcaaattatttagttgtaagtgaattttggtttgtgttgttctattttattacaaaaggacggcgtcatcatggctaa

SEQ ID NO: 419709 - DNA, 192 bp, Staphylococcus aureus
atgatggaggaagaaaaaaattgtaaaaacgtcattagtcaattaagtgcttctaaaagttctattcaacggttaatgggtattatcattagtgaaaacttagtagaatgcgtcaaaatgtctgaagaaaatagtgaagattctcaggcactaattaatgaagcagttgaattattgataaaaagtaaatga

SEQ ID NO: 419710 - DNA, 732 bp, Staphylococcus aureus
atgttagttattggtatcttaggaggatttatttctggattagtcggtatagggggagcaattgttatttacccggctctcttattattaccaccattatttggtttacctacttatagtgcttatattgcttcaggattaacttcaagtcaggtgttttttagtacattgagtggatctttaaacgcatataaaaataaaaatttttctagaacgcttatacttaatatgggaagtggaatggtaataggtagtatgctaggtgcaatcttagcgaatttaataaatgttcagtttgttaatacggtttatattattattgcattactagctcttattctaatgtttataaaagttacaccatctactagtcatattaagtttaatcgtctacttttaattacaataggtggtatcatcggtttggtatctggtattgtaggagctggtggcgcatttattattattccagtactacttgttatatttaaattaccaatgaacatggttgttacaaatagtattgtaattgcattcatttcttctattggagcatttatgattaaattattacagggttatattcctattaatagtgcaataccgttaattttaggtagtatactatttacgcctctaggtatgaaaatgggtcagaaaatacctgactatattcaaaaaacgataatatgtattttaatcgtcattgcaattattaagttgatattttaa

SEQ ID NO: 419711 - DNA, 873 bp, Staphylococcus aureus
ttgattagactatttttgcttaagttatactgggcacacttttcgactaaacaaattcatcaatttttaatggcatatcctaatgtaattaaagaggggggcagaaaaaaagatagttatttatgtgaatgggtgaatagggaagaaaatgttcatttattacgtaaatactatgcttttataaaacttgatcataacgatattattaaagaactgcagaaattaaaagtaagttacattacatatatggatactgaatacccagtgctattaaaagaaatatatcaatttccattacttcttttctataaagggaacatcaaattaataaataatatgcatcatttggctgtagtaggtgcaagagattctacaagttatacccaacagtctttagaatttttattatcaaatgataaaagcaaatatttaacaattgtttccggccttgctcaaggagctgatgcaatggcacatcaaatagctttaaaatacaatctccctacaatagcagttttagcctttggccatcaaacacattatcccaaaagtacattagcattaagaaataaaatagaagaaaaaggtttagttatatccgaatatccaccacatacaccaattgctaaatatagatttcctgagcgcaatagaattatcagcggtttgtcaaaaggggttttaattactgaggctaaggaacaaagtggcagtcacatcacgatagattttgcattagagcaaaatagaaatgtttatgttttacctggatctatgtttaatcctatgacaaaaggtaatttattacgtatccaagaaggtgctaaggtagtattaaacgctaatgatatatttgaagactactatatttaa

SEQ ID NO: 419712 - DNA, 447 bp, Staphylococcus aureus
atgagtatagaaggacataaagaaaaaattattagtaaaaatactgccaaagatgaacgaacttctgaatttgaagtaagtaagctaaacggtaaaatagatgggaaaattgatgtttatatcgatgaaaaagtgaacggaaaacctttcaaatatgaccatcattacaatattacatataaatttaatggaccaactgatgtagcaggtgctaatgcaccaggtaaagatgataaaaattctgcttcaggtagtgacaaaggatctgatggagcgactactggtcaaagtgaatctaacagttcgaataaagacaaagtagaaaatccacaaacaaatgctggtacacctgcatatatatatgcaataccagttgcatccttagcattattaatcgcaatcacattgtttgttagaaaaaaatctaaaggcaatgtggaacaatga

SEQ ID NO: 419713 - DNA, 216 bp, Staphylococcus aureus; identical to SEQ ID NO: 408622

SEQ ID NO: 419714 - DNA, 573 bp, Staphylococcus aureus
atgaaagttaagaaattaaaaaaagaatatatgacgcttgcaaatgagaagaaggatgcaatatatcaattaaaaaaattcataggtttatgtaatcaatctatcaagtataacgaagacattttagattatacgaaacaatttgaaaaaaatagatacaaagttgaatcagaaattaaattagctgataataaaagtgaagcaactaatcttacgacaaaattagaacataataataaagcgttaagagatactgcgaaaaagaacctagatgatagtaaagaaaatgaagtaaaaggcgcgattaaaaatcacattatgccaatgattgaaaaacaaattaccgatattaaccaaactaatattagtgataagcatgttaataatgcaaggaaaaacgcaatagaaatgtattacagtctgcagaactattataatacacgtattgaaacaataaaggttagtgagaagttatcaaaagtcgatgtagataagttgccgaaaaagggtatagatataactcacggcgataaagcctttgaaaaaaagcttgaaaaattagaagaaaaataa

SEQ ID NO: 419715 - DNA, 312 bp, Staphylococcus aureus
atgtttaaatttctaaaaaaaactcaagcgtttacattgatagagatgctattagtattattaatcatcagtttattattaattttaatcattccaaatattgctaaacaaactgctcacatacaatcaacaggttgtaatgcacaggtaaaaatggttaatagtcaaattgaagcgtatgcattgaaacataatagaaatccatcgtctattgaagacttaattgcagatggttttataaaagaagcacaaaagacatgtaaatcaggagagacaataacaattagtaatggagaagcagttgcaaattag

SEQ ID NO: 419716 - DNA, 165 bp, Staphylococcus aureus
atgatgacgccagaagagcaaaaggaagctgaaattcaagcattaaaagcacaaaatcgattactagaaatggaaaatgacgttttaaaaaagtttcaagcattagaaagagagatgattcaaagagaaaacaaatcgcagcatacaaaacgattgaagcgttaa

SEQ ID NO: 419717 - DNA, 327 bp, Staphylococcus aureus
atgcacataccaatgttgatggatcgtatcaaagcgacatacaacaaaaatgcagttgaaactacagacgagctagtcagattgctaagtgatattgatttacttgtactagatgatatgggtgtagaaaacacagaacacactttaaataaacttttcagcattgttgataacagagtaggtaaaaacaacatctttacaactaactttagtgataaagaactaaatcaaaatatgaactggcaacgtataaattcgagaatgaaaaaaagagcaagaaaagtaagagtaatcggagacgatttcagggagcgagatgcgtggtaa

SEQ ID NO: 419718 - DNA, 234 bp, Staphylococcus aureus
atgtaccaaggtaataaaccaatattaacattgaaagaaattgattttcgagcacgtgaaacactaattaaaaataaaatattatatcatgaaaatcgcaataaaggtaaacttaaaatcaccggtggcggcaatgactttacaattgatttgagtaaaagattacattctgatcttgcaaatgtttatgttaaaaatcctcaaaaaataacagtcgaagtcctcattgattaa

SEQ ID NO: 419719 - DNA, 231 bp, Staphylococcus aureus
atgagtcaatggaaacgtatctctttgctcatcgtttttacattggtttttggaattatcgcgtttttccacgaatcaagactagggaaatggattgataatgaagtttatgaatttatatattcatcagagagctttattacgacatctatcatgcttggggctactaaagtaggtgaagtctgggcaatgttatgtatttcattacttcttgtggcatattcatgttaa

SEQ ID NO: 419720 - DNA, 444 bp, Staphylococcus aureus
atgaaacagcaaatgttatcaaaagtattattaagtacagtcgtagttatgggatcaatagcaggatcttctcttgtaatggatgacaacgctcatgctgaacaaaaaagtgataatatcgggaaactgaatcaaaaaaatgaaagtaccttgcatctttcatttgaaaagggtattaaagggactgttgacaaaaatggtaagttaacattatctgatggaaaaacgtcaaaagtgatgccaactaatgctaaagataaaaaaggtaacgatgttgttttggtttataaaaaggttaaagatggatttgatgttcaagtaattaaatctagtcaagagagaaaaactaactgggttaaatgtggtctaggaactgttgcaggtgctattattggtggggtttctggtggtgccacaggtgccgcagcgtcatgtttcggttga

SEQ ID NO: 419721 - DNA, 954 bp, Staphylococcus aureus
  misc_feature (929)..(938): n is a, c, g, or t
atgtcggaaaaagaaatttgggaaaaagtgcttgaaattgctcaagaaaaattatcagctgtaagttactcaactttcctaaaagatactgagctttacacgatcaaagatggtgaagctatcgtattatcgagtattccttttaatgcaaattggttaaatcaacaatatgctgaaattatccaagcaatcttatttgatgttgtaggctatgaagtaaaacctcactttattactactgaagaattagcaaattatagtaataatgaaactgctactccaaaagaagcaacaaaaccttctactgaaacaactgaggataatcatgtgcttggtagagagcaattcaatgcccataacacatttgacacttttgtaatcggacctggtaaccgcttcccacatgcagcgagtttagctgtggccgaagcaccagccaaagcgtacaatccattatttatctatggaggtgttggtttaggaaaaacccatttaatgcatgccattggtcatcatgttttagataataatccagatgccaaagtgatttacacatcaagtgaaaaattcacaaatgaatttattaaatcaattcgtgataacgaaggtgaagctttcagagaaagatatcgtaatatcgacgtcttattaatcgatgatattcagttcatacaaaataaagtacaaacacaagaagaatttttctatacttttaatgaattgcatcagaataacaagcaaatagttatttcgagtgatcgaccgccaaaggaaattgcacaattagaagatcgattacgttcgcgctttgaatgggggctaattgttgatattacgccaccagattatgaaactcgaatggcaattttgcagaagaaaattgaagaagaaaaattagatattccaccagaagctttaaattatatagnnnnnnnnnnatcaaattcaatctaa

SEQ ID NO: 419722 - DNA, 177 bp, Staphylococcus aureus
atgtacttgtctagagagcttacagatttctcattacctaaaattggtgaagaatttggtgggcgtgatcatacgaccgtcattcatgctcatgaaaaaatatctaaagatttaaaagaagatcctatttttaaacaagaagtagagaatcttgaaaaagaaataagaaatgtataa

SEQ ID NO: 419723 - DNA, 759 bp, Staphylococcus aureus
  misc_feature (722)..(731): n is a, c, g, or t
atgagtcgtaatttaatacatttatccataggggtcgctatatttataatttctttctcgttttatttattaaatcaaccaaataattgggcatggagcagtctaaatatatgtataaatgattcaaagccatccaatgtaaaagttgctattttagatacgggtattaataatacaagaataaacaataattttgttacaaaaagatacaatgctataaacaatcataatcaaataactacagatagtaatcatgacgttaaagtattagatgataaccttaaaggcgatatagacaacataataaaaggcataacttggagtatcaaaaatgacgtaaatattattcatatgagttttggctttcagcgttacaataaagaattacatgatgctataaagaacgctaaaaataaaggtattatcttagtagccgcagcagggaataacatggatgattatagtgactatccagcacgttttaacgaagtatattctatcacagcaatagacaaaaacaataagccatttatatatgcacctactaaaaaaatcgattttaaagctcctggcgtagacgtatatacaaaaggatcaaaagatgagttacttactgtaaatggaacatcttttgcagccgcctatttcactgcttatctgacaaataatcttgaattccgaaatgacttaccacatattttaaaagaatatccaataaaatnnnnnnnnnnaaataacgcatcaaaggagaaaacatga

SEQ ID NO: 419724 - DNA, 186 bp, Staphylococcus aureus
atgattattaaccttgaaacacaacaaatacattttgatttagaacatgaaattccctattttcaatcacctgagaaaaataggatacgcttagatattgatgttctcaataaaaagcaaatttctaatattattaatgttatatttaataaccaatcaaagacgaaatgtaccatttttgtctga

SEQ ID NO: 419725 - DNA, 153 bp, Staphylococcus aureus; identical to SEQ ID NO: 411673

SEQ ID NO: 419726 - DNA, 888 bp, Staphylococcus aureus
atgaagatgataaacaaattaatcgttccggtaacagctagtgctttattattaggcgcttgtggcgctagtgccacagattctaaagaaaatacattaatttcttctaaagctggagatgtaacagttgcagataaatataaaaataaagttaatgataagaagattgacgaacaaattgaaaaaatgcaaaagcaatacggcggtaaagataaatttaaaaaggcccttcaacagcaaggtttaacagccgataaatataaagaaaatttacgtactgctgcttatcataaagaattactatcagataaaattaaaatctctgattctgaaattaaagaagacagcaagaaagcttcacacattttaattaaagttaaatctaagaaaagcgacaaagaaggcttagatgataaagaagcgaaacaaaaagctgaagaaattcaaaaagaagtttcaaaagatccaagtaaatttggtgaaatcgctaaaaaagaatcaatggatactggttcagctaaaaaagatggcgaattaggttatgttcttaaaggacaaactgataaagattttgaaaaagcactatttaaacttaaagatggtgaagtatcagacgttgttaaatcaagctttggatatcatattattaaagctgataaaccaacagactttaacagtgaaaaacaaagcctgaaagaaaaattagtcgatcagaaagtacaaaaaaatccaaaattattaactgatgcatacaaagatctattaaaagaatacgatgttgactttaaagatcgtgatattaaatcagttgtcgaagataaaatcttaaaccctgaaaaacttaaacaaggtggcgcacaaggcggacaatccggcatgagccaataa

SEQ ID NO: 419727 - DNA, 282 bp, Staphylococcus aureus
  misc_feature (253)..(262): n is a, c, g, or t
atgttacaaaccttatcaatcaagcaatttgctattattgaagagttagaaattcaattttctgatggtttaactgttttaagtggtgaaacgggttcaggtaagtcaattattatagatgcaattggacaattaattggaatgagagcttcatctgattttgtaagacatggtgaaaaaaaggctgtcatcgaaggtatatttgatattgacgagagtaaagatgctatacatatattgaaaaatatggttnnnnnnnnnnaaatatggatattgatgtag

SEQ ID NO: 419728 - DNA, 1428 bp, Staphylococcus aureus
atggctgtaaaaagagaagatgtaaaagccatcgttaccgcaattgggggaaaggataatctagaagctgcaacacattgtgtaacaagattgcgtttagtacttaaagatgaaagtaaagttgataaggaagcgttaagtaataatgctttagttaaagggcagttcaaagcagaccatcaatatcaaattgtcattggtccaggaacagtcgatgaagtgtataagcagtttattgatgaaacaggtgctcaagaagcttctaaagatgaagcgaaaaaagcagctgcgcaaaaagggaatccagtacaacgtttgattaaattgttgggggatatttttataccaatattacctgcgattgtgacagctggtttgttaatggggatcaataatttacttacaatgaaaggattatttggtccgaaagaactcattgtgatgtatccacaaatagctgatatttcaaatatgataaacgtcatagcaaacacggcatttattttcttaccagcattaattggttggagtagtatgcgtgtatttggtggtagtccgattctaggtttagtcttaggtttgattttaatgcacccgcaattagtatctcagtatgatttggcaaaaggtaatattccgacgtggaatttatttggcttagagattaagcagttgaattaccaaggtcaagtgttgcctgttttaattgcagcttatgttctagctaaaattgaaaaaggattaaataaagttgttcacgattcgataaaaatgttggtcgttggacccgtagcgcttttagttactggatttttagcatttattatcattggaccagttgcattattgattggtacaggtattacatctggtgttacatttatattccaacatgctggttggttaggtggcgcaatttatggtttgctatatgcaccgcttgtaattactggcttgcatcatatgtttttagcagtagatttccaattaatgggtagcagtttaggcggtacatacttatggccaattgttgcaatctcaaatatttgtcaaggttcagcagcatttggtgcatggtttgtctataaacgacgtaaaatggttaaagaagaaggtttagcattaacatcttgtatttctggtatgttaggtgttacggagccagccatgtttggtgtgaacttacctttaaaatatccatttatcgccgcaatatcaacgtcttgtgtattaggggcaatcgttggtatgaataatgtacttggaaaagttggtgttggtggtgtaccggcattcatttcaattcaaaaagaattttggcctgtatatcttgttgtaacaggaattgcaattgttgtaccatgtatattaacgattgtgatgtctaattttagtaaacaaaaagcaaaagaaattgttgaagattaa

SEQ ID NO: 419729 - DNA, 447 bp, Staphylococcus aureus
atgatttcacacttgataacggatacttcgaagaagaaacatcagacagtgactcagacagtgattcagattcagatagcgattcagactcagatagcgattcagactcagacagtgaatcagactcagacagcgactcagattcagacagcgactcagactcagacagcgattcagactcagatagcgactcagattcagaaagcgactcagactcagacagcgattcagactcagatagcgactcagattcagacagcgactcagattcagaaagcgactcagactcagacagcgactcagattcagacagcgactcagactcagatagtgattcagattcagacagcgactcagactcagacagcgactcagactcagacagcgactcagactcagatagcgactcagatagcgactcagattcaggaaaacatacacctgtga

SEQ ID NO: 419730 - DNA, 2610 bp, Staphylococcus aureus
atggatataaataaaatgacatatgctgttcaaagtgctttacaacaagcagttgaactgagtcagcaacataaattacaaaatatagaaattgaggcaattttaagcgctgccttaaatgaaagtgaaagcttatataaaagtattttagaacgagcaaatattgaggtagatcaattaaacaaagcttatgaagacaaactaaacacgtatgcatctgtagaaggtgacaatatacaatatggtcaatatattagccaacaagcaaaccaattgataactaaggctgaatcatacatgaaagaatatgaagatgaatatatttcaatggagcatattttacgttcggcaatggacattgatcaaacaacaaaacattatataaataataaagtagaagttatcaaagaaattattaaaaaagtaagagggggaaatcacgtgacatcacaaaatccagaagttaattacgaagcattagctaaatatggccgcgacttagtagaagaagttagacaaggtaaaatggatcctgttataggaagagatgaagaaattcgaaatacgattcgtattttaagtcgtaaaactaaaaacaaccctgtgctcattggtgaaccaggtgttggtaaaactgcaattgttgaaggattagcgcagcgtatagttaagaaagatgtgccagaatcattattagataaaactgtttttgagttagatttaagcgcattagtagcgggcgctaaatatcgtggtgaatttgaagagagattaaaagcagtcctaaaagaagttaaagagtctgatggtagaattatattatttattgatgaaatccatatgcttgtaggtgctggtaaaacagatggtgccatggatgcaggcaacatgttaaaaccaatgttagcacgaggagagttacattgtattggtgcaacaactttaaatgaatatcgagaatatattgaaaaagattcggcattagagcgtcgtttccaaaaagtagcagttagtgagcctgatgttgaagatacaatttcaattttacgtggtttaaaagaacgatatgaagtatatcatggtgtgcgtattcaagatagagccttagttgctgccgctgaattgtctgatcgttacatcactgatcgttttttaccagataaagcgattgatttagttgaccaagcatgtgcaacaattcgtacggaaatgggatcaaatccaactgaattggatcaagttaatagacgtgtcatgcaattagaaattgaagaaagcgcacttaaaaatgaatctgacaatgcgagcaaacagagattacaagaactacaagaagagcttgccaatgaaaaagagaaacaagcagcacttcaatctcgtgtagaatcagaaaaagaaaaaatagcaaatttacaagaaaaacgtgcgcaactagatgaaagtagacaagcgttggaagatgcacaaacaaataacaatttagaaaaagcagctgaactacaatatggaacaattcctcaattggaaaaagagcttagagaattagaggataatttccaagatgagcaaggtgaagattcagatcgaatgattcgtgaagttgtaacagacgaagaaattggtgatattgtcagccaatggacaggcataccagtttcaaaattagttgaaacagaacgtgaaaaattacttcacttaagtgatatcttgcataaacgtgttgtaggtcaagataaagcggttgacctggtttcagatgcagtagttagagctagagcaggtattaaagatccaaacagacctattggtagtttcttattcctaggtccaactggggtaggtaaaactgaattagctaaatcattagctgcatcattatttgattctgaaaaacatatgattcgtattgatatgagtgaatatatggaaaaacatgcagtatcaagattgataggggcacctccaggatatattggacatgatgaagggggtcaattaactgaagcggttcgtcgtaatccatactcagttattttattagatgaggttgaaaaagcgcatactgacgtctttaatgtattattgcaaattttagatgaaggccgtttaactgattctaaaggacgtagcgttgattttaaaaatactattattattatgacaagtaatattggatctcaagttttactagaaaacgtaaaagagactggtgaaattacagaatcaacagaaaaagctgttatgacaagtttaaatgcatatttcaaaccagaaattttgaatcgtatggatgacatcgtattatttaaacctttatctattgatgacatgagtatgattgtagacaaaatattaacgcaattaaatataagattactagaacaacgaatctcaattgaagtttctgatgatgctaaagcttggctaggtcaagaggcttatgaacctcaatacggtgcaagaccattaaaacgttttgtacaacgccaaattgaaacaccattagcacgtatgatgattaaagagggattcccagaaggtacaactattaaagttaatttaaattcagacaataacttaacgtttaatgttgaaaaaattcatgaataa

SEQ ID NO: 419731 - DNA, 384 bp, Staphylococcus aureus
atggaaatcaaacaaaaatatcaattatcaaaagtggttaaaatattagaagtagtattatacgaggaagataagtttcaatccgataaggactatcattatcaggataaagcattttatgaatatgctttaaagttagttcataatggattgttcaatattcttgctgaattagattttgaagatgaagcatttttaattcttgatgaagtaacaatgacgctaagtgatgtcatgaaagaaacacaacacgtttaccgttatagtgtcatagatgaaaaaggtgaacacaaacatacaacagatcgcaaaggacacgtgattggaatgttagagtgggcattagattacattgcgggaaatattgaagtggaggaattataa

SEQ ID NO: 419732 - DNA, 204 bp, Staphylococcus aureus
gtgcgaaaacaagttattattacaaaaacagtagttggctggtacaacattaaagatactcaacataatttaatgttaaatataccgccaaaagtatttgaacagtactttcctgatgttagtaaagatgttcaagttgtgtgtttagaaatggatttatcaaaaattacagaaattaaaaataagaaaaaagtaggtagttaa

SEQ ID NO: 419733 - DNA, 213 bp, Staphylococcus aureus; identical to SEQ ID NO: 408405

SEQ ID NO: 419734 - DNA, 249 bp, Staphylococcus aureus
atgatattagatgattatgaatggattaaaagtgggaagtcattaaaaaaatcagagaaacaaaatgaaagtttagttaatgaattgactagtgtccatatggaaaatgaaaagctggaagaagagcgttatcatacgctaataaatcatattgataatcatttagacaattctaaaatacgtgaagtaatgacgatagataacaatgatgaacagttctttaagaagaaatatcaagcacaagaatga

SEQ ID NO: 419735 - DNA, 717 bp, Staphylococcus aureus
atgaataaaaatataatcatcaaaagtattgcggcattgacgatattaacatcagtgactggtgttagcacaacaatggttgaagggattcaacaaacagccaaagccgaacataatgtaacgaagataacaaatactagtatttcgccatacaaaggcatactaagagtaggcgcagctacaggatttgtagtaggtaaaaacactattttaacaaatagacatgtcgttaaagatgtgcaagtaggtagtacagtgcttgcccatccaaatggcgaaaatgatactggcggatactataaagtcaaaaaagttatcccatatgcaggctcggcagatttagctatcgttgaagttgaagaagattcagtttacccaaaaaataaaaagttcagtgaaaatactgaaatcctaacgttggcatcggaagctaaagcgaatgaaagagttgcaatcgttggctatccagcgccatataaaaataaacatcatatgtatcaatcaacaggaacagtactatcaattaatggagataaattagtatcagatgcatttgctgaaggtggcaattcagggtcaccggtctttaacaataaaaatgaagttgtgggcgttttatatagtggagaccaaattggtcattctaaaaaagagtcatacagcgtatatttaacgcctgaaattaagaaattcatcgcagataacacagaaaaataa

SEQ ID NO: 419736 - DNA, 708 bp, Staphylococcus aureus
atgacagcacaaaacattcttggtacagactctggtggtagggataactttagtcgtttgttatatgcaggtcgtatttcattatccattggaattacatctacaataggaatgcttttgattggaattacagttggagtgatttctggttattttggaggtattgttgatacattattaatgagaataaccgaatttgttatgttatttccatttttaatatttgcaattgtattaaatgctgcacttggagataaaattaaaaatccttatggatctgccataattcttgttctagttattatcgtattaagttggggaggtattgcaagacttgttcgtggtaaagtacttcaagaaaaagaaaatgaatactttttggcagcaaaatcaattggtacacccacatataaaattattttgaaacatcttttgccgaatatattaagtgtagttatcgtacaagcaacattgttatttgccggtatgattgtagtggaatcaggattgagctttttaggattcggaattagtaaagcaattccatcttggggtaatatgttgagtgatgctcaagaaggggatgttataagtggtaaaccgtggatatggatgccacctgctataatgattacattaactatattaagtataaactttgtaggggaagggcttaaagatgcttttaatcctagaggtagacgttaa

SEQ ID NO: 419737 - DNA, 264 bp, Staphylococcus aureus; identical to SEQ ID NO: 408406

SEQ ID NO: 419738 - DNA, 240 bp, Staphylococcus aureus
atgggaataaatgtcgacgaaattgataaaaaccttgaagttttaaaaagtaaacttaaaaatttagatgaatttttaaataacttaaaaacagcttcaccaattttagaaaatcacttagatgacattgttagaaatatgaagccattaattgttaatcaaatttttgaaccatctcattatgatgatatgtttatttcaagaaaagctttaacgccagtgttctcaagcgttttataa

SEQ ID NO: 419739 - DNA, 333 bp, Staphylococcus aureus
atgactagtggtaattatgataatgctcaaaatattgtgaagcagacaataaataaaaattatgccgatgatcaaacatattatttaagtggtatgattatggctgctatcaattctaagtctgaaggtatgacagaatgggagcgaggacttagaatgtttcctaaatcaggtttattaaattttgagttagcgatagcaaatcgttcattaaatgatgatgaaaaagcattaaaatatgtgcgtaaagcattaaatgcagaccctaaaaatacagattatattaacttagaaaaagagttgactaaatcaaatgagtcgaaaaataaataa

SEQ ID NO: 419740 - DNA, 702 bp, Staphylococcus aureus
atgattaaccacttagcactaaacacaccttacttcggaatactgttatccgttataccatttttcttagcaaccatattatttgaaaaaacaaatcgtttcttcttattcgcaccgctatttgtcagtatggtatttggtgtggccttcctctatttaacaggaattccgtataaaacttacaaaataggtggagacattatttacttcttcttagaaccagcaacaatctgttttgcgattccgttatataaaaagcgtgaagtgcttgttaaacattggcatcgtatcatcggaggtattggtatcggtacagttgtagcgttattaattattttaacttttgcgaagttagcacaatttgccaatgatgttattttatcaatgttacctcaagcagcaactacagcgattgcgttaccagtatcagctggtatcggtggtataaaagaattaacatcattagcagttattttaaatggtgtcattatttatgccctaggtaataaattcttgaagcttttccgaattactaaccctattgcccgaggattagcacttggaacaagtggtcacacattaggtgtagcaccagccaaagaattaggacctgtagaagaatcaatggcaagtatagctttagtgttagttggtgtagttgttgtagcagttgtgcctgtctttgtagcaatattcttctaa

SEQ ID NO: 419741 - DNA, 486 bp, Staphylococcus aureus
atgggatggcttctgtgtacttctaaatatattcatcttaataagcccattcaatttaaatgtttggctgtgttagtaaatgacgaatcgcacaagggcacactcatattcacatttactacaaacgcctttttgctcaaacaaaaatatttgtttacggtagcttttgaactaccacctgcacacacgaatcctcaaaagatgctaattttgattcgaaagaattttttacaacgtgtttgttcgaagcgtcttttcaaggttgatcatttattatcttttttattcaataaatatgaggttagcaatttttatcaaaccgccatagccacatctcgattcaaggatacatttgttttctcatatcttatctctcatgacagtacacgatatatatcttttccaaatattcatcacttttttcctgttaaaatcatttctattattaacgctgtaatgacaacttatttaatttattgcatttaa

SEQ ID NO: 419742 - DNA, 213 bp, Staphylococcus aureus; identical to SEQ ID NO: 408405

SEQ ID NO: 419743 - DNA, 345 bp, Staphylococcus aureus; identical to SEQ ID NO: 408518

SEQ ID NO: 419744 - DNA, 294 bp, Staphylococcus aureus
ttggctttttgtccttttttaggcattttaattaatatgttacctttatttctgtctgtattagatatgaatgaatcaaatattatcaattcaataatatctttattatcaattgtattaatcatacctggtccttctatgtgtataactgaattttctaaaacagtatatgtaaatatttccttgtcattgaaactcgaatcatttggtatgcgatttatcgttaaatcagatttatactgtgcaaatccaaaatcaggatgtgaaaagtctaacctctctgcaataaaataa

SEQ ID NO: 419745 - DNA, 195 bp, Staphylococcus aureus
atgttatttgtcattttagttttatatatcattggtattgcatttattctactcagtgtttttggttcaaagactgaaggattatctacgaaacatactttatataccattggcagtgctattataacgattgctatttttatttcaattggctatgccattcaatacttaactgcagcgctttatggtttgtaa

SEQ ID NO: 419746 - DNA, 231 bp, Staphylococcus aureus
atgacttcatcctcttatttagtagaaattaacaacacaaatctaattaaaaatatggtccacgctgataaaggcttttctattgtttctaaatcaacattaacaccttatgatttagaaaagctagaagtaacaaacttagacatcaaacgttatttctatttagtcatacataaggataagtatattgatacgaagcttaatgaagttattaaaaatttgatttcatga

SEQ ID NO: 419747 - DNA, 603 bp, Staphylococcus aureus
gtgcaagtactgtcaaaaaacgtatctgttttttcttttgatcgcacaactaatttgaaatttggatatctagattctccaatagtaatgttgttgacacctgacgatttaacaggagatttttatttagctgctgtttctcaaggtggatatctatttaaagatttagatacacttaaacagttgcttaaagataatcacctagaagaagaaattagcggtataactaattacaaggattctgtgttaaatgaattaaatgaaacgaaaacaaaaatgataataacaatagttactattattattaacgttttcattcttttgatagctactgtatttgaaacaattcaatattttagctggaataaaaagcaactattattaagaaaaattcatggttattcattattcagcagtaatgtacgttatttaacaatttctattttactttctattatgttagcttacactacgcatattttatttggttcaaagatattactattcataataatgtctattgctattattcaacatttacttcaaattgcttatattaaatatcttgaaaaatactttaaagatttaatgagggagatttaa

SEQ ID NO: 419748 - DNA, 321 bp, Staphylococcus aureus
atgacttggtttgaagaatacgttaaacctagtgtggaatgggaaagaaaggcagaacaagctgttttaagtgatgatgaagttaaaacgatcactgaatatagaaagaagtacaacaacccgcatatttacatgtcggctcagaacagaaattatcttgttgaatatttagatagacatactggagacatagtattacacaatttaaaacttaagaaatcatccagaagaagagtgcatcaatatttaatggtcggccaaatagtagtgccgggcgaaccaaaaggcacaatttatgaagcatctctgataataagataa

SEQ ID NO: 419749 - DNA, 1359 bp, Staphylococcus aureus; identical to SEQ ID NO: 418540

SEQ ID NO: 419750 - DNA, 435 bp, Staphylococcus aureus
atgcttttttgtccccacgttttgaacatgtttggcaccgccaaaccactcattttttgcaaaattttgcaaaaaaatggggacatgttcacttatgctcatctacttaaaataagtattttttgttggtttttaaaagtagttgaaatgtttataataatattgaaagatatttctgttttccttttgaataataaacttaaaagagaatataaaataatgcttattaaaattaggggtggaaatatgaaaagagatttttttgaaaagtggtcgtttattttaaatttaattttattttgtgcttttttgtttttagtggttctgatgttttataaggatgtcgatttgatttatattttttgtacattattaatatcattattacctttgctaaatattataaaaagatataagaaaaagacggataattaa

SEQ ID NO: 419751 - DNA, 552 bp, Staphylococcus aureus
atgaaatcaacaccacacattaaaccaatgaatgacgtcgaaattgcagaaacggttctattgccaggagatccgttaagagctaagttcattgcagaaacatatttggacgatgtggaacagttcaatacagtgcgaaatatgtttggttttaccggaacatataaaggtaaaaaagtttctgtcatgggttcaggaatgggtatgccatctattggcatttactcttatgaattaattcatacatttggttgtaaaaaattaattcgcgttggttcttgtggcgcgatgcaagaaaacattgatttatatgatgtgattgttgcacaaggtgcctctactgattcaaattacgttcaacaatatcaattaccaggtcattttgcgccaattgcttcttatcagttattagaaaaagctgttgaaacagcacgtgacaaaggtgtacgtcatcatgtaggtaatgtgttatcaagtgatattttctataacgcggatacaacagcgagtgaacgttggatgcgtatgggtattttaggtgtagaaatgtaa

SEQ ID NO: 419752 - DNA, 183 bp, Staphylococcus aureus
atgcagactataacaggtcaatggggcaaaaaaggatatttaattaaaggtgaaaaagatcgtttgcaaaaaaaggtgagtcacaaaaacattaagtatagaggatttgctataaacaaagaaatgcttgaagaattaggatttgatttctcgaattctcataatccttattcagattattaa

SEQ ID NO: 419753 - DNA, 195 bp, Staphylococcus aureus
atgcaatacattacaagataccagaaagacaatgacggtacttattccgtcgttgctactggtgttgaacttgaacaaagtcacattgacttactagaaaacggatatccactaaaagcagaagtagaggttccggacaataaaaaactatctatagaacaacgcaaaaaatattcgcaatgtgtagagatatag

SEQ ID NO: 419754 - DNA, 297 bp, Staphylococcus aureus
atgacttacgaacaaaaagatgattttaaaaaattaaaaaatagaattttaggtatttcaattaatttaccggaaggacaaacatttactttccatgacttgaaccgtcgtgcaaatgtaccgtgttctaaagcagtacaacaaaatgttgggcgttggttcgcatattttgtaaaacatgcgccacgtgttccatttattattatcggtaaaaataccaatggtcatttagtatatatgaaagtcggacctaatccactaaatgatagcaacccttcgaaaggaggtgttcgctaa

SEQ ID NO: 419755 - DNA, 621 bp, Staphylococcus aureus
atgctatgcgaatctaaaatcatcaataaaaacccaaaatatagaattattaaatataatgatgagtacttaatgatcgatataataagcacttggattagtttgttttttccttttattaattggttcatcaccaaaagatacgtcaaaattagtagagaagagtttgaaaatttaaatattgttaaacctgctaaaaagaatgttttttggccagttgcaggtatctctactttattcgcagttacattaagaaagtatacgcatttacttgacactcaacttgataaaaaattagttattgccatatgttgtatcacatttatagggattttaatattttatgtacgcctaattaaaaaatcatctttaaatatttataatactaaaaataaaaggtcgaaaatcatcttaataccaacactaaaaaatttttgtttcacattgttcggatatgtttttttaattttttggacagtgattttctcatatgctctattatcaatgagttatcaaaacataatagtatattttgcttggattacagcaataatgggtttttttctagtgaatatagctttaattatagataaaaacattcatgtcatacttaaaaattaa

SEQ ID NO: 419756 - DNA, 753 bp, Staphylococcus aureus
ttgggggagtttgaagttaaatatttaacaggatttattttaatattattgttagaaggaatttttacaaattcagcaagtgcaatcgaatattcagacttacatcataaaagtaaacttgattcaaagcgtctatataatgctaaggtgtcatttgctaatccaactgatcttgaaaataaaaaaacaaacgatagactgttgaagcatgatttgttatttcatgacatgttcgtaaatgatgattggaaaaaagattttaaagttgaattcgaaaatgaggcactttcaaagaaatttataaataaggatatcgatatatttgctggaaattatggatacggatgtcatgggggagaaaccaataaaacgcaatgtagttatggaggggttactttaagtgacaataataagtacgataatgataagaatataccttgtaatttatggattgacggacatcaaacagaaatagaactaactgcagtaaaaacgaaaaagaaaattgttaccattcaagaattagatgttcaattaagaaattatttgaatgagaagtataagttgtacgaacaaggtggcgacattgttaaagggtatgttaaatatcataatgatgatgaaaaaaatgtagaatatgatttttataatttaaatggtgagtatggtcatgaggtattaaaaatgtatgctgataataaaactatcaatagtgacaaattgcatttagatatctatttattcaaatcataa

SEQ ID NO: 419757 - DNA, 723 bp, Staphylococcus aureus; identical to SEQ ID NO: 407801

SEQ ID NO: 419758 - DNA, 705 bp, Staphylococcus aureus
atgaataagagtcgatttatttcatgcgtaattttgatattcgcacttatactagttctttttacacccaacgtattagcagagagccaaccagaccctacgccagatgagttgcacaaatcaagtgagtttactggtacgatgagtgataaaaaactaaaaaattatgacaaagtgaaaacagagttattaaatgaagatttagcaaagaagtacaaagatgaagtagttgatgtgtatggatcaaattactatgtaaactgctatttttcatccaaagataatgtaggtaaagttacaggtggtaaaacttgtatgtatggaggaataacaaaacatgaaggaaaccactttgataatgggaacttacaaaatgtacttataagagtttatgaaaataaaagaaacacaatttcttttgaagtgcaaactgataagaaaagtgtaacagctcaagaactagacataaaagctaggaattttttaattaataaaaaaaatttgtatgagtttaacagttcaccatatgaaacaggatatataaaatttattgaaaataacggcaatactttttggtatgatatgatgcctgcaccaggcgataagtttgaccaatctaaatatttaatgatgtacaacgacaataaaacggttgattctaaaagtgtgaagatagaagtccaccttacaacaaagaatggataa

SEQ ID NO: 419759 - DNA, 3582 bp, Staphylococcus aureus
ttgattgatgtaaataatttccattatatgaaaataggattggcttcacctgaaaaaatccgttcttggtcttttggtgaagttaaaaaacctgaaacaatcaactaccgtacattaaaacctgaaaaagatggtctattctgtgaaagaattttcggacctacaaaagactgggaatgtagttgtggtaaatacaaacgtgttcgctacaaaggcatggtctgtgacagatgtggagttgaagtaactaaatctaaagtacgtcgtgaaagaatgggtcacattgaacttgctgctccagtttctcacatttggtatttcaaaggtataccaagtcgtatgggattattacttgacatgtcaccaagagcattagaagaagttatttacttcgcttcttatgttgttgtagatccaggtccaactggtttagaaaagaaaactttattatctgaagctgaattcagagattattatgataaatacccaggtcaattcgttgcaaaaatgggtgcagaaggtattaaaaatttacttgaagagattgatcttgacgaagaacttaaattgttacgtgatgagttggaatcagctactggtcaaagacttactcgtgcaattaaacgtttagaagttgttgaatcattccgtaattcaggtaacaaaccttcatggatgattttagatgtacttccaatcatcccaccagaaattcgtccaatggttcaattagatggtggacgatttgcaacaagtgacttaaacgacttataccgtcgtgtaattaatcgaaataatcgtttaaaacgtttattagatttaggtgctcctggtatcatcgttcaaaacgaaaaacgtatgttacaagaagccgttgacgctttaattgataatggtcgtcgtggtcgtccagttactggcccaggtaaccgtccattaaaatctttatcacatatgttaaaaggtaaacaaggtcgtttccgtcaaaacttacttggtaaacgtgttgactattcaggacgttcagttatcgcggtaggtccaagcttgaaaatgtatcaatgtggtttgccaaaagaaatggcacttgaactatttaaaccattcgtaatgaaagaattagttcaacgtgaaattgcaactaacattaaaaatgcgaagagtaaaatcgaacgcatggatgatgaagtttgggacgtattggaagaagtaattagagaacatcctgtattacttaaccgtgcaccaacacttcatagacttggtattcaagcatttgaaccaactttagttgaaggtcgtgcgattcgtttacatccacttgtaacaacagcttataacgctgactttgatggtgaccaaatggcggttcacgttcctttatcaaaagaggcacaagctgaagcaagaatgttgatgttagcagcacaaaacatcttgaaccctaaagatggtaaaccagtagttacaccatcacaagatatggtacttggtaactattaccttactttagaaagaaaagatgcagtaaatacaggcgcaatctttaataatacaaatgaagtattaaaagcatatgcaaatggctttgtacatttacacacaagaattggtgtacatgcaagttcattcaacaatccaacatttactgaagaacaaaacaaaaagattcttgctacgtcagtaggtaaaattatatttaatgaaatcattccagattcatttgcttatattaatgaacctacgcaagaaaacttagaaagaaagacaccaaacagatatttcatcgatcctacaactttaggtgaaggtggattaaaagaatactttgaaaatgaagaattaattgaacctttcaacaaaaaattcttaggtaatattattgcagaagtattcaacagatttagcatcactgatacatcaatgatgttagaccgtatgaaagacttaggattcaaattctcatctaaagctggtattacagtaggtgttgctgatatcgtagtattacctgataagcaacaaatacttgatgagcatgaaaaattagtcgacagaattacaaaacaattcaatcgtggtttaatcactgaagaagaaagatataatgcagttgttgaaatttggacagatgcaaaagatcaaattcaaggtgaattgatgcaatcacttgataaaactaacccaatctttatgatgagtgattcaggtgcccgtggtaacgcatctaactttacacagttagcaggtatgcgtggattgatggccgcaccatctggtaagattatcgaattaccaatcacatcttcattccgtgaaggtttaacagtacttgaatacttcatctcaactcacggtgcacgtaaaggtcttgccgatacagcacttaaaacagctgactcaggatatcttactcgtcgtcttgttgacgtggcacaagatgttattgttcgtgaagaagactgtggtactgatagaggtttattagtttctgatattaaagaaggtacagaaatgattgaaccatttatcgaacgtattgaaggtcgttattctaaagaaacaattcgtcatcctgaaactgatgaaataatcattcgtcctgatgaattaattacacctgaaattgctaagaaaattacagatgctggtattgaacaaatgtatattcgctcagcatttacttgtaacgcacgccatggtgtttgtgaaaaatgttacggtaaaaaccttgctactggtgaaaaagttgaagttggtgaagcagttggtacaattgcagcccaatctatcggtgaaccaggtacacagcttacaatgcgtacattccatacaggtggggtagcaggtagcgatatcacacaaggtcttcctcgtattcaagagattttcgaagcacgtaaccctaaaggtcaagcggtaattactgaaatcgaaggtgtcgtagaagatattaaattagcaaaagatagacaacaagaaatcgttgttaaaggtgctaatgaaacaagatcataccttgcttcaggtacttcaagaattattgtagaaataggtcaaccagttcaacgtggtgaagtattaactgaaggttctattgaacctaagaattacttatcagttgctggattaaacgcgacagaaagctacttattaaaagaagtacaaaaagtttatcgtatgcaaggggtagaaatcgacgataaacacgttgaggttatggttcgacaaatgttacgtaaagttagaattatcgaagcaggtgatacgaagttattaccaggttcattagttgatattcataactttacagatgcaaatagagaagcatttaaacaccgtaagcgtcctgcaacagctaaaccagtattacttggtattactaaagcatcacttgaaacagaaagtttcttatctgcagcatcattccaagaaacaacaagagttcttacagatgcagcaattaaaggtaagcgtgatgacttattaggtcttaaagaaaacgtaattattggtaagttaattccagctggtactggtatgagacgttatagcgacgtaaaatacgaaaaaaacagctaa

SEQ ID NO: 419760 - DNA, 228 bp, Staphylococcus aureus
gtgaaagccgaaatcatgttttatgtacaagcgccgagaagccaaaagcgattcaaaaagctgacaaggacgacagcacccgatatagataacttgctcaaagcagcgttagacggtattttcagaggattagaagtcaaagacagccgagtagctttggtatcaatgggcaaatttcaagaaatggaaaatccaagaactgagatagttttaagggggattgagtaa

SEQ ID NO: 419761 - DNA, 135 bp, Staphylococcus aureus
atgaaagaagaaatagaagttttgcctaaagatagccaagagcgaatggaaaaagaacgagcgtataagcaatcagaaggcgatagaatcgctgaattttgggacgcacaaaagcgagaacaggaagataagtag

SEQ ID NO: 419762 - DNA, 507 bp, Staphylococcus aureus
atgaaaaagctactaacggcaagtataattgcatgttctgttgtaatgggagtaggcttagcgaacactagtgccgaagcagcaagtggcaactctattgatactgttaaacaattaattaagggtgatcagtcattagaaaatgtgaaaattggcgaatctattaaagatgttttaactaagtacaaaaatccgatgtattcttacaatgaagatggaactgaacattattacgaattccataccaaaaaaggtatgttattagtaactactgatggtaagaaaaacaatggtaaagtaactcatatttcaatgatgtataatgatgctaatggtccaacatatcaagctgttaaaaattatgttggcaaagcagtaacacatacggaatatagcaaagttgctggtaattttggatatattgaaaaaggcaaaacgacttatcaatttgcctcagcaccaaaagataaaaacataaaattatatcgtattgatttggaaaaataa

SEQ ID NO: 419763 - DNA, 363 bp, Staphylococcus aureus; identical to SEQ ID NO: 414583

SEQ ID NO: 419764 - DNA, 282 bp, Staphylococcus aureus
  misc_feature (231)..(240): n is a, c, g, or t
atgatacagcaacaaggatgtaaagtagagatagaaccatttttaaaagaaataaaacaaattccggatattttgattaataataaatatgttattgagctacagtattcgccaattccttataaacagattcttcaacgaacggaaggtttaaagaaaatgggatataaagtaagttggttattaaatgatgttgattattgtcataataaagtgaagttcaatcatttnnnnnnnnnnttattaatccaatcactcgaaaacttcatacgttcaatttag

SEQ ID NO: 419765 - DNA, 606 bp, Staphylococcus aureus
gtgctatcagtttcaattattatatctattggagcaggtttttcagataacatcgatagctacttaagcatttcaaggacaatcgtatttttcccaatattttacctaggttacattttcaccaaaaaacatacggctatttttaaaaataaaaaactaataccagtatctatcattacctttattttgttttttatcatttacgtgattcatcctatcaatgcagattggttattaggaagttcaccatatacttcacttgaaaatgaaggacagagtgtattcagtccttttaaacgacttatattatatggaattatattaatcgcaatgactgcgtttctaaatttaatgtcaacaaagaaaaaattatatacttatattggtagtcgtacgctatacgtatatttattacatggtttaattattggcattgttagaggatttgaatggtacccattcgataatcctatatctttaatgacgtatctttatttattaagtatatctgtaatcatcgtatatgtattatctacaaactttgtttgtaaatggacaaatccaataattaatttacaaagaccatcacagtttaaagactcataa

SEQ ID NO: 419766 - DNA, 372 bp, Staphylococcus aureus
atgatgaatcaaaataaatcgaactattcaattgatgctttatatcaattcttatttgagtttattttcgacatcgaagaaaggtatattagaatgtacgttcaattatctaatacgcctgaggaattttctggaaatatttacggacaaatacaagatttaaatcaatcattaagtaaagagatagcaaaattctatgatgaatcaaaaataaagatgacaaaagaagactttcagaatttaatattgctgtttcttgaaagttggtatttgaaagcatccttttcgcaaaaatttggagcagtggaagaaagtaaaagtcaattcaaagatgaagtgtattcgctactaaatatatttttgaagaaataa

SEQ ID NO: 419767 - DNA, 414 bp, Staphylococcus aureus
atgaaagacttgctaattgaatataggaaaacgagactttgcgtactcaataaaataaaatcacttgaatataaagtagatgaagaggataaattaagtatttacaaagatatattaaaagacattgattatacaattgaatggttaacatgtggacacgaaccaggcaattataacgcaatagatagaagtcaatgctatttagtagataatgatgtgatcaataaggcttttagtgaatcaatgtataaaaagaattcagatattgaatacaaagatataatcaaatgtgaggggcttacttataaagaatctgcttgtttattaaatttgaaaataggtagtgtgcaaaactatattaaaagagctgaaattaaaataaaaaatgaacttgaaacaaatttatttatatag

SEQ ID NO: 419768 - DNA, 282 bp, Staphylococcus aureus; identical to SEQ ID NO: 407556

SEQ ID NO: 419769 - DNA, 618 bp, Staphylococcus aureus; identical to SEQ ID NO: 407714

SEQ ID NO: 419770 - DNA, 492 bp, Staphylococcus aureus; identical to SEQ ID NO: 407713

SEQ ID NO: 419771 - DNA, 327 bp, Staphylococcus aureus; identical to SEQ ID NO: 407712

SEQ ID NO: 419772 - DNA, 1212 bp, Staphylococcus aureus; identical to SEQ ID NO: 407711

SEQ ID NO: 419773 - DNA, 390 bp, Staphylococcus aureus; identical to SEQ ID NO: 407710

SEQ ID NO: 419774 - DNA, 264 bp, Staphylococcus aureus; identical to SEQ ID NO: 407709

SEQ ID NO: 419775 - DNA, 354 bp, Staphylococcus aureus
gtgcttacgaatgcggcagtcggtgatgaaacagatacgaaagaagttgtagtaaagcgtggagaatataaagagaacccacaaagtggcaaagtacagttagtctataatgaacatgttgaactgatagaggtaccaattaagccaagtgatcgtttaaaagctcgtgatatgttggggaaataccataagttatttatagataagcatgatattaacgggaatgtgcctatattcattaacattggtgaatgggacggtgatgatgaggaattagataaggcagtgaaagatgtatctaacgctaatcctaatcatactgtgattgtggatgatattccgttagaggattaa

SEQ ID NO: 419776 - DNA, 1542 bp, Staphylococcus aureus
atggaaatggcaaaagaacaagagttaatccttgtcttagactttggtagccaatacaaccaattaattacacgccgaattcgtgaaatgggcatttatagtgaattacatgatcatgaaatttcaattgaagaaattaagaaaatgaatccaaaaggtatcattttatcaggtggtccaaactcagtttatgaagaaggttcatttacaattgatcctgaaatatataatttaggaattccagtacttggtatttgttatggcatgcaattaactactaaattattaggtggtaaagttgagcgtgctaatgaacgtgaatacggtaaagcaatcattaatgcgaagtcagatgagttattcgctggcttaccagcagaacaaacagtttggatgagtcattctgataaagttattgaaattccagaaggcttcgaagttatcgctgatagcccaagcacagactatgcagcaattgaagataagaaacgtcgcatttatggtgtgcaattccatccagaagtacgtcatacagaatatggtaatgacttattaaacaacttcgtacgtcgtgtttgtgagtgtaaaggacaatggacgatggaaaactttatcgaaatcgaaattgaaaagattcgtcaacgcgtaggcgaccgtcgtgtattatgtgcgatgagtggtggcgtagattcatctgttgttgctgtactattgcataaagcaattggggatcaactaacatgtatctttgtagaccatggcttacttcgtaaaggtgaaggcgacatggttatggagcaattcggtgaaggtttcaacatgaatattattcgtgttaatgcgaaagatcgttttatgaataaattaaaaggtgtttctgatcctgaacaaaaacgtaaaatcattggtaatgaatttgtatacgtatttgatgatgaagcatcaaaacttaaaggcgtagacttccttgcgcaaggaacactttatacagacgtcatcgaatcaggtacaaaaacagcacaaacaatcaaatcacaccacaatgttggtggattaccagaagacatggaattcgaattaatcgaaccaatcaatacattgtttaaagatgaagtacgtaaattaggtattgagttaggtattccagaacatttagtgtggagacaaccattcccaggacctggtcttggtatccgtgtacttggagaaattactgaagataaactagaaatcgttagagaatcagacgcaattttacgccaagtgattagagaagaaggtcttgaaagagaaatttggcaatacttcacagtgttaccaaacattcaatcagtaggtgttatgggagactatcgtacgtatgatcacacagtaggtatccgtgcagtaacatctatcgacggcatgacaagtgactttgcacgcatcgattgggaagtcttacaaaagatttcaagtcgtatcgtaaacgaagtagaccacgttaaccgcgtagtctatgacattacatcaaaaccaccaagcacaattgagtgggaataa

SEQ ID NO: 419777 - DNA, 1242 bp, Staphylococcus aureus
atgggcgttgaagaacaagcggacgaagttcaaaaagtaaaacgctctgaaaatggtgtcatttcaaacccatttttcttaacaccagaagaaagtgtttatgaagctgaagcattaatgggtaaataccgtatttcaggtgtaccaattgttgataataaagaagatcgcaacttagtaggtattttaacaaaccgcgacttacgttttattgaagacttctcaattaaaattgtagatgtaatgacgcaagaaaatttaattacagctccagtgaatacaacacttgaagaagcagaaaaaattctccaaaaacataagattgaaaagttaccattagttaaagatggacgtctagaaggtcttattactattaaagatattgaaaaagttatcgaattccctaatgcagcaaaagatgaacatggtcgtctacttgtagctgcagcaatcggtatttcaaaagacactgatattcgtgctcaaaaattagtcgaagcaggtgtggatgtcttagttatcgatacagcacatggtcactctaaaggtgtaatcgatcaagtgaaacatattaagaagacttacccagaaatcacattagtagctggtaacgttgcaactgcagaagcaacaaaagatttgtttgaagcgggtgcagacattgttaaagtcggtattggcccaggttcaatttgtacaacacgtgttgtagcaggtgttggtgtaccacaaattacagcaatttatgattgtgcaactgaagcacgtaaacatggtaaagctatcattgctgatggtggtattaaattctcaggagatatcattaaagcattagctgctggtggacatgcggttatgttaggtagcttattagctggtactgaagaaagtccaggtgctacagaaattttccaaggtagacaatacaaagtatatcgcggtatgggttctttaggtgcgatggaaaaaggttcaaacgaccgttacttccaagaagacaaagcgcctaagaaatttgttcctgaaggtatcgaaggacgtacggcttataaaggtgcgttacaagatacaatttaccaattaatgggcggtgtgcgtgctggtatgggttatactggttcacacgatttaagagaattacgtgaagaagctcaattcacacgtatgggtccagctggtttagcagaaagccacccacataatattcaaattacgaaagaatcaccgaactactcattctaa

SEQ ID NO: 419778 - DNA, 183 bp, Staphylococcus aureus
atgggagatatagcccatcaattaggaaatcgtcatttgccagcacaatttacagagactgaaatgctagtacaatatgattatttagttgaagatttattaaaaagtttaggcatcccatatgttagagaagaccgtaaagttaataaggcttttagacatataggacattctcatgattga

SEQ ID NO: 419779 - DNA, 1242 bp, Staphylococcus aureus; identical to SEQ ID NO: 419777

SEQ ID NO: 419780 - DNA, 1542 bp, Staphylococcus aureus; identical to SEQ ID NO: 419776

SEQ ID NO: 419781 - DNA, 354 bp, Staphylococcus aureus; identical to SEQ ID NO: 419775

SEQ ID NO: 419782 - DNA, 264 bp, Staphylococcus aureus; identical to SEQ ID NO: 407709

SEQ ID NO: 419783 - DNA, 390 bp, Staphylococcus aureus; identical to SEQ ID NO: 407710

SEQ ID NO: 419784 - DNA, 1212 bp, Staphylococcus aureus; identical to SEQ ID NO: 407711

SEQ ID NO: 419785 - DNA, 327 bp, Staphylococcus aureus; identical to SEQ ID NO: 407712

SEQ ID NO: 419786 - DNA, 492 bp, Staphylococcus aureus; identical to SEQ ID NO: 407713

SEQ ID NO: 419787 - DNA, 618 bp, Staphylococcus aureus; identical to SEQ ID NO: 407714

SEQ ID NO: 419788 - DNA, 306 bp, Staphylococcus aureus; identical to SEQ ID NO: 407715

SEQ ID NO: 419789 - DNA, 705 bp, Staphylococcus aureus; identical to SEQ ID NO: 407716

SEQ ID NO: 419790 - DNA, 327 bp, Staphylococcus aureus; identical to SEQ ID NO: 418101

SEQ ID NO: 419791 - DNA, 153 bp, Staphylococcus aureus; identical to SEQ ID NO: 412471

SEQ ID NO: 419792 - DNA, 408 bp, Staphylococcus aureus; identical to SEQ ID NO: 407717

SEQ ID NO: 419793 - DNA, 483 bp, Staphylococcus aureus; identical to SEQ ID NO: 407718

SEQ ID NO: 419794 - DNA, 327 bp, Staphylococcus aureus
atgaagttatttgcttttatcttcatatgtgttaagtcttgcagcttactatttatgttaaatggcaatcctaaaccagaacaattgaataaagcgagtgaattcactggtctaatggataatatgaggtatttgtatgatgataaacacgtatcagaaacaaacattaaatcccaagaaaagtttttacaacatgatttattatttaaaataaatggttctaaaattttaaaaacagaatttaataataaaagcctttcggataaatataaaaataaaaacgtagatttgtttgggacaaactattataatcaatgctatttttaa

SEQ ID NO: 419795 - DNA, 690 bp, Staphylococcus aureus
ttgaaaaatattttgcattttaaaaatttaaaacaagttattaacgaattggatatagaacaagaaaagctgatttttctaaatgttgaaaatcataaactgcttaataataaagaacgagatttaagtaatagtgctccattaatttataagacattaagtgcgctgtatcataactttgatggttttggattaaacatttttgataatcatcaaacatttaatgcgatgcatctatatgataaaaatggatttaaaacaacactaggtcttatattagaaaagtttatcgaatatgtctcgaaaccaaaatacgaaaacagttattattctatttttgatatagagaattattattgtctggttatttatgattggcgagtgattgagagcgagacaattatgagcaattttgaagatagtcaagtttatataaatttcaaaaataatgttttaaacgataaatatctaattgtaatagaaacgttagatgaaaatagtgggaacattaatcatttgatctctaaagaattaagagataaatatgaatggaaccccagtttactctctaaaattgacaactaccttaaaccggcaatcgagattaaagagcataactttagtaataattccttaaatattaacgttacttttaatgcgttatacataattaaaataggaaaaaaataa

SEQ ID NO: 419796 - DNA, 1191 bp, Staphylococcus aureus
atgaaatcttgcccgaagtgcggacaacaagcacaagatgatgtacagatatgtacacaatgtggacataaatttgatagccgtcaagcattatatagaaagtcaaccgatgaagatatacaaactaataacatcaagatgagaaaaatggtgccttgggcaattggttttttcattttaatcttaattattatattgttctttttactaagaaacttcaattcacctgaagcgcaaactaaaatattagtgaatgcgattgagaataatgataaacaaaaagtagcaacattattaagtactaaagataataaagtagattctgaagaagcgaaagtatacattaactatatcaaagatgaagttgggcttaagcaatttgtcagcgaccttaaaaatacggtacataaattgaataagagtaagaccagcgtagcttcttatattcaaaccagatcaggtcaaaatatattacgtgtaagtaaaaatggcacgcgttatatctttttcgataatatgagctttactgcacctaccaagcaaccaattgttaaaccgaaagaaaaaacaaaatatgagtttaaatctggtggtaagaaaaagatggttatagctgaagcaaataaagtgacgccaataggtaattttataccggggacatatagaattccagctatgaaatcaactgagaacggtgattttgcaggccatttaaaatttgattttagacaaagtaattctgaaacggtagatgttactgaagattttgaagaagcaaatataactgtaactttaaaaggcgatacaaaattaaatgatagttctaaaaaagtaactataaatgaccgtgaaatggcattttcaagttccaaaacgtatggtccatatccacaaaataaagatattaccatttcagcttcaggtaaagcgaaagataaaacatttacaacacagacaaagacgattaaagctagcgatttaaaatacaatacagagataactttgaattttgacagtgaagatatcgaagactatgttgaaaagaaagaaaaagaagaaaacagcttgaagaacaaattgatagaattctttgctggatattctttagcgaataatgctgcgtttaatcagtcggattttgattttgtatcgtcatatataaaaaaggatcatctttttatgatgatgtaa

SEQ ID NO: 419797 - DNA, 165 bp, Staphylococcus aureus
atgatgattagttcaccacaaattatagatgccgaaaaacatggtgataagattaccgcaaccgtaagattaataaatgaaaacggtaagcaagtagataaagaatatgagcttgaacaaggttcacaagaccgcttgcaattaatcaagacatcagaaaaatag

SEQ ID NO: 419798 - DNA, 186 bp, Staphylococcus aureus
atggaatcatatgaagaaattgagcatatacacattaacactggtagaaaaaaacttacacaagaacaaatagaagaagccaaagcttttatagacagtcaaggatttaaagatatgattcgagaagctaaagagtcacgtcaaagagttatggagtctaaaattaccgatagaactaaaatgtga

SEQ ID NO: 419799 - DNA, 330 bp, Staphylococcus aureus
atgccaacagttatattaacagaagcagctgcctacgaagtaaaagatatgcttaaagcaaatgaaatgccagatggctatttaaaaattaaagtgaatggtggcgggtgcactggtttaacatacggtatgggtgcagaagaagcgcctggtgaaaatgatgaagtcttagaatactttggattaaaagttttagtggacaaaaaagatgcacccgtattaaatggtacgactattgattttaagcaatcattaatgggtggcggtttccaaatcgacaatcctaatgcctgtctcttatacacatctccgagcccacgagactcctga

SEQ ID NO: 419800 - DNA, 531 bp, Staphylococcus aureus; identical to SEQ ID NO: 407478

SEQ ID NO: 419801 - DNA, 354 bp, Staphylococcus aureus
atgattacatatcaaaataaaaaagttttattaatgggcgatgctagtaaaaataatgaatatttactactaaaaaaatataacttgccggagattgatattttaaaagtaggacatcatgggagcaagacaagtagttctaaagaatttatagagatgattaagcctaaaataagtttgatttcttctgggaagaacaatatgtatcatcttcctaacatagaagttgttaaacgattgcaaaggattcgcagtcgcatttacaatagtcaacaaaacggtcaagttacaattgacttagatgataatttaaaagttgattcaaactcttatagaaatgcaagtggtttatag

SEQ ID NO: 419802 - DNA, 147 bp, Staphylococcus aureus
atgaaagacacattaatgagtatacaaataattcctaaaacaccaaacaatgacaatgttataccttacgtagacgaggcgattaaattaattgacgaatctggtttgcattttagagtaggtccgtttaatacaatcattaaatga

SEQ ID NO: 419803 - DNA, 723 bp, Staphylococcus aureus
atgaatagcacaggtatgcaagggtggaaagattataagtctttaatgaatcaagtgaagttagcagattataatttttcaaaagagtctaaaggtgcttcaatggaagatgttgataagttttttaaaaataaaaaaggtgtaaaacgtaaagaagttactacttatgatggtttgaaacaagttaactattggtatgtagataaaagtggtaaaaaaattggtggttcagacacacctgttttttatgctgaaattttaacgaaatataaagatggaaagttgatttatgcatcagttgaacctggatcatattcatattcaaataagaatgcggtaaatctagataaagttgaagaacttgatgatttaagtatgttctctaatctgaaagatcctaaaccagtaccatatagtgttgctcaaatggaaatatcaagcgtcccagttacaagtgtatctttcgtaacaaagggagggaatcataaagatactaatccagagaaagaacaagttgatatgccacaactagcttatttaactgtttcaccacagctataccatgataaagagcatccagatccgcatataattggattagttgccttgccatacttaaatgcatctagagattttgggaacgcgcattactctgttttaaataatctttcaaaagaaatgaaagagaaattagcgagtcgttcattggaccttaataaatag

SEQ ID NO: 419804 - DNA, 480 bp, Staphylococcus aureus
ttgataagtaagcataaaactgaacaagtaccaagattagaaatgttagaagattattatttgaataggaatacagatattttaactgataaccgaagaataaatgattatagtgataaagctgaccatagagcagtacataattatgctaagtatgtcacacgctttatagtcggttatttaactggtaatcctataacaattacacataaagacgaaatcacaaatgaaaaattagttgaccttaataaaatcaatgatgcagatgctacaaatagtgatttagctttaaatctatctatttatggtcgagcgtatgaaattgtttatagagatactgatgataaagatacattcaaattattagatagtaaaagtacatttgttgtatatgacacttcactagataaaaatatgatagcaggtgttagatactttaatgttaaagattttgacaatacaccaatatacaacaaataa

SEQ ID NO: 419805 - DNA, 594 bp, Staphylococcus aureus
atgtatgtcgatagtataaatatctttagaagcttccacgcaatctctagttttaaattagaaaatttgtgtagcttatatgatatcgataaagaaaaattacattctgctaaatttgacgtgctagctttatcgaagatgttgatatcactcgctaaaaacaatcagcattatagtgtattaaaattaatacattatatgcctaagcaatacattagatttagcaaatattctaactctccaactaaacttttcgattcaggatttcaaaaaattcatatgaaaatatctgagattaataaaatagaagtggaaagtgtaatccctattttaaaagataaaaatgttgtttttacaggtaattttgacactgaaaaacaagatttaatgatattaactagaaagaaaggagcttatatcagaagtgacgtaactgcaaaaacagatattttagtcgaaggtgttcaagatgataaatataaagatgtgaacggactagtttcaaaacaacgaaaagctcgagaatatgttggaaatggtgcaaaaattcaatttttaaatgaagaagacttaataaatttaataaaggaataa

SEQ ID NO: 419806 - DNA, 231 bp, Staphylococcus aureus; identical to SEQ ID NO: 418109

SEQ ID NO: 419807 - DNA, 2991 bp, Staphylococcus aureus; identical to SEQ ID NO: 407684

SEQ ID NO: 419808 - DNA, 1227 bp, Staphylococcus aureus
atgtttaaaaagaaaaacaaagataacaacaaggaaaaattaaaagcgattaaaaagaaacaaaaatcccaacgtaaacaaaatgaatcaaagaaaaagctaacaaaagaagaaaaaaaggaaatgaaacgtaagcgtaaggaatttaaagccaataaaacaaagtatgatattgaaggtggcattggcggcgataaagaccctagaactaaacgtgatattaaaacgacttttattgccatattcgctattgttttatttgctttcagcactgtactttgtggatttggatttcaggcttacggcaatttcaagaaaaataacactgaagaattcggaagtaccaaatcattcacacaagctgatgctaaggttaaattcagtgaagtatggacggataaaaacagagatgtaacgattgttaaacttggttatcctgataacacaaaagaaaagttgtctaatagaggaaaagcctacaaattgtatatgaatccaaagggtacgaaacctaaagttaaaatggcatacggtattctaggtattgaaggtgacggttacttatttattaaaggtaagttgaaagaccaaccttatcatattggtattgaaaatactttaagtctaacaacgaaatcaatcactcaatcttctagttcatctactaatatagatgaagaagatggcttagaaagtgctatttcatctatgaatgatgatggttcttcaaattcttggtttggtaatgatgataaagctaaaaaagctaaaaacgaaagagatttcattaaattcataatcaatccttattcagataatacaaaagtatataaaggaagcttcttaacatcaacaggtgatattgattattcaaaagtaatttctcaaacaagtaccgattctgctattaaatctaaagaaaaagaaaaaagtaagcatgaatctaatttgaaagacttaaaatctagtaagagtgaatatgaagaccgtgtaaaagaagagaaaaaagataaaaagtctaagaagaaagataaggataaagataaggataaagatgttggtgataataaaaccaaaaatgaatctaacctagaaaaaacaaaagaatctattaaagaagaagaaaaagaaattgattcattaaatgaagaaattaataaacttaaacattctaattttggtaaaaaagattttggaagtatgcaagagaaagcaacaatatactag

SEQ ID NO: 419809 - DNA, 1926 bp, Staphylococcus aureus
atggatttttctaatcaaaattataataactcaaatagtaaagcgaatgagttctttgaagaaatgaataaagaattgggaaatgcattatcaacattatatgaacctgagcatagtgttataggtagagaaaaagaaattaaacgtttaaatagaattatgaaacgccctataacaaaaattgctctcttaattggccctgctggagttggtaaaaccgctattgtagagacatggttaaaaaggagacgtaaaatcaaacccaatatggctttctttacaatagatttgggtgctttaagtaaagatggaaattcggtattacaagctagattagaaaagttactacctctattagaaaaatatgaaaaattgctacaagaagaaaaacctgatgcagaggtagtgctattcatagacgaatttcacagattaatatcaatatttggctcaggtacaaaagctggcggagatacaatcaaaccttatatagcacgtcctactattaagcttattactgcaacaactgaagctgaatttgaaaactatattgctaatgacgatgcatttgatagacggttaaaaccattaccagtcaaagaacaaaacaaagaagttattaaacatattttacaagaaagttggttaagtacttattattatccatacaccgatgacaggattagcgataaaattctagacaagattatcacagcaaatagattatacagacctaacaaatatgaaccagctatctctattgatgttttagaagatgcaattgctgcacatgaagatgataatgttcctatagacaataaactcataaatgaattgtttgatgattatggtataagtctagatttccaagccaatttcaaagacgtatatcaaactatattaaaaagagttattggccaacctatggcactctatatggttggtcaagccattaaaaaattaacctttaaaattgataattttagtaaccgtcctaagtcaacaatgctttttattggtcctagtggtgttggtaaaactgaaatgactaaagctttggcggaaggattataccatgacgataatcaatataaatttttcaacatgtctgattattccctttctaattcatcacctatgtttaggaaagatttaggaaaatctgttaaacatgatactgacactgtgattttaatagatgaaatagaaaaagctcacaaaaatataatcaaagacttcttagctattctcgaagaaggaatagttcgatatcatgaaaaaggtgcagatggttatatggttactgctgaagtttcgttgaaaaatacaataattatagcaacaagtaacgttgctgctgaattatttaaagatgtacaccaatatagtcgcctaagaactactatcactcaagaaaatatgaatgagtattcagcctctctaaaacaagaatatagagacctcgagggagatattcatgacgctttaattgctgctttttctcctgagtttgtaggacgtttttcaaacatagttccattctatgcactgcatgaaacgacattgatagagatttgtcataggagtatcatgaatcttataaaagatttaaatagtcgtcctgaaggctataacattaaagttagacagcctaaaaaatggtcgcacggtggatacgatattgtagctagtgagttaacaatgtatgtttgttttgaactggctaatattgatgattctaattttggtggggctcgtgcaataatgaggtatattgataacgaaattttccctagtattttagatgcaatattagataatcctgataaaagacgattttatgttcacacaaatggtaagtgttcatttgaaaatcctgattatcaggttggtttgggagatattgttgtagaacccgcttcctaa

SEQ ID NO: 419810 - DNA, 3363 bp, Staphylococcus aureus
gtgcagcataaaacacgtgtgattacattaatcattgctatagttatgctattttcagtgtctttagcttttttatcaacacatagtgcttccccactacctcatcacaatacagcatatgctgatgaaaaagataacaaagaaaatgagggagataaggataacaaagataataaagaaaataacgacgaacaacaagacaccagcgacaccgaaaccaataatgatgttaaatctttaatggataaagcgaataaaggtgaaacatctaaagaagaagacaatgaattaaaaaaactacaaaaacaaaatatcgttaaacaacaaggcgataaatgggtttctggtgatgccttccaagcagacaataaaatttggacgttatattcccgcatcttaatggaatctggagatgcaaaagctaagaaagatgataaaaagaaagacaaaggcgttcaaaaaatggttaaaaatgcgattggttccttcatgggtgacggaggtgtagaagttgatatacctttcaatgaaatgtattcaattggcgttgatttaggtaatcaaaatggtgataagaaaactaatacacaagcaggacgtcaacttgcttcattcttctctaccttttctcattatggctatgtagaaaccgttgctggtaatacattagctgccaaagcagatggcgctatcaacacgataatgcgatatgtcgcaggtttattctgtctaggtgcgattttgatacatggtttcttcaattcacttcttggttggatagtcagcttcttagcgaagtttgatgtgttttctattttaggttataacgaccctgaacagttaaaagaaaaagcatcaaatccatttgttaaagcggtatatggctttgttcaaggtattggcttatctcctgcctttttcaatttcttagtattaacaggattttatgccatagttggcttattcgtattccgtatgatgcgtacattatcatctgatgcattccatttcggacaattcagtgaccataccaaacgattaattatacgatttctaactttcttccctgttcctttacttatcattggattagtgagtgggttcgccagtcagttagataacatacaaaataacaagaagtttaacccttctcctgctcaacaatacattttaaatgacagaaaatgggcagcttcacaaaacttatcacctaatgccctacaacaagaaaataaagcacctaatgcaggctcagatacacaacatattgatggtgactatgcaccaagtaacgcacgtaacttaattagtaatatcaactatgaatcttataaccgcatggataatattaacgacgaaagctcaatgaaaatgagtttagatttgatttttggttatatgcaaaatggtaagtttaatgttaatacgtatatgtcggatatccgtcaaacccctgcttcaggtgatgacccaacaagtaaatattccgctttccaaaatattaatagtttaggtggaaaagtgaatcaacaaaactataaagactatatttggacgtccaaacctgtatcaagttcgaatgaagaagaagctaaaccgacagacaaaaaatataaaccacaagcacaagcaggcgttgacggtaataagtcgttctcaacacaatcggttgcccttatgcttcaaacatcatttgaagaccatgcggctaacttttatgcttataatattccgcctaccggtatacaaggtcaagctaaaaatatgagtacggttaaaacagaatggcgagaatatacaatgcccggtgaaggtttattaggtaaatcagggtcttacatggctatgattacacaagctattttccaatcaattgtcatacttggttgtattcatgcattaatctttacgaactttgctagagcaacaatcctaacagtaaaacactggcttttaggtttaagtacaggtaatccagcacatatgcttgtctgcttattactcggcttaacagcgccattaactggatttatcgcttatgcgttgccgtcactatttgtttcagccattaatttactcgcacaaggtgtcaatggtgttgttaaagcttttggtgttttaaatgtcgatggcgttatcgacttaggtaaatcaatcgtattcatatttgcaggtttctacttagttatttcaaaaaccatcacaggtacaaatctcattacaacaatcattggtctacctacagatatcggacttaacttagctaagcgtgcccaatcaatcatgcgttctcgtcaacaattcagacacgcaatccgtttagcaaatcgtacagcacgtcaggttggcgcatcatcagcaagtaatgcagcatcaggtatgaataaaagtacgatgggtgcaacatggaatgccgcaacaacaccttccgaatgggctagtcatggtgtgaattatgtaacaaataaaacaacaggtaattctaatggtcaaaaaggtggcactggtggagaatcagctaacgcttttgcagctagacaaggtggtgcttctaatactggccgaactggtacagctagaagtacgttgctcggttctcaaaatccaaatccatcaagttctcaaaacccttacggtggtaataactactttgtaggtgcaagacagccaatggttggtagtcctgcttctattacaaacaaaggttcaaatggtcaaaaaccaactgaccctgaaaaccataaacgtaataatcaatataaaaacacagcgaactcattaccatcagcgatgaaatcaggttcagccaatgaatttgcgaaagatattagtaaacaaaatcaagctgaagcgaaaaaagctggagaagctcaagcgaagaaagatgttaaaaatgcagaggctcaagttaatgcaagtacagataatcagtcaccacatgtatcaaatgatggttatcctacaacaccaagtggcagtcatgcatcacgtgaatcagcaaatgattttgcatcacaacaaccaccattcagtgataaagaattaaaatcattgaatacatcaaacaacgaaaatgacttccaagaaaaactatattatacaaataatggtcaatatgcagcactcagccaagacagtgctaaacaacaattacaaggcacaaaatttgtaaatgatgatggcgatattgactataataaagtagaccaattcaatgaaagcattaacggtaagcatttagaagatttagatgccgaaagcatgagacaaaaagaacaacttgatttcgctttccgacaaggagcatcatctatctacagtaaatatgataatattgacatagataataaaggtaaaaaataa

SEQ ID NO: 419811 - DNA, 300 bp, Staphylococcus aureus
atgaagattacatttgaaaaagatacacctgaagaaaaagctaaaaagaaagctgaacgtaaagctaaacgtaaaaaaaaatatggtcatttagcacaagcacaagaaggtagcctagccaaaatgatatccgataggtttaaaaaagaagaccctgaaaagcgtaagtttttcgatgatagtagagattttgatttccttaaagaatctcaagaaggtagtgccattaaatatgcaaaagatatcggtaaacgcatgtttcctaaaaaagaagaatctaaaaacgatgataaaaagtag

SEQ ID NO: 419812 - DNA, 1116 bp, Staphylococcus aureus
atgaaaacgattaaggtaagattaaaaccaaccaatgagcaattaccattatttcatcaatccagcggtacacaccgttttatttataattggacacttgctaaacaacaagacaattacaaacaaggcggtcagtttattaacgatggtgaattaagaaaagaaattacccaacttaaaaagcaagaggcgtatcaatggttaagtcaagttagtaatgatattcctaaacaagcgattaaagatgcttgtctagcctatcgtcgctttttcaaaggtcgagctagattcccaaggtttaaaagcaagaaacggtcaaaatggtcgttttataacgataccgctaaattaaaagttaaagaccatcgagtattacttgctaagattggttgggttaagacctcagaatcaatacctaagaatcaaaagtattataatcctcgtgtttcattcgatggtaaatattggtatttatctgtgtctattaatgtggatatggataaaccacaattatcagatgaaagcttgggcatagatttagggattaaaaccttagccgtttgttcaaatggtcagacttttaagaatatcaataaaacacatcgtattaaacaaaaagaaaaacgattacgtcggttacaacgtaaggtatctcgtaaataccaaatgaataaaaaaggaggaaacgttgtcaagacatgtaacattataaaaatcgaaaaagaaattcgtttactacaacgctcattatccaatatacgtcgaaatcatttacatcaaaccacaacgtctatcgtgaaaaccaaacctacacgcattgtgattgaggatttaaacgtacgtggaatgatgaagaataaacatttagctaaagcaattcaaaaccaaggtttctatgaatttcgtaggcaactcacttataaatgtgattggtatggaattgaattagtggttgcagatagatattattcatcgagtaagacctgttcatcatgtggcgcaattaagaaagatttaagactttcaaataggacttatatatgtgaatgcggtcatcaaatggatagggatttaaatgcatctattaacttagctaactatcaattggtaagttaa

SEQ ID NO: 419813 - DNA, 888 bp, Staphylococcus aureus
atgagaaaatatattttattatttgcaacgttagttctaatgattacactggcttcatgttccaagagtaatcctaaacaaaagaaaacaacgaaagacgatgaaatgaaagtcggcgaaatgatgcaagaaaacaaagagcatgtttggttcataggtagagatgatgaaccattagacaaaaatactaaaattgagaggtatatcattactaaaaatggcaaaatgaaagtatatgttgctaaaacgattccttcgcaaaaactaggcgacctacttaaaaaagatgaaaaatctttaattaaagatattaaagagcaagatgagtggtttttcgattttgatgtagctgatatagttgcaaaaacaaacgctgatattgaaaatgccaaagacttgaaaaaagaaggctatgacgattacagcccttctcaagattcacacggtggaactgattacgcagttctagaaaaagaaaatgaaaatcaaagccccgaagaatctctaaaaaaactagagaaatataaaaaagatgtagacggaatgccttacaaagcaccaaaatctaaaaacgttgatttgcgttctattggaagcggagaactagaaatttctatcgcaagaaattatggttatcctaaaatcatcggtactggttcagatgtcgataactctaaatcactatctttcactagcacagaaaatccaaaatctattgctggtaagaaagtagctggtcttagcaactatgacgaagattcagaggcaagcgcttatccttatttagtaactgttgttgatgataaagttaagaaagttttactagataaaccatctgaccctgctatcaaagacaatcaaaaattcaaacataaaaaaggctcataa

SEQ ID NO: 419814 - DNA, 816 bp, Staphylococcus aureus
atgactaacgaaaacaatttaaatatcattcaattcgacgaagatattaatcaatacatcaactttgaaaacagacaaaagtgttcaggtaaaaaacaagccacacaatatacattttatcgcttatataaattcttactattcgacaataaatacaaacatcttgatttaaaatcaaaagctatgtataccttgattgattatgaattcaaacattgtaaaaaaaatgggcaatattttacagatagaaataatgatacatacattaaatttgatactgacttttttagagcaaagcttaatatgagcattaatactgtcacaaaatacaaaaaggaattaatagaatatgggcttattagcattgtctcacaacgaggtaaacaacgcctttacttaaatgaacctcagctaacttctaatcaatatatatatcattataaacaaaataaaaagcgtatgttcacatatatagaactgcctaaattcttattcgagcttgaatatgaagcaatcacattagaagcagcactcatttatagtttgttgagagataaccaatatctttctattgaaaatagcaaacattctaaatcatttgtagataagcatggcgatgtgtttacgaaatacagttatgctcgtattacagatgcattgaatatcaaatctaaattaacacttaaaaaacatatcaataatctaatagaaaacggcttacttatcgtaagtgtaccttataattccataacacaacatcactactatgtcttagaacctatcaatatgaatagaaaagaagaaaataaaaaataa

SEQ ID NO: 419815 - DNA, 1431 bp, Staphylococcus aureus
atgactaacgaaaacaattcaaatatcattcaattcaacgagcatattaatcaatacatcgactttgaaacaagacaaaagtgtttaggaaaaaaacaagccaaacaagccacattttatcgcttatacaaattcttactattcgatgataaatacaaaaaacttcacgtaaaatcaaaagcaatgtataccctagttgttgatagattcttacattgtaaagccactggtagctattttatagataaaaataacgatacatacattgaatttgatacggactttttcaaagcaacgcttaatgcgagcattaattctataacaaaatacaaaaaagaattaatagactgtgggcttatttgtgttatctcgcaacgaggtaaacaacgcctttatttaaacacgccacaattatcttctaatcaatatatctgtcaaaacagacaaacgcagaaaaccatgttcacatatatagaactgcctaaattcttatttgaacctgaatatgaagcagtcacattagaagcagcactcatttatagcttattaagagacaaccagtacctttctattaaaaacagtacaaaatctaaagcatttgtagataagcacggtgatgtattcacgaaatacagttatgctcgtctaacagacgcattaaatatcaagtctaaaaccacgctaaaaaaacatatcaatactttagtagaaaatggtttgcttatcgtgagtgtatcaaaacgaaaagtattaagtcttttcacaactcaataccgcttctatgtcctagaacctattcatacagaaacaaatgaagaaccacaaaaagaagaaaattcacagattcacaatgaggttcataataatttttcgacagaatcacaaatattgaaatatagtaacaacaatactaataacaacataaatataaaagcaccatatatatcagaggcagattcaaaacaaaatatcgtttcattttacgaagcaaaaattcaatatttagaagcccaaatagataaatacgtacctgaaaccattaatgaccaacatgtacttaaaaaacaattgctaaaatctttcccaaaatatatcagtacattagttaataactacacgtctactattcaacaagcacaaaaagttatacgtgtaatttgtggtgcaaaaaacacgtataacaaactctataaaactaactacaacttagaagatttagaaatggaaattggccatgcagtaatccgtgtgaataatcaccataagcgcaaaaacaaaaatatttcagaagttagtaattatctatttgaaagtattaagaacgtattcaaaacacaacacgaaaaagattatgaaaatggttatattgcgacaaatcctgatatggctttatttggagactttgcacaagtattcaatttagcaaattaa

SEQ ID NO: 419816 - DNA, 720 bp, Staphylococcus aureus
atgttaatacatgctaaacttaatggcattgaagaaaaagtagaaaagttattacagagtgaaataacaatcaaagaaataagtgaagatacaggtatatcagaaagtatattaaaaaaactaagttcaggggaacaaagtatatctaatgctaaatatggcacaatacaacaattatataattattacattgaacattcagataatatatcacttcactctaatagcacctcagactatagccaagtgaggttacctaaaaagatgcgagacttaatcaaagatatcgacaaagcaattgaagatgtaaaccaaaataagcaaacggttatattagaagttaaagatgtatatactaatcaaaaaaatggcaatgtatatttcaaaagaaaagaattagaaattaatgatgttataggtttagggttagatgaaacgacggaaccaagaggcataagagaaccatataaaatcataattagaacaccttttacagataaaattagccatattaatgaatttaaaattatttttgataaacagaaattgattaatacgttaaagcaaatcaaacatgaaggtggtaaagtttgggttaataaaaaagaatcaacgagaggaatatgtgtacaccctaagaatacatctatcgaaaaatttaaaaattatgattatattggtggatttgaacgtttcttcatgacaatcgaagttgaatga

SEQ ID NO: 419817 - DNA, 333 bp, Staphylococcus aureus
atggtaaatcaatatgatgtaatcaaattagatttcaatccggtcataggtaatgaaaaaggaaactatcgaccttgtttagttataagtgattctgaatttaatcatgtgtcagggttcatttgggttattccgattacaagtagagacgatgaacgatacccaacagatgtactagtggaaaccgaaaatcaacgtatacatggcgttatcgactgcgcacatattaaatctgttgatattcatgcacgtccatatcgacattttgatatattaacttctgaaaaggtaattgaagttaatgatagattgaaaggtatattacatctatga

SEQ ID NO: 419818 - DNA, 249 bp, Staphylococcus aureus
atgcaaacaacatacgcaaaaatatataaaagtggtaacggacaagccattagcctaaaaaaaagaacattagaacaagcaggattaaaagttggcgacgatatcaaagtgaatgttaaatcaggacaagttgttttgacaaaaactcactcttttaatgaaaaatggagagattttgttgataaaggtggcaaatatgaacgtggtgagtacgattggggtcaacctgtaggacgtgaatcatggtaa

SEQ ID NO: 419819 - DNA, 201 bp, Staphylococcus aureus
atgattattgaaacgatagaaagacttttagcaagcgatttatctgcttattatattcatcaacaaacaggcgtaacggcgtctagtattcaacgtttaagaagtggtgaccgtaagataagtaaactcacattagatagtgccgaaaagctttatatgttccaattggaattagaaaaggctaatcaatcccataattga

SEQ ID NO: 419820 - DNA, 1110 bp, Staphylococcus aureus
atgataaaagcttataaaaacgaaatccaacccactgataaccaaaaattagtcattaatcaaaccatcggtacatgccgttgggtttacaacaaatatatagcagtcaaccaatatcagtatcaccatggtttaaaacatatgtcgggttatgatttcagtaaatggttaaatcatgtttaccttcccagtaaccctgataaatattgggttaaggaaagtgccagtaaggcgattaaacaatccattatgcattcccaccaagcctatcaatatgcttttaagaaacaaaaagggtttccaaagtttaaaaagaaatccagtataggcagttattacttaatcggtacgattcatgtagaacgccatcgtatacaactccctaagttagggtgggtcagattaaaagaaaaaggctatattccttctaacaatattaaatcagtcaccatagttaagcagtttgaccgatactatgtgtctgtattggtaaacgaatcacctaaacctatgtttaaatcaaaacaaacggaaggtttaggacttgatttaggacttaaagaaacactatttagtccaaatgggattgagattgaaagtttaagtaaaaaccaaagacttattaaacttaacaagtctttaaaaagacaacagcgaaagctatcacgtaagaccaaggcatccaataattggtttaagcagttattgaaagtccaacgacttcatcaaagaatcaatcatattaaaaaagatattaaaagaaaaagcactttatctattgtccaacgaaacccacaatttatcaccattgaaaagttaaatcttaaaggtttaatgaaaaatcaacgtttatctaacgtctttcaacaggttggtttagggtacgtggtggaatggttaaaacataaatgttatcaatatggcatagaattacgccaagtagaccgcttttatcctagtagtcaaatatgtagtcaatgtggaaacaaacaaaaaatgcctttatataaaagaacatatcaatgcgataattgtggattagaaatagatagagatatcaatgctagtattaatttaaaacaagccaaagattatacggtgattgtataa

SEQ ID NO: 419821 - DNA, 147 bp, Staphylococcus aureus
atgcctaaatcctacacgaaaatttctaaaagtggtaacagacaagttgttagtttgaaaaaaagtacatttattcatgtgtttagttgtcgtatttatggtttacgtaaatataaaaaacaaatcaaagatgatgatactgtatga

SEQ ID NO: 419822 - DNA, 399 bp, Staphylococcus aureus
atgattcctgaaaaatatcaaaatgaaacggactatagaaatatacctagacaatatttaaatcctagaatacctaaaggtagaggtaaagtaaaatggtctgcatttgccagtattcctgctcaatacgaaatgctacagcaacatattgatgaccaaaataaaacagaacgtcctcacttatctgaagaccaacttatgataatcaatgaaactgttcatatcaaaatgaataatcatgacccagcactaattgagtattggaaacaaggttatttttataaacaaatagcctttatcaaggaaatcaatattttagaccaagtgttagtgatatcaaatgaacaaggaaacgaaacattgaagctaccaatgaattccattaagcgtatcgaataa

SEQ ID NO: 419823 - DNA, 681 bp, Staphylococcus aureus
atgagtgaagcaataataaattatcaaaaaacaatggatagtataaagagcaatacacaacttcaatctagtattttacaagcaaccaatattatcaatagtccaagttatcaaaagttatttagtagcaacatattaaaaaaacaatcaatagaaatatcatcagcatttcaaaaagcaattagtcaaagtaatagaattgctgaagtaatagaaatacataataatatatttgaagaatttagacgaaatttaggtcataatcaagaattatttaaagttttagaaaatgttaaagttcctaacatagaaacgataactaagattattagcgaacatgaaattataaaaatgggtgattggaacgtatcatcagaaacaaccatagaagatataaataagatggaatacccacaggaatttgaacgtgaaaatattaaagatgatatttctattaaagaaagaatggaatatctaacaacgaaatactttgtgccattatggaacgctattgttgaggtaaataaaggaacattggataagacttctggtgttacttatgagttatatttgagtgatagcgactggtttacgttttttgcgatgataaacacaattcaatttattatattcatggtttatagcaatgctagtgataaaaaagaagaaaaaaccaaataa

SEQ ID NO: 419824 - DNA, 273 bp, Staphylococcus aureus; identical to SEQ ID NO: 407792
